United States Patent Application Publication US 2013/0096032 A1 - sequence listing, part 3

SEQ ID NO: 64 - DNA, 75799 bp, Arabidopsis thaliana
gaattcgaaagaataactctggttcttaatctgatatggccgtatggagattaagttcatatgcccttcttgtttaaattctgaaatcaagtatgatgctggtgttattcaatggcaggttgcatccttaatggttgaggcatttgcttggttcgccatgcttgttttgattggacttgaaaccaaacaatatgtcaaagagttccgatggtacgtgagatttggtgttgtatatgttttggttgctgatgcggtgctgctggaccttgtgttgcctctcaagaactcaatcaataggttagttattctatttgagtgatttgatattaaaactttcaaaagttaatttatatttcttacaatcttttgaaagtgggaaaaagttttgggcattggtagctgtagctttaaattccatattaatttttcctctatttgccctagcagaactgccctatatctctgtatcagttcaagatgttgccaggtttgtcagaacatggatacgtataagcttgcaattcattgttctaggaacaaaagcttcagactttataatggtttacgttttcatttgttttctgtcgcaggctctttttggaatccttctacttgtttacattcctgaactggatctttatccagattaccatattctaaacaatgaatcgttagacaatgttgaatatgatgcactgcctgggggagtgaacatatgtcccgagcgatatgccagcatattttctggtacatagcccctgaattgataaacaaaatgtttcccatgttaggcaaataatatacaatagccatgatttctttttgttccactgatttggatttcttatttacttattgaaaaatgtaaggaatatactttagttggatgacgccgcttatgcagttaggctacagaaagcctattactgagagggatgtttggcaattagaccaatgggaccaaacagaaactctgataaaaaggtatagcagtagtgctgctttgcttctgccttctgcagtattacttcttttatatctatgttaaaggtttcgttagaatcaagtaacattcttattcattggataagttatttgacagattccaaaggtgctggactgaagaatcacggaggcctaagccatggctactccgagcactaaataatagccttggtcgaaggtaaaaagctgacaatttttctaaaaaccgtctattccactgtagttgtccgtaaagccacacattatatatactggcattaattttttctttcccgtctttgtaggttctggttgggtggtattttcaaggtaaggatactgtggttgtgctctttaaatcgtgtttgcttgaacttgttgtctctcggttggttaagatagatcctaaaaactctcttattgttattttcttgtgcatcaggtctgatctgcatccacagtaatgttcagttctgtctttgacaactctcaagcaatttatacatcatgttttagcgtgttacaggttgggcatgatctatctcaatttgttggaccagttatactgagccatatcctgcaggcaagctttctttatggcccataatttatgttttccacgtactcaatgttcattatattttggctatgcagattatctcacagttttaagactgataatttatgagcattttgtttgctctatatcagggatcttgctgaccttatacgcaggcaatatatattgatctaacttaaacatgtctttgatcatttaatgtagtcaatgatagaaggtgatccagcttgggttggctatgtctatgctttcttaattttctttggggtggtatgtatcacaaaattcgtctctgatctctaaaatactattgggtcacttactttttctctaaactgtcgtgtttcattttctactcttcctcagtgaatacacaaaaaatcttcacaattttagttctcgtcttattgtttttcttgttgaaacttctgaaaagctcttctgattttgtttcagacatttggagtgctttgtcaatctcagtactttcaacatgttgggcgagtgggatttcggttgaggtcaactttggtaaaatttgtgaaacttccatttctctctgacttgtatgatctctttagtcatgtttgttctccaactaattatgctaatttcctcataggttgcagctatattccacaaatctttaagactaaccaataaagctcgcaaaaattttgcatctgggaaagtcacaaacatgataactactgatgctaatgcacttcaggtatacttaagttcagtgaaattccatcttctttctcagtttggttcacattctatttgcacaactatggaattgtaactgctaacatagtctccggagtttttcagctaatagcagaacagctccatggtttatggtcagctccctttcgcatcattgtgtctatggttcttctctatcaacaactaggagttgcttcaattttcggttcactgattttatttctccttattcctttccaggtatttagcttcgctctgttgttttatctatttttaaattgtacaggttgtggtaatcacatctgcttacatacaagcccgcctattctgtttcttataaattagactctgattgtaagaaaaatgcggaaacttactaaagaaggactccagtggactgacaaaagagtcggtatcatatatgagattttggcatccatggatattgtaaagtatgattgatattcctaattgtttctttttagcttttatgaatggtacattcttaatccaataatactactattttctcttggaattttccaactttgttagatgctatgcatgggagaagagcttcgagtcccggattcaaggaattagaaacgaagagctctcatggtttcgtaaagcgcagttactatcagctgtatgactccttatctttgaatttgaattgcctgtcatttcttgtatgcacttagttttgtatatgacttacgctagggtaaactcatagtaacctgtcttccacgtttaactatttattcctcttgcagtttaatagttttatactgaacagcaccccagttgttgtgaccttggtttcatttggggtttatgttctgcttggaggagatttgacaccagcaagggcattcacatctctttctctatttgcagttctaagatctcctctcagcacgctaccaaatcttataagtcaggttattttaacaatcatccccttttcagttatatttgatcattcatgtgtcaatagattcactggtcatcattagttatcgtctctttgctatttctctacttaggctgtcaacgcaaatgtttcactgcaacgcattgaggaactacttttaagtgaagagagaattctagcacaaaacccacctctccaaccaggagctccagccatttccattaagaatggatatttttcatgggattcaaaggtgaatcctcaaaatatccctcttgcttagattatgttgagacgcaatattagtttatgcaattgtacacatgacattctgatcatggtgtttgctcgaatattttccagacatccaaacccacattatcggatatcaatttggagataccggtgggcagcttggttgccattgtaggtggaactggagaaggtaagacgtcacttatttcggcaatgctgggggagttatctcatgctgaaacctcaagcgttgatatcagaggatctgtagcttatgtacctcaagtttcatggatctttaatgccactgtgagtcccctttacttcttgctggctctgaaaacattaactgtattataactttttggtagcttttttttaattcggtcaattagttaggcaggaagcgtcctaatacaagtgtctatgcattgcagctgcgtgaaaacattttatttgggtcagattttgagtctgaaagatattggagggctattgatgtgactgccttacaacacgatcttgatttgtttccagttaagtaaaatgacaggcatacacaacccggtacatgacatttcttactaacttcctgaatttgcttattcagggccgtgatcgtactgagattggagaacgtggggtgaatattagtggagggcagaagcagagagtttcaatggctagggcagtctactcaaattcagatatttacatatttgatgatcctttcagtgctttagatgctcatgttgctcaccaggtattcttatggttgatccataacataactgataatatctcaaggctgacataaatcgcattgataactaatgtgtgtttagccattttcatgatttcatttctcatctaatgacagacttctctgaatcaagttaggtctttgatagctgcgtgaagcatgagctgaaggggaaaaccagggttcttgtaacaaatcagctacattttcttcctttgatggatagaataattttagtctccgaaggaatgatcaaagaggagggaaacttcgcagagctgtcaaaaagtgggactttgttcaaaaaactaatggagaatgctggaaaaatggatgcaacccaagaagtcaatacaaatgacgagaacatttcgaagctgggtcctactgtcacgattgatgtgagtgaaagaagtcttggcagtatccagcaagggaaatggggaagatccatgcttgtaaagcaagaagagcgggaaactggcatcattagctgggatgttgtgatgaggtacttagctcaacatctttctacagcaagtaaattatcaactttgatcatttaaaacatatggacaaacacaaaaaacgcattttctttaaatctttgaacgaaatctgacttccaattgcttagatgaacattgctttatgttttaatacaaacagatgattaaggtactttccaaatttccaggtataataaagcagtaggcggcttatgggtagttatgattctcttagtatgctatttaacaactgaagttctccgagttttaagtagcacatggttaagtatttggactgatcaaagcacgccaaagagttatagtcccggtttctacattgtcgtatatgctcttctcggatttggtcaggtttgtttctgtaaaagacttagatctgtgtttctgacatattacacgaagttgacgtttatatggtcattgtttcaggtggctgtcacgtttaccaactctttttggttgatctcgtcaagtttacatgccgctaaaagactccatgacgcaatgctgaattctatcctacgtgctcctatgctcttcttcgaaacaaacccaaccggacgtgtaataaacaggttttctaaggatattggtgatatagatagaaacgtggccaacctaatgaacatgttcatgaaccagctatggcaactcctctcgacatttgcacttataggtattgtcagtacaatttcattgtgggcaataatgccactcctaatactgttttatgcaacatatatctactatcaggtaaattctacttcatgtcattgtccgcttctctttaattgttattaatctatgtgatccacttggaatgaatctcacttttgtaatttgtagagcacatcccgtgaagttagacgtttggattccgttactagatcacctatctatgctctatttggagaagctttgaatggtttgtcaagcatccgagcctataaagcctatgaccggatggcaaagataaatggaaaatccatggacaacaacataaggtttactctcgctagtactagctcaaatcgttggctcactataagatctgagagtcttgggggtgtcatgatttggttaactgcaacttttgcggttctgcgatatgggaatgcagagaaccaagctgtttttgcatctacgatgggtctccttcttagttacactctgaatatcactactctgttaagtggtgttctaaggcaagctagcaaagcagagaacagcttaaactctgttgagcgtgttggcaactatattgatcttccttctgaggctacagctataatcgagaacaatcgtccagtatctggctggccttcaagaggatcaattcaatttgaagacgttcacctgcgttatagacccgggcttcctccagtattgcatggactgtccttttttgtttatccgagtgagaaagtaggagtggtgggaagaactggggcaggaaagtcttccatgctgaatgcattataccggattgtggaattggaaaaaggaagaatcctgattgatgattatgatgtggctaagtttggactgacagatttgcgtagggtcctaagtatcataccccagtcaccagttcttttttcaggtttgtgtgtagtttaagacgatattgtaagtatgatcctgaattctgagaaacagttcttcttgttagggacggtgagattcaatatcgatccatttagtgaacacaatgatgctgacctctgggaggctctagaaagggcgcatataaaagatgtcatcgataggaatccttttggcctagatgcagaggtatagtttatctttagtgacatatattagttagaagaattctttgatttcttatggagatggctgatcaaagtgttactttaatctgtaaaggtctctgagggaggtgagaacttcagtgtggggcaaagacaactgctgagtctagcgcgtgcattgctaagaagatctaagatcctttttcttgatgaagcaactgcatctgttgatgtcagaacagattctctgatacagaggaccatacgtgaggaattcaagtcttgtacaatgcttattatcgctcacagattgaataccatcatcgactgcgacaagatccttgtgcttagttctggtcaggtaaggccaggattattgttcatagaactcgcttaagaagattctggtacagaatagtaacgtccttctgtgactgacataaaactacgtcaattttgttaggttttggagtatgatagtccacaagaattgctatcaagagatacaagtgctttctttaagatggttcatagcactggaccagaaaatggtcagtacctttccaacttggtctttgaaaggagagggaatggaatgagtcaaggtggatagaaatggacacctgccttccaagaatgagtttttaagtttgcttgatgacggaatttgcattgttaccaatttaccattaaccagagtcccaaagtaacaaggtgttagtcttcttatgctgaaaaatctgcagtcatgagtcatgaccaatagcactcttgtgtacatatgacattcttggcagtaggaatggctaacaatatatttgattgtttcaaaatgttctgtaatgatcccttttttctggtgtgtagaatagagtgataaacaatgcaagagcttctagtatcacttaatctgttcatatgtacaagactccattaaactatctgcaaaatataaaaaggttgtgttactatcatagtcttagtgataaataaaatcttaacgaaatatagacaagaatccgttgtagtctagctggtcaggatactcggctctcacccgagagacccgggttcgagtcccggcaacggagtttttttctcatcgtactgagtaattttccacgtggcaggatttagttttactccattattttaccttttggcccctaaaattaaaaagcttgacgtaaaaagcgtgacgcttgcgaaagccgaggcgtgtggtgagtttgtttcccatgtggccttgagggttcgctcacgcctttgtctaaaaggcaagcaaattaagcgacatctattcatggttttgttcggacttgtaaatttatattctttctttctttttttcacctttttgtttgtaaaagcagaatgtgaggtaaacttatcatgtaatttacttttacatacacactagagagtgaacacgtaatgattagctcaaggtttatgagcatgggaaaaaatacaatattagacaccctcaaaatgagatctcgatttcactcttctgtctaagataatttaaacttccataaaaaactacttgtctttagtagatacatataaaaagtagtggtatacggtttctgtttttttttttttacaaagaatttgaaaaaaatggaattgacttgtggatgtgggggtgagtgtagatcgacaaaggcagaacataaacgcatgtaaaaggaaaggtgctttttgtgtgtggacaaggagcataaaaaatgtttaaaagaaagagcattccaatttcaagatttcaagaatcctaaagacataaggataagacactcagtcactcacacttagcttcgccgtttaggtccttatcattgttcaccattgcatgcgtatttttgtttatttttcttttaattgtttttgttcatagacatgtatatagattattatcgacgtaatataagtgcatagttagaaaccgcattaaaacttcaaaatgaaaacagtttagtttaaatcgctagagtacaaattaaaggttgaaataatccttaattatatgtttattgaagtcgttggttcagtttttttttgtgggaagttgagaagtacaaaaaagttaaccaaagagaagtcaaaagttcacgtgggctagctggttactacgtacgtcagccgaactaaaagacacttcgtcggacaacgaagcttcaaccacatgcttagataagtatagtactacggacaaaatcacattccatcaccaaataataatagaggaatattttgctataaaatgtctttcgtgacttcgccaagtgcgttcgcatattgtatcggtttggatattcagagatatatctttctctctgtatacatatataatcttttgttcttttgtaaacgatatagtatgtatgtagagcgtcatgattaaatagtggttaaaaagtggcagaatgaaactccatagataatacaatttgattcctaattttgattagcaagaggactcctcaactatacataccgttatcacttaagacatgaatgcgccaaactatttaaagccacccatgattttacacctactatatacgcactccttcgtgactatgacaagtcggcgaggttattcatgaaatattgaagtgatccacgttctgaaagttatgtgtaacaaacgtacgtagatgactagatgatatagtttgtatacgagttgaacactatgtgttaatgatttactacataggtgtttacaacagaacatatatccatacgaaattttttgagatcgaaggtcacgaaaattatcataaacacatagtgttcaactctaagtataaatgaatcaaaatctaagaataaactagtaaataaaatattttatttaattatcagaattcaaaattttgagatagggagtgaaacacttaagtatatataaccgcaatcgcacgccaaaagttagtgggaaagattggattctttgagtaaagattaggacaaaattaaaccccacatttaagaaatgaaattggaaaacaaaagtgtatttgctaatatcaagaatcaacacaatgagtatgtttgaagatacaaatgaccccacatgcgtgcatgtgttcatcttaaacaaaagaaaagactcattaatctcttaatctcgagattttcaaatctccatcatctctttcctttttctatatcactatcgattaaatgagtttctaaagtaaccaatactgaaattatccaattaataattcactttctaatttcttacaagaccacaattttgcctttatttagtttataatatttaatgtttgggggtatatggtccccttcttccatgtatattctctcgtataaagaagctggtaacttctgcttagctgttcttgtctagctgtgctcttggggttggtttcttttcttcttttcattattttttgtttgaatttggtgttggagataagattatttgagattctgggtttctagtggttttgctcaagggatctgttgttgggtttaggttaatttctggtgttagttctgttactgaatgtggagaaaggaagcagctttaagtgtttgttagaatgtctgagtgaaattgatctgtttttattattatctcgatctgggttttgagggatgaatccaaagtttctttctatctgagaaactctgtacattagggttttgattttagttggagggagtttttttttagggttttggaggctcaaatttccctagtttctttgttgaattctggtgagagaaagaatggcttgcatgaagctgggatccaaatctgatgctttccagagacaaggccaggcttggtatattcacttgacctctctctgatttttatattgtattttcgttccaagtttgtgcttctaattgagcagactttggtctggatttgagaccatggtctttcttttaaggcaaatagcagcattactgagttaaacaaagctcattcctttgtctgactttgtcttctttggtcttttgctaattgcaggttttgcacaactggacttcctagtgatattgtcgttgaagttggggagatgtcttttcatctccacaaggtacaatttgttaaaacactctcttctcgaaacactgtgggatattattgcatttatctggactaattattggtcttctagaatgttatgtccttcggcattgtaaatatctgtactgctaatgtatcaaagttgtgtttggtttctattttccttttcatacattgtgttttatcagtcttgtggataaaaaaaatcgttactgctgttccttgaaaatttggttttgagctctttattttcttctaatgactaatcaccagtgtcttgcttttggttcctacaaaactcaattcagtatctgtagttttggcaatgccttgcttctaataatgagaactcttgactcttgttgtagaaatcagtctctactaagccttctctttgagaaagaatgttattacttgcaatctctcatacttatttttaaaatggctatctgcagtttcccttgctctctagaagtggagtcatggaaagaaggattgcagaagcatcaaaagaaggcgatgataaatgtctcattgaaatctctgatcttcctggtggagacaaaacgtttgaactagtcgctaagttctgctatggtgtgaagcttgaactcactgcttctaacgttgtatatctcagatgcgctgctgagcatctcgaaatgactgaagaacatggggaaggaaatcttatttctcaaactgaaacatttttcaatcaagtagtcctcaaaagctggaaagattcaataaaagcgcttcatagctgcgatgaggtcctcgagtatgctgatgaattgaacattaccaagaaatgcattgagtcactagccatgagagcatcgacagacccaaacttgtttggatggccagttgtggagcatggtgggcccatgcagagtccaggtggcagtgttttatggaatgggataagcaccggggctagacctaaacatactagttcagactggtggtacgaggatgcatcgatgctaagttttcccctttttaagagacttatcacggtgatggagtcccgcggcattagagaagacatcatcgctggctccctaacctattacacacgaaaacacttgcctggcttaaaaagacgacgtggtggacctgaatctagtggtcgtttcagcacacctttgggctcagggaatgtactgtccgaggaagagcagaagaacttgcttgaagagatccaggagcttcttcgtatgcaaaaaggtttagttccaaccaagtttttcgttgacatgcttcgaatcgccaagattttaaaagcaagtccggattgcatagccaatttggagaagaggatagggatgcagcttgaccaggctgcgttggaagatcttgtaatgcctagcttttctcatactatggagaccctatacgatgttgactctgtgcaaaggatcttggaccattttcttgggacagatcagattatgcctggtggggttggctctccttgttcttcagtagatgacgggaatttaatcggatccccacagtcaataacaccaatgacagcggttgcaaagctgattgatgggtatcttgctgaagttgctcctgatgtcaatcttaagcttccaaagttccaagctttagctgcttctattcctgaatacgccagactcttagatgacggactctatcgtgcaatagacatttatctaaaggtaacactcaaaagaaccctatcaatctcctatgtaacaggtttcttttcacacagacagattaagttttctctcttttgatgattctcagcatcatccatggttggcggaaacagaaagagagaatctgtgccggttgttagattgtcagaaactctctttagaagcttgtacacatgcggcgcagaacgagagattaccgctaagaataatcgtccaagtgctcttctttgagcagctacagctcagaacctctgtagctggatgcttcctggtctcagacaacctcgatggcggatcaagacagttaagaagcggaggatatgtaggaggaccaaacgaaggaggcggaggaggaggaggatgggcaaccgcggtaagagagaatcaagtcctgaaagttggaatggacagtatgagaatgcgagtttgtgagttagagaaagaatgttccaacatgagacaagagattgagaaactcggtaagacgacaaaaggtggtggttctgcaagcaatggagtcggtagcaagacttgggaaaacgtttctaagaaactcgggttcggttttaagctgaagtcgcatcaaatgtgcagtgctcaggaaggttctgtgtctaagtctaacaacgagaatgtgaagatagagaagctaaaggatgttaaagagcgtcgtgggaagcataagaaagcttcgagcattagttctgagaggtgaaaatggtaaatttccacggttcaaatgtccagttactgtgtgtttggacattgtttagctaaaaaaaacaaaagagagcttccattgttaaatgtgtgcattgtaggcttgtaatcatgtttctttttttcaattgtttatgtaactttgactaccaactattttgtcatttttatatttttattttaaacctctaagaatattggaaagattcaaaaattactgataacgaatatattaattaactatgtaataatcaatcttcatgaccacaaggattattaagataaggtttactttttttatactatacttattggggagtttcagatttgataagtttatgtctagcctttaattaatgatttagagttaatcaaaaataaaatctggaagactttgaactgaccaaaaagactctcatgctaagtaattgaaggacatttcagccgccagcttgacccaattaaaaagcccattttagtttttcttccctttgttttctcttattttaattttacctcagtttataatattttattctctgaaatctgaaaaatcatctcttctgaaaattttgttttccgttaattcgtcgagtctctcgatctccgttctcatcagatttcaaactctccgatctcggattccgacgagatattagtctcattgtcgaaagagatctgttccgatacggcgtgagaaatggatagcggcgacattgaagaagccggcgggaatggcgaagaggaattccggtcaggaccacgtctcggcggtagcaaatacagaccggtggtggcgcacgatagagcggttgttgagatgtcctccatcgatcctggatcttcctcttccaccctcaagtaatttcttcttcttttataaaaattcattgggaacttcaatttcgcgagatgttgatgacgattctgtgtactgatcagtagaaatgggatgctcgttgatatgatattaggctgctaggttgtttagatttttcgtttcgtcgttcccttgtgaacggatagttcgactatatgatgttgaaagtgacgttagcttaataagatttgcattacaattttgttatcatttacatttgcttcgatcaccagttgtggctgaagttagtcacataggtagatggattgcataagtctctacaagatcatttatattttggttgctttcttactgcttgtaaagagaatctttaacggtgcatgaatattccaaactctaccttggaattttttttgtaccttttctcatcatgagtgtctcacatttgtagtttttgacaggaacataaaagtagttgcaccaggagacgtgggcgctggtgtaaggggaccagaagatggagtcaatggccatcagaaggaatccaagctggaattatttggtttcgactctcttgtgaatattcttggcttgaagaggtaggtacatgcgatttttatttgttatttacattagatagatgagcttactgaaaatgatctcttgcttttgttaatcaccctgttttattttccgtctgatttgagtcaatggataagatactcattagaagtttcctgcttgttgagagcttgtgtattatttccctgcctatgtatataattcaggtttctatagtagtattgatgttcgttccctcggtttgtgttgtttttactggttcttctcttcactagtatatgcgtctcttttgtaatgtataaaattggaaggaactctcttttgtcttcctaacgtggaaatggcatcttttacctaaactaagctttacacttaatcaattcagctgttcagctttgccatgaaagttgatgttttcccatattcaacgaatttctctttcagtatgacgggggagcaaattcaggcaccatctagccctagagatggggaagatatctccatcacgcaagggcacccaaaggtacctttattttcccattagtttctcactgctttgtaaatcatacaattgatgattgctgccgggctgttctgatctagccttgtttctgcattctctaaagaaaaagacctttaagtcacatcaggcttagtcaagagaggtatatgagagattttagggaacactcgaaaacaacttaaaagttaatacctttttatcctggcgatgcaggggcacgtcaggtgttcaagtgtcatgcactagaattcccccttttctcctccagttttcgctccttatttgtttggaaacgtttataaataattctaaatttaagacgcgcaaacattttctgtatggaagtatgatcgtttacgttacaaagactgccttcctctatctgattgtttgctactttctgtttggctatcattgtttcaggatgattacatggttttactttgtctcaaaagttccttcattgttctgtggttgactgtctattatggtgcatgtaaaagtaaagttttcttaggtattctagtctgtctgagttttttccctagtttcctgtaagcatctttttgacatgggcatcatgtattgctgaattgatggttttctacaatgttacttacttcagctgtatctttttgcagcctcctgctctcaagatgggtacaatgatgggagttttcgttccctgcttgcaaaacatattaggaattatatattatatccgtttcacatggtaagactgcaaagtccttgatgtttgacaaaagactgcaaaatcatcatggcctactttaatctgttcaatattcaggattgttggcatggctggtatcggacaaggcctagtattggtatttctttgtggcttatgtacattcttgacgacaatatctttgagtgctattgcaacaaatggtgcaatgaaggtaattcttttttctgttatatcacctaaattttctttgaataaaactatgtaaccataattaaagatattcctccctctcttgggtctctgcctctctggtccataattgacaccccttattacttttctatttcttttgtgattgaacggtatttaagacatcaagtttattaataacttttgggttatctcagggtggaggaccatattacctcattggtcgcgctcttggtccggaagttgggattagcataggtttatgcttttttcttggcaatgcagttgctggagctctgtaagtgtaaatcctgtcaatgaatctacctaggaaatagtcttaagcttgacacgcattgcttgatgttgctggtgctctgttcagtttcacatggtcgccaagtgcttctatttactactttttctgctttcctccttatcattgtaggtatgttttgggtgctgtggagacttttctaaaagcattccctgctgctgggatttttagaggtattagttactgtggaacttgtaagaattgaaacctaaccattgaactaaagcaaagggcgactaggacttctgacaagagtaatttgactgttttttattttctctattactcttatctaagccaccactttatcatgctagttttgacacctgagatttgtttcattagttttttggaagtggcaaaatgtatatgcaacctgagttttttttcatcagtttgtaggataaacaccaaacaaaagactatattattgattaccaactactcaattttatttgacaaaaaagtttacttgttttccctgaggacataacctatatagcccacaagtcgcattcagtcatttagctgtgtttcatttttaattgcagaaactatcacaaaggttaacggaacagcagtttccgaatcaatacaaagcccgaactcacatgacttgcaggtttatggaattgttgtgacgatccttctttgcttcattgtgtttggtggcgtgaagatgatcaatcgggttgcacctgctttcctcgtacccgttttgctctctatcttctgcatattcatcgggatatttttggcaaagacagatgatcctgacagtaagttgtttctttatattgttggaaacaggcgtggcgtttatttttccgttgaattgttaaccttccttttgttcccttgttttgatttgaacagatggaattacgggcttgcgcttaaaaagctttaaagacaactggggttctgcttatcaaatgacaaatgatgcgggaattcctgatccaactggagggacgtactggagtttcaagtgagtaacttccagaaattgtgttgctgatgatagaaaaactctagttatggttttaagttaacgaaataattttatctgttcagtttttactctcaaatttatttaccgttcttttcggttgttttcagtgagctggtgggtctattttttcctgctgtaacaggaattatggctggttcaaatcgatcagcttcacttaaagatacacaaaaatcaattcctgttggtacattggctgccactctgaccacaacctcactatatttgatttctgtgttgttttttggagctgttgcgacccgtgacaaacttttgactgataggtaacaatgttactccttgtgtggtcaatgtttttgtttcacagctgatccgttgtgttttcttaggcagaagtgtcctggagaaaatgcagaaacccacttatcacttgcactttcgtgtctttagcatggttaaacttgaaagaaactaaaaatggctgcatgttctgaatatactacataaaactactaggggtctacaaaagctgtactgttcttagtttatatgtcagaatagattttatcacgtacggccgcagagacatgttctttaagcatctcaacacctagcttacatcatgaactttctttaaattaatgcaatgaacaattttcctctgttgcaggctacttactgctacaattgcttggcctttccctgccattgttcacgttggaatcatcctttcaaccttaggtgctgctctccagagtttgacaggggcaccaaggttacttgccgctatagcaaatgatgatattctccccatcctgaactatttcaaagttgcagatactagtgaacctcatatagcgactctcttcacagcatttatctgcattggatgtgttgttatcggaaatctggatcttatcacacctactgtgaccatgttttatcttttgtgctattcgggagtaaacttgtcttgtttcctgctcgatcttcttgatgctccaagttggcgtccacggtggaaatatcatcattggagcctttcctttgttggagcctcactttgcataggtatgaaattttcaaatactcacggagaaagtgtctttcccagtctacctatgtagtccattcctatagaaattctgatttgaactaccacgtggcttcttatctcacctgaatcctgagatgtcttattacaaagccttgttgagtttttaaattattattttttctattcttgcagtgatcatgttcttgatatcttggtcattcactgtggttgccattgcacttgcaagtcttatatacaaatacgttggcctaaaaggaaaggctggggactggggggatggtttcaagagtgcatattttcagttggcccttcgtagtctcaggtcactcggaggtatgaacctggcatatctaagtcttgttcatgtaacccgttgtctatataatactaaatctctaagttccattatgcagaacctgccatatctaattggttcattattgaatggtccatgtatctaaagctaatctcatgtactgtcatttcttcaaattgcagcgaatcaagtgcacccaaagaactggtacccaattccccttgtcttctgcagaccgtggggacagctcccggaaaatgttccatgtcaccctaagctggctgattttgctaactgtatgaagaaaaaaggtcgtggaatgtcgatctttgtctcaattttagatggtgactactatgaatgtgctgaagaagcaaaggaagcttgcaaacaattagccacctacattgagtataagcgttgtgaaggtgtagctgaaatcgttgtagccccaaacatgactgaagggttccgtgggatcatccagacgatgggactcggaaacctcaaacccaacattgtggtaatgaggtaccctgagatctggcgcagagaaaatctaacagagattccatccacatttgttgggataatcaatgactgcataacagcaaacaaagcagttgtcatcatcaaagggttagacgagtggccaaacgagtaccaaagacagtatggaacaatcgacttgtactggattgtgagagatggtggtctcatgcttcttctctcacagcttcttctgacaaaagaaagcttcgaaagctgcaaaatccaactcttctgcatagctgaagaggattcagacgcggaagcactcaaagctgacgtgaagaagttcctctacgatctcagaatgcatgcagaagtaatcgtggtcacaatgaaatcatgggacataagatccgaaggaaacagccaagaagattcattggaagcttttgatgctgcacagagacgaatctcagattacttgggagagatcaagagacaaggttcgaatcctttgttggctaatgggaaaccgatggtggtgaatgagcaacaagtggagaagtttctttacacaatgctgaaactgaactcaaccattctgagttattcgagaatggccgcagtggttctggttagtctcccgccacctccgttgaatcacccggcgtatttctacatggaatatatggatttgctggtggagaatgtgccaaggatgttgatcgtaagagggtatcacagagacgttgttactttgtttacatagtttaaatctcaattttataccaaccatgagcatcaaaaagcctgcccttcaaggtcagttttttttttcttacagttcataatttccttttcttgtagtacagagaatttcatttgttgaaacggattgaattgaatattcctgcgagctatagttttttcttttcatatttttgtttgcagatagaacaatttatgaggttgtatcctgaggcagatcaatacatttcctctcctggattatatctcccgacttttggaagattttgctaaaactacctatggtttttacccgtattatttcaccgctcactaatttttcatgttcataaaattcttcaaaattacatggattattttcaccatatgtgaaacgacatgagattatgttaacatgatggtcaaaacataatagatcaatgaaattttgtgcatatattacaatatcacagcaagaaaggagttatagttcaatgattattaccaaaaaaaggactataaaagaaaacgaagacacttcaaatgtgagcaacacaacacttcaaagtggaactacttgacttgcaggaaattcgactttgcgcttcttcttattcatttttcaagctactttcgtgttagcgtttacgagttaggttctgtgtatttgcaactctgtgacatgctctaccttacagaaaaccgcaagtatgagaaccttgttgatccttcaactttcattcctcgattctcaaacaagttattgaaaggtgcacacaataagcaagtcgtggaaacggctacacacattatagctagtatgaagagtaactggatgcagaccggacggaaaccaagtggaatatgtggagcagcactctatacagctgcactttctcatggtatcaagtgctctaagacagatatcaccaacattgtgtatatatgcgaagcaactctaactaaaagattgattgagtttggaaataccgaggctgcaagttttactgctgatgagctcagtaaacctgaaagagaaagagaaaaagaaagagaagaagaaagagaattgcgtacaaggaacccgaattcttacaagaaaggactagtgctctgtacatcaagattgtaaaccttttgattatggattatgtaagagctgtttcatgaaagtttctgttggacttgaaggtggctcggatcctccctccttccagcgagcagagaaagagagaatggaggaaaaagcttctacagaagaaaacgacaaacaacaaaattcggatgaatcaagcactttgtctgacctcgatgatggagagttggattgttattttcggaacccgaaagaagtgcacctggttgagattatctttgatcacgaaaaccccggatatgatgagaaggaagcagcagctttaaacgcttgcaataatgcaagcaaccttttcgaagcttctaaagcagcggcggcgaaatctagaaaagataaacgacaacaacgtgctgaggaagaaaagaacgcgcctcctccagctacagccatggaagctgttgatagcatggtcaagagaaagaaatttcccgatactaactgcgattatttggaggagcttcttgatacttcagctcagaaagcatccaagagattgaaaaccgagacagtgatggagaagaacaaggaagagcatgagattgttgaaaacgaacaggatgaagaagattacgcggcatgaacacagatgagaaattctatgaaggcgtagtggaagaggacgaggaagagggtggttatgattttggactgtattaattaaactttatattatctaataattatatttttgagaacaaatttgtttaagccggactagttaaactttatattatctaataattatatttttgaaaagaaaaaaaaactcttcaaaattgtattgattattttcaccagatgtgaaacgagaagagtaacatgatgatagtcaaacatagtttcatttgtgctgtcagaacctactcatctcttccttggcggtttaaatttcatttggccttggtttatggtctaacgttgttgttgtttatgtttcacttttcattaataaaacgagatgacaaataaaattttacaatatcagtcgaaagaagatcgaagaagagcaactatagttgatgtgacttgttgttatgtacggttaaagactatttggtcttgtgctctttccaaagtctaatgccatagaccttaatagtaatactaaagaaagacgcgcgagagttgtattaactactctttgtctaataatacaaaatattttaaaataccaacaacctgccgctaatgtaataatatgtttgaatcaaaaatagagggggaagagaagtaaactttgaattctattggtaggttgttgtgtaagtctctctcaccgacgcttctttccttctccatgtcttgatcgtcttggagcttcgtcttcgtcttcactttcactctcttcgtttcttaaactgtttccaacctcgaactgctccatgtcatgtgatgcatcctgattttgttgatcccccgacactcctctctcatcgcttctctcaggtgtttttcggttgcttgggccaggtcgtgctgatgatgttgctggtggataatacatcggcctccctcctctaggagcgtttcccattcctcccatatgcgggcctcgtccgcctcccatcataccataaccgccatgtggaaactgttgcggaggcctaccaggaaacatcatcccaggtactggtcctctgaaatcaccaccgaacctcggtccatacggtccaaagggtcttggacccatgccaaatggatctggcataccattatatccaccaggcccatagggaaatgcatcgccagggcccattactccgagagggaaacctcccattccaggcatcggtctgattccgcgtcctaaaggcatttgaggaggccacattattcctcttcctcttcctctgccttgaggaccccccgccatgctctcttcttcctcctcactttcatcttcttcctcttcctcttcttcattgtcttcaaacggcacaatgtctgggttctcagctctactctctggattcacaccctttgctttctcttcttctcgttttgcttctgcagctatggagattgccttggattcatggaaaaacaaaaataacactccatgatgaagtaacagaatgaaaatcctagaagaaaccaaagtcaccaataaaagagcatatggagctcagttcttcattgtgtcataaattatacgcttaagaaccatgaaagaacaaagttaaacaacaacgagagagagtgggagagagagtatataccataagctcgctatctggttcaagataaagcaaagaagcgagttgttcaccaacggagggctctaattcctgacagtctctgcttatctacggtcattgaaccaaaagagtaaaataaaggtcactaggttacatgcaaatactaaaaaaaacataaacattacacaacgaccatcagctaatagtaatcatgtatcagtagtaacttgtaatgcctagcaaaacatttgtgtaactgtgcgagttagccagttaggtcaacatgggacaatttagacctttacggagtgtattgatataaacatccttatttatcatgtgttgtatctaacaaacaatactatttccagataggagaccaactagagcagtgaaaaaaaaacatggtgagaaattccacgtaccttcacaggtaagttttcgttgtaaggattcctcaaattccgagttttgtggaaggatagttcgcacaactacaatagtaagaattacaatcaatcaaagaagtcatgttactgcatgatttatgaaagcatcccctttacttctcagtagcatgtgccagagaaggactaaatgtaacagactcaatcgcatagagaatgactaaataaacatctcagagaaaggactattaactaaaagggaaagcttagtcacacacctttaaccatttaactgaaaagttccggccatactgtgcagttccatgttcatgtttccagtttcctccaccaatgtaaccaccaattcttgatgtcatcttagcacacccctatagcatcatatgtgaaacaaagttatttagaatcataacgctgcctaccaaatacactatggagaagaaaactacagaaaggcaaccatcaatacacatgaataagggttttgatctgtcaataggcttacagtaactaaggtttaacccaataaactacctggaaatgccgggtccggttgacagaaaatatcaagatcacattttccacagagtcgaaagcttcattaagtttagcttcattgctcctttgtgttgcccacacaccttgttgcacagataattcaaaattttctcgattgttacttttaactacaaaatacctgaaaaaaacaagatcctaaattatgtaagggattacctatgaagagtaataatataccacaaggtatatatacagttaacgaatccataaaatcaaacatacaagagttacatcaaacttaatatcgagcagtcaagatgagcatcttcgaaagccgaaatactagacaacgtttgaagaatcccattcttcttcacacactcattttagatcaattgtatgggattttagaagatatagctacatgaattacacaatctcttactaatatctgaataaaattacgttataggcaaaatagcaacactagagcacaagaataggcaatcaactcttggtgaccaatctgaaataaagaaaacatgactcttagggtcgcaggagtcctgctgaaaaccactggcaattaggccattgagcacagcactaaataaatgacaaaatggtgctatatgtattctagccttacagaaacagtagagaataatcggtatgcttctgtttgacataaatcttaaaatactatgatcatctataagataaaaatatcaacaaaaaccagtatatgtataccaccatttgcaaagcctatttcccacattttagctgaagggggaagggtacctgatggaaaaaaggagactaataatactcaaaagcaaaacaagagggtaaagccagcccaatgcaggtcgatttattgtttttgtaacagttgaggtcaaataaaatctcagaaatttaactagctatcaaagaaaaattatcctaaaatcaggtagataaagttgaaaatatatctgtatatataaagttcattctgaacttgcaaataaccagttacattctaaattgtttcaaagctcttataagaaaccaatattttaatactgaaccaataacaacgtcttgaattgataaacataatttacagaacccaattaaaaaccttaggactctgaacacacctatttaccccttgaggcaaaggatgagatgttctgttcgtttgatcagcaggatttggtatcagagtctggctgacctggtgttgtgattgctgaggttgttgttgttgttgctgctgcaagttacctgattcttgtggctggccttgcattggaacttgcccctgaggtctatcttgtagctgtggagcaacattccttgcttgatagagcctatttgtcccataattgtatgttgtcaattgttgtatcttctgaagaacttcctcaactggtggtggaggtccaggaagctttgcatgcctgtaccgacaatcaggaccattgggacaaaaccccagcttgtacctacaaaatataatcacaagataagtaataaatctaaccagtcttagaatcaacacaaactcaatcatcaagttcaatctaaactgacaaaacatgaaactgaaaaccgaatttatgtaacatacatattgcattctttgatatcttcattggtatgtttatacacacaatcctgctctcgacattcaccgtataaccggaaaaaacggcagatcggcatacgagctttatcgaactgatggagaaacccacaggcgtcacctttcatacacagacctcgaagccagtgtctacaaacagtttgacggaaacttctacccctcccagctccagccaccgtcgcggaagaatgatcgtaggtcggtgctacgttaacagcggcggaggaagagttttcaggcggagcaaccgggacggaagcggtgttctgaacaggtccggaatcaagaccgccttcgaaatcgaagctaagtccatcagcatcctccattgctaaggatttttctagggtttggaagaaacgaacagagagatcaaatcggaggattcgagcttctgatgttagaaacaaggtttaacgactcaagctcggttcatcgtataactatcagattgaaccggtatttgaacggtttattaaaccggtaatttatttatttgtcggttcagtatttgtgttttaaccaaagtcatctcgtttcgtatacagagtattgtgaatttttacaaattacaagtcaatgaccagtaataataccttatcaaataaactttcttcttgatttaatttttttctcattgttctctaaactaattacattctccagtcatattatttccatctccaaatataataatatgaattgcgtaagactaatataaataaatccatcgcattctccggtcatattagaagtaggggagaaaagaaaaccatttggattgttgaagaagaaggaaagctctccaataaagccccggtttcaaaaacttttgtctcagcccggtatcctgttgagtttcattcggattactatatccgttttagacttaggaccgaaatagtgaaagccgaggagtcaaaacctttttgaagttgcgcttctggcgtagatgctattaggacacgttctacactcggatcatgagggactaatagcttggatttggattggatcttaggataggatttgattttctttgtgttagtaattgtttttgtgtcattgggtgaatttaggtggtttaagagatgatttcacttagagtcgtggtgtaattcatctcgttgtggttggaaaaatacagtaaatttcagttggatagcgttgaatccatcttagtgtttcagggtgatactaaactgattcattgtatttggttaaaatatgttgtggtcgaatcacttatacttttgaattggttaatgaaaagttgatgttgagccaaaaataaaaaataaacccatcgcatattgcaccaaagaaaaactctttttgcatataaatgggttattgatcaacttacttgaaagttgaaacccattaatttctttcatagtattgtccaacaaaacatatactccttttcattttttatgttatagatgatgatacgaatgatcttgacttcataagttatagaatgttcacaacggtctttacattcaaaattctattgtgatttttttatttattgcttatggcaattcttcggattcattaccgataaaattttagattataaagtcaattggtaaatatggtactaatctggtacgggacgaagttggaatcttaccataaatattagacatgctccacgctggactacaattcttcttcttcatcgactaatcataccaaaatttcattgatatcggattctagtcaatcgtcggatcatcgattttttgaggaaaacttccaaatttctctatgattttttaggctatgaattaaggatttcatttgatttgtgaaaacttgaaagttgtagattacgaattaactccatcagtataaatttaggatgaagttccatggtggttatgatattgtgtgatcaaacatttgacgagagatttacagctttcttcgacgaagaaaccatggactttttttctcatgaattgatctacctaaatggcgaagaagggtttcaaggatgtcggttctcgagttgggaaaagttatttttctatttctatttttcttatttttggtgaaaatttaatttaagtcgttatatagagttttgggcctttaattttgccaataaacgttaaccttttttttttcttagactaatacatgtcttttattgatataatgaaatcaacatttgaatatgtactatatcaacatttaaactccttttgcttccatcctatatatactccttgaggattttcaagctttagaatctctttgtgaccaacaatctcattgcctctgatcacctttttcgtagacttgtacatccacttcgcaagaggctgaagacgaatctctctattaaaaaggttgttccgtagacggagtcttggaacataatactagtaatgatttttaggaaagaacttatgagttggaagcacttgattctctgataatcaagataaaactcaaaatgaattaccagattgcgcttgaagttgttgtttgtgatatatggcctcaaaaaatccacaactagctcaatttctgaagaagaaaacttgacacccctatgcggcactggactttataatattttaggttttggatatttaagtttaagatttaattttattagcatacaaagtaattaaatttaataataattaatactgtaaaagtaaatttcatgaattaaactattttttgaggatcaaagctattgcgttccatccaacctacaagatttagattttgtgttcgtagagaggaaggtaacattttttgtgagatcatcttcaataacaaacaaacataataattagaaacgaagctttacaaaattttaaaaactgaaataaaaatatataaattgagataacttacttgtttcaagaggtgaaataaacataggcaaagatgtaggatcttttgatgttgctttccaaacaacaactacacgaacaggaaatgaaaaattagacgatgatgaataacacgaagcacaaagattagtatacaaatataattacgtgaacattattgaagaaaaaataattgtcttatttttgagttatggagggcacataaattacatgttggtaactatttgttatatgttgattagcacaatagctaggaaaaccaaaacatgtagtcgattaaactaaccttgcgtaaacaactcatcatcaattggcaaagatctatgagattttattttccatggaccataacagaaaaaggagaaaagaaaaccgatgacgatgcatcatagaaaggtccaagattgaagtaaaaaaagaactataaaccataattattacatatcatgcataaaaatcaagccgtgatgtttgagtttcaagggagaaatcctatatttatagaaattttcaacataaggttttagggttttagatatgacggcataaattatacggacataatttttttaatagaaaaatataagtccaataggcgaataagagaattaggattgatagacgaattaggggtgattagagttgattagggttaataggcgaattaagattgatacgcaaattagagttgttatttgtaaaacagaaaagattacattacattttttacacattttttttacatattaaaatatggaaatctcattaatgtaaaatataatcttattaattaataattaataattaaagggggcaaaaacgttcgttaatattctgagagcaaacgtgagcactttgatatataagataaagtttatttatttcccaaatgttacgaaaaattaattccgtcatctttttgttaacaaaagtttatcgatatgcttaaaatgatccaatcatcgaaatttaagtatttttttataaagtcaaattaaattttaaaattttaataatatttcaaaattatatactttttcatcttaaatttaaaaatttgtgatttgtttgacattttttcccaataaaatatagtttcaatttttctattttgctaagatagcaatgtctgtttataatacaaatttggatgtataataaatattttgtctcacaactaacacgttgaaaatcgaccactacttggtacgaaaatagcaaaataaattaatttggggcttttcttaaagaaaattattttatatttttctttaattttgtgtttgtgtcgtccttctatctctaagaagcactacccctcccgcaattgaaggttctcttcgtcgctcacatccaatctctatcgatctcagattccaatttctgcgaatattttcttcccagagagattacagattctagggtttcgaatagttctttccaatctagtcttcttccttttgtttctcgggcgaaatttcccttagggtttcgaagatccgaatctgtggacggagacaattcgacgtcttcttgagctgcaaagatgttctggcgaatggctggattatcaacggcgtctgccgtgagttttcttctccctcaccttttcttttaacggcgtctgccgtgagttttgggagaataagtcactccattgagatgagagttttagctgtttgtttgaatcctgtacacgtttcttattgatggatttagctattagtgtttcatttctggggattttggcagcttcctctgtttttatagacgaatatgttggaaggtgaagagattatatatcttgaccagtaatgaagtgtcttcttgatgatatatgaacactgtcttactggaaagtgggagactatcccttgttgtcgaagggattgattgtttttttgaattctgcatttcatagacaagggaggtgagatgtatagagtgacgagaacttttttgatgtgattagagaatgtttttagttgatggaaatcctcattcttcgccaatattctagtgataacccagaatcatcaaaagaacatcaaaatatgcatggatatgtgttaatgaaataatactgaatacattagtagaggatgaggaggtaaacactaattttgggttctttctggtgtttcgaaggggagtttctttgtggagttccatgtaacttgtgtgtttctgataatatgttgggacgttattcatattctacaatattttgctggctgcttgcgattcatagtcttatgtgctttctggaaatttcgaattttgtttgcaggttgaagcaattttggataaagatagtttcacattagaggatcttcttgacgaggatgaaattattcaagaatgcaaagccctgaatggacgactcttaaatttgtatgctctgtaaccacattttcttgcatttcatgcttaattaccgttttgggagaggaaaggaaatgcaattgttcatgtgtaaaggttgcaagtgacagtgcattggctttgggtggtggatttattacctgacaatgctgtcacttattttgacgtccacctcaatagcttggctaatcaatttatttcacgacatgccagttttttgcattattttacgacatgtcagtttggctaatggctaactagaacagttctacttacacattattttaagacatgccagtttcttgcatcacatgattttctgtcatcagtcgaacaaaattatctccctattctgcacaaaagttggattatcaaacatcctgtcttaatcaggcgttcttgactattggtttcgttttatttcagcttgagagaaaaagtgcaagtggaacaacttattaggtacataatagaggagcctcttgaggacgtggaaaagaagcgaacattcaagtaagtgttttggataaatgatctgaaaaatatcattaaaacagaaaaaaaacgatattgtttattgttttttttccctgattttgtttgatgaataaacaattgatattcttttctgctgtaggtttcctttcattgcctgtgaaattttcacatgtgagattgaaatgatactgaaaacactagtagaagatgaggaggtagagattgactttgttactttctcctatatttatacttggtaaatggttatggatttagggtctcttacctctcgtgatctcttccttttgcagttgatgttattattgttttcgtttttggaagctaaagaaacccataactcattacttgccgggtacttcagcaaggtatttagcattcaacaatttttaattatcagaaaattcattgagaactttccaacgctcttatagggctctatagagtttcctcgacgtgtactctcttacatctgttatttctaggttgtcatttgtctgctggtgcggaagacgatcccattcatgcaatttataaaagtaagttggttttgtttcccagattaggactttcgtttaagaatgacttgaacttagctagaattattatttttccttatctctgtagaaattattgaatcattagcttactaatttcttgtacactttggatcttctacgtaacttgagataatgccgtgaaatagtcagagatattgatgaatatctggtttgctatttaattattgtaagagatttttactaatcaacaatattcaatccaagtatccaaccctgttgttaaaatattgataactggtacacaaatttactatgctttaaacaccatttgaccgtttgaaaattcatattaagaattcacattatgattaaccttggctttcttgtgctaccaggatcatcaagaaattctgaagcagcttgttgatttgattggtattacatctattatggaggttggtttgcacttttatatgccttgttggaattccttattaggctctacgtttattacacatcaacttgagaacatactgaatatgattcgtttaagagaacaatagtaatcaacccagtaataatggtaattattgctgatatttctctcatcattgtcatggcgagtattgctgtttaaactatgattgttacacaaggaatttcttcaattattattgtctgtataccatgaaagttatataccgagaggttgtaaaattgtatattttctgtaaaatacttgtttcctagactctaacttattgcttggtgcttaggttttaaaacgcctggttggtactgatgaacacctatattcaaactatacaagtgcaatgcagtggatagaagatacggatgttttagagatgattgtggacaagtttggctcttcggtaagtttcattcagttgcatggattacttttgtttcaataagggcaagtcttctggctttcctcctttatttcagatttatgctaccattcaatgcattgctatccactgatatcttggagatttttgttttatttttgtaggagtctcccgaggtacatgccaatgcagctgaaattctgtgtactgttgcaagatacgcaccccctggtcttgctacaaaactttccagccccaggtagactttctcagctttggctattattttaatgtagtcgttgatactgcttaaaatttctaattaattgacttcttactatgattcctggacacttttatgcagctgcactggaaggttgttaaaacatactttagaagattcacggcctaagtctgttctggttaattcgttatctgtatgcatatctctactcgatcctaagaggtttacactgggcacttatcatatatatggtcgtcaacttacccatggaagcatggtaactaatcccgagacagttgagggaatgcttggaagcctaggtgagcaaatacagtatggttattaaagattcttatgtagttcagtagttgtacttgtgtgttgttgtgtattgacttcttgaatgctatattccctattgtgaaagatggggttgggttgggaaggaagaatactgggtttgtgggagtcggaacctacaaccagatttcttaagcacattttttgcttgttggtatgaaaactggtgaaactttatattttttcctaattgtgtagagacgtgctagacgcttgttgaggtgcaagacaatcatcatggcattttacttttccaaatgaatactatgtggcttgcaatgttaattagtatcttggctactatgaatactatgtaataggtttctactgtgcaggtgatttacttatgcttttgaatgtttcatctgctgagggtgttttgttaacaacgtatggcaagttgcaaccacctcttggaaaacacagattaaaggtactttatttttctcgtttgtgtgatttgttttctaactatgatgtatctttcactagatggtttatgatttgtaatttctgaactacatttgttcaatagacgaaaatttgaatttatttatttttcctagattgtagagtttatttcagtcttgctcactgtcggtagtgaagcagcagagaaggaagtaattcgacttggagcggtgaaaagagtgttggacttgttctttgagtaagtaggaaatttcattttcttagttgatgatatgcaaactgccatgctaaattgtgatgcaattgtgtctcaggtatccctacaacaattttttgcatcaccatgtggagaatgtaattctctcatgtatggagagcaaaaactctcaacttgttgaccatcttctcagtgagtgcaatcttattgggagtatactagaggcggaaaaggactccacattaactgctggtgattctgataaggtgaagatacttaattgctaatgtctgaggttggcatcattatttattaacttggtttacatgcgatgtctcagcttcagcctacagtccctgcagagggtaaaaagccactcaggattggaaacatcggtcatttgactcgtatctccaacaaacttcttcagctagctaatagcaatgtcgaaattcagtcacatttgcaggtatactacaattctgtcttatgggatttaataatttagttacttgccacacattcatgtacacatgcagatatgaagtagaactggtttgcatgagttttggatgagaatatgacatttcttaacattttatagaagatcagatggcttaaacaattttctcagagctttatccctgttttacttctcccaaagatatttccttgataggatgtttgggttagaggggttctagccttgtagggtgctggtctttagtatcaaactcttgatattttgttaatttttgtctgctacgattttttaccaggaaaatagcaaatgggtggactggcagacagatgtcttgtcgaagcgtaatacattggaaaatgtctactcttgggcctgcgggtatgtatttcttttctcttatagggagataatctagacttaaagaaaccttgtgacaccggcttctgttttcaaattattaccaaaggcatgtatacttaaaatgtatttttcatatagaagtttgtcacattagtgtaattttcttttgatttaatagcaatcaagatatatgataagttaaatgtgattgcacattctcactaggtggcaataagagcttgcttttgggaagttctttagggggtgataaatattatttatgagaggcagtagtgatggttggtgcagtatatggattaattctttttattgatattgctcttaacaggaggcctacttcactccatgatcgtagtagagatagtgatgatgatgattaccacgatagagattatgatgtggcagccctagcaaacaatttgagccaggcttttcgatatggaatttacagcaatgatgacatggatgaggtgatgttctcgtgtttccttttcatagctgctacgtgtgacttttctttggaaattagtattatccaagattttggccgcatatttcaataagttttggaatgtcatgggtgtagactgtttagtcaaaggagggaattgattcaggaattttcttggaattcatttttatttatgttagccatcctgtgataggtcctgaaatacatagtgaaattggatgcaatactgtctaaagttttgctaatgtattggaccactggggtggatccagttaccaaatctctgtatttggtggatagttaaaccgtcatttctttcttcaatcattctgcttggttgaccactggatagatatagcattgggggtttcagaccatcttctcttcctttattatctttaatgtagcctagaagtagcttggataaagtcggttaacctgagcaactaaattccgtcagagcttttgatttcattgcattgttttcctcatatcacattgttctaccattaacatatctatattatccactgcaggcccaaggctctatggaacgcgatgatgaggtattgttcgtcttttccttatatttaggaattgaggcttgacttccatttgtggaaaagtaggttcaaatttttaacgtctttcatttgctcctttctgagaactcgctcagcggctcctgtgcctgtttttataagcagccaatatggaagctttagtgatatggtagatatgaaaacctcttatgaagtctatgttgcaggatgtctactttgatgatgaatctgcagaagtcgtcatatcctccttgcgccttggagatgaccaggagaggtaatcggttcaactgttttttcctggtagaaattaatccgttgattcgcatcatatgcttgagcttgatgtggtcccttaacttacgaaatataacatggtgtcgttgcagtgattctctcttcacaaattcaaactggttcgcattcgatgatgataaagctgcgaatgagcgctcaatgacctcagctgcttccccttcacccaatgctgatggagatggtgaagatgatgatgatgtcgtcataggcgaagccgatgaattcaacgccactgcagcctcttctccacctgttgatatggaaacagaggattctacatcaaagcatccttctgaaaacccgagtgaaccagaacctgaaaagtcacctgcttgggttgagtggagagagacctctgagtccaccgcaccaccttcttccaacccagaggagactaccatattgtccaatggtgatgttcaaattgagaaagaggataatgatgatgatgatgatactgataacaaaagtgcagtgaaaacaccaggtgtacctggcgatgaaaccacagagaagttaccagatgagagtggtgttgaacccactgagaactcaccaaaagctagtggcattgaacccacagagagctcaccaaaagcgagtggagctgaagtaactggaaacttgagagattccgatcctgctgaatctcatgcggatgctaaaagctctgaacctgaaagccctcatgggacaaaagaaacagaggttgcagcagaagcagataccaaagagaccgaagaggctgtgaaggaaccagagaaggtagtgtgagctttttacttaaccgggggtctctttgactgataaaacaaaatttcttctggtttagtttgattaagggctttgtctgttttgggtacaatttattattctatttttttcttttccttgtttgtttacttcattgtatcatctccaaatccggtattttttattcaacattattgtcgaccaaaatttgttactagcttttcatattttattagtataatcttttacctcagctagactcatcaagtgtcttgtaaagttgttgctattaatttttcacttgttccttgttgtttgatgcttctgtcgtgaacagagaaatcgattctgtcatcgcaacaagagcaaaagtctttcgagtagacattgtatatttcggagatcttcataccaaaactcaaaagaattgagagcttggtctagacgaaaaccagacacaaaaatttgcatcatgaaaaacactcaaagaatctttacatgagatatctgagcttgagtttggatattaacgttggcaaatctccattgtggagaattgaaatactaagctttcattatcctccagaatcttcaaatatacatcaagatatgaaaacaaacagtaatgactaatcatctacgtcaataaatgtatcattaccttaacttattaatggaaaagtctgctaaatatggaaagtttattgattctctcccttgcatatataagatttaacgatgcctatgtacaatttctttttctccatctagttacatagtttagggtttgcttcttcttcttttcaccaagcttccttcaatggcgaacccaaaccaatccgtccgggtacttcttcccgtctctcaatctttcaatctatctctctctctctgtttttcagttgctaatgattttctgtgtatatttttgcagacgtgcatactaaaagtcgatctaaagtgttgcattggttgccaaaaaaaagcaagcatgaaattgcagagtatctctggtaaaaaatacttcaaagcttttaattgcgtggctcatatgtctttaaacatgatgatttaaatactttgtttccaatggaaataggtgtagaggaagtggagtataacatcgaaaaagggctcatgacagtcagaggtgacgtagaacccatggctctggttcgtaaacttaataaacatgacagaaaaacagagcttttctcagtcaagtaccagcttgatgatgatgatctaaacagtgattcagaagactactcttcttctgactctactaattcatcttatgatcctaaacccatggaacgtcaattccaagagaagatgatgcagcagaagaagaagaagtctgggatactaaaaatgctttctcttttatggtgtttcagcagtaaatcaaaagttgttcagcctttaccgatgcgaaaccgaaactggcatgtcccatcaaagtttgagaatgttcctcctggctttggcttcaattctactacatcgtcgcagttgcggcctccgcatccaatgatgccctatccaccaatgatgcaaccaccaatgatgcagcaacaacgaccactaatgatgcagcaacaagcacaagttccaatgccacctaatgttaacatgttccagtcagcaccccaaccgtttaagatgcaccctaagttgcattacggggagcagaaacaggttgtcacctaagctacttgttctgttgattatgtctctgatacatatactaagcaaaagaattgtttttaagtttcgtatcttttgccaattgccgatagtgaacatttctcaagtctggcaaacttttaaaacaaaagaacaagggtacattttgaattcatttatgtgtgattctctgcatctcccaaacctggttccataaacatttggataagatgagctttgtttgtgtcacggaacaagaatctcattcataacccaacagagaaaacataaataacaactcaaatctgtgcctattgctagtactagaatctattgtttttgatacagagatttctcttggagaatacttgtcttgagatttgtctgttgtgcttgtgcatcatgttttcctccgatttaatggttgttttcatgttcgccctccaaatctttcaagtatcccatgaacaaaagaaacccgaaaaggaagaatccacctgaagagctccctccaccgcctccgccaccaccaccaccaccatcatcccgaggtgggaacccgtttccaccgtcatcaagctttggggatttaacttttcctgatatttaagttaaggctaaaaaaataaattctgaagatacaaacaagaatagaccagtccgtttctgttaaagcacattctcaagaataagaaccatagcaagccacaatttgagttcaaaataactgtttcatattagctagaatcgtatggttttttaagcccctcttgtttgttagaaacgcaaaatagttgttcaacatagagaaggggatgaaacaatttaccatgagtaggagcttgtgtgattgttggtgattgccgtgtaacggtctgtgtttgtccttgactgcattttgaattctgcagaaaacaaatcagaataagtaaacagctagcgtttcagagacacttaggaagagaataccggaaaataaactattatcggccataagagcaaaaggatcttgttcataaaacaagcaaaatggcttatgatgtgtaattaagttatgtgagcaaaatggtgtgtgatgaagttatcccaacagctaaagatttaaaacacttaaacttaaaggctgcaaagtcatgaatggaacctaccagcgcagagttacatgcaaagactggtcttttattcttagagacgacaactggttgcactgcatcctggagagaagggaatttactttggctccaaggctggcgttgcatagaaacgcttgtaggataacgcctttgagagtttcctattacagacagcaagtagaagaagagctttagaattccattgttcattcaataaaagcaagctcgaacgatgggactaaagcaagaatcaatgctacaacaacactcactaaagctctgagatatcaataacaacaacaagtctagtttcttcaatttgtcaagagcaatccaaactcaatttcaaagaattttccaaagaagcaattgtaaacttaagagccaacaagtgttgagatttagaagagacataccattactcgtaaaagatttctcacgaggagcgaggtacaccgatgtttgtgtaccaatacacaatgatggattcattaccggcataactacaaacagcaacaaaacaataatctttaacctatttcacaagggagaaaaataaaaaaaaaaatcaatttctcataaatcgaatagagaaaaaaattatggattcatcaattttgaaattcgattaatgataaaaacccatagagatttggatcaaagcaggtagattttttgtcgaggaaaaatttgggattttggttgctcctcgaagcttctcgatcatagaggacgaaacgcaaataaatagtttataagaagaacaaaaaagatgaggaacgtgaatcgcacctgaagactaaaacgcaaaaagacggaaaaaacaaagatctttcttagggtttatgtaaaattctcgcacaaatcaattttaaagcgttggcttctattgcaagaatctaaatagcccagaaaataaaataaaaggacaaaatatttctcctttgtttgtcggttttttattttccaacaaaatgatatttgttttatttattattactaaggctgatcggaaaaaattaaaaaccctaatttgagcagatctttccaattgaaagcgaaccgtgaattttgagtctctttaccggcggcgaaaaaatgcttggtggattatacggagatcttcctccaccgaccgatgatgagaaacccagtggaaactcctcttccgtctggtcaagcagtaccaaaatggctccacctacacttcgcaaaccaccagcttttgctcccccgcaaacaatcttaagacctctcaacaaacctaaacctatcgtttcggctccgtacaagcctcctcctccttcgaattcatcgcaatcggtgcttattccggcgaacgaatcagcaccttcgcatcagcctgcattggttggtgtgacttcatcggtgattgaagagtacgatccagcgagacctaacgattacgaggagtataagagggagaagaagaggaaagctacggaagctgagatgaaacgagagatggataagagaaggcaagaggatgaggaaagagataagagagaaagagaagagagggagaaggagagagagagagataacagtgatccgtctcggttgaatatctccggtgaggaagcgtggaagagacgcgctgctatgagtggtggtggaagtggtgggaagggaagatcttcgtctccgccggggaatgttgatgggtttagtattgggaaatcggagacgagtgggttaggagtaggagcaggtggacagatgacagctgctcagaggatgatggcgaagatgggatggaaacaaggacaagggcttgggaaatcagagcaagggattactacgccattgatggctaagaagactgatcgtagagctggtgtcattgtcaatgctagtgagaataaatcttcttcggcggagaagaaggttgttaagagtgttaatatcaatggtgaaccaaccagggttttgcttcttagaaacatggtatgcgtttcaataacatctcttatcagcttatggattcttcagttcttgagtttggatgccacagtcttagttgaatcagtattagtaggccaaagtcaatttagaacttattcaaatcaaacgtgttgttatactaggacacactttgctacaatgatttagaacggtctgttagaatgatattaatgtattccaacatttgatgtggtcttagttaagaaattgttactgctaattgttggcagcatgtgagggcgtagtattgaattacggttgacaaagatgtctctgtggaaatggaattgagtaatgggatgccattggaaagtaggaccttttgtgactatgttgattttttcaagctatcgtgaagttaaaagctttggcagttttgtgatgataattctttgttggtgaagcttgtagcttagagtgttacttatgttatggtagcctagtacactgctggattgttatagaatttagattgcctactctttggaaacaacagtttaagttacagtatctttccctcaaatagtcaaataagcatttggaaccgtactttggtttttggggatagcctaacctgaggctttaagcttggattgccaaatactagagagttgacaaatgaatccgtaggggttggcatttgatgaagtaatttttatggttcttggattactgtaataactcgcaagatctattctttctgtgtttttttttttcatttcttgactaatttttgatggaaattccaaccatgtagttattggtatgtgaatgaatgcatcttcacattgattgtcataaacgtaggcacattcttgttattctgattgttttcaccataacaagtacttgttggaaaaatcgtatcttccttgtctcatgtatcaattctggttgacccatcacctgttttctctgtgtctgaaggttgggccaggacaagtagatgatgagctagaagatgaggtaggaggcgagtgtggcaaatacggtacagtcactcgtgtactgatattcgagatcactgaaccgaacttccctgtacacgaagcagtaagaatctttgttcagttttcaagacccgaggaaacaactaaagcccttgtagacctcgatgggagatactttggaggaagaaccgtacgtgcaacgttctatgatgaagagaaattcagtaagaacgagttggctccagttccaggtgaaatccctggctattaataactcctaagacaaagaagaaacttcatcttctaggagattcttgttagagaaagaaaccatagatgaggttttaaaaacatttgtaaagtacttagaaatcttgggattatctctttattgttgttcaaagtagcttcacaaggatcaagaaatgttcctgctttttctgtcatggtttgatttaacatatgaaatagtcacaatccagtactaatgggtcatgagacaatatagtaacaaaaaagactaatgggtcgagtgtatacgattcgagttaatatcgagttaatagaatttgggctactaggcccaaaatcgttgatttcaggacacagaaatgtacaaacttttaatgagaagaatagcatcaaaagagtcttcttatatgacgaaaaaaaagagtcttcttatatttgatcaaaagataaatttcataaataaaaacgtaacgtttattcattttgttgattgaaaaattctctatagtcattttagtatgatcatcatttttattggcacctaatttctcaagcactaattataggagaagtaatattttatgtatattattcactacatatatatcagtcaacataaacaaacgcttacaacagtactcaatattcaaacaaaaatcgaaatcattgtacgggttaatttgtcaatgttacaatatgtacagcttaaaaaaagtaaaacgacaatgtatcatcaacctgcaggaaacggagcaccgtatcatgaaaaaatcaaaagtattgcttgttttggtgctgcacaaaattcaatgtcctaaagctctcaatcatcaaacctacatttacattttcaacaccatactttaataaacttttattcaaagttcaaaatattacgaataattttggacctatatagacccctcgtgcatttacacactttcaaagtcactatcttgatatcttcccttaattattacaacaactaccagaaacacaaaacaaaaatgaaaaatgaagcagatcactgataaaaaactattcagaacacatgaaacgaaaatgaatgggtcaaataaattataagaaattaaatgggtcaaactgacattatagccaataagatatcactgcattacccaacagtttttgctactgcttaccaaaaaaacacgaaaactctgaaatagtgttaccctagtttcaaaactctggagtatcgtaaaatttcttttgtgaataacagaaaaaagaaggaaaagacaaaacgcaaaagacaacacaataaaagttttatattgtagatcctgtaggttctgttttatacttgtatgcataattgcacttattaaaactatatggctatctattattccctaatttcaatttacataaaatgccatattcatcatgaccggttccatcgtatcgagctaacaaattatcagtctacacttataaattaaacacgtgatatgtgttcggcgagtctgtggcattactttacgtcgacttatagtatagtggcattattttgtatcggtgagtcagaagtacatagtaacaaaattattttgtagcaatacaaacttagttgttaaattttgaattagcgaaaaaaagacaacaagccaaattagctcatctaggctttccacaagagtttaaatacgcagccaagcagcgaaattcaattatttatgactttgggaaaaacaaaacataggcagatgcatacatatgatacatatatataaatgtgatctagtgtcatacctagtgagtcgcagtgaccaagacaaaaccatgcatgcatgcaagtggcagccatcagccatgtgcatgtgagtgtatgtacatgtaacatgctttgtcacgaggattacgtatatgtatggatgttgataatcttaaagtttctagatttttggagtcggtttctaattttcataggtttgatttaaaatctctttttaaaaactatagcaaccagattccgattttgtgccaaacaaatgacatctcaaaatgttcatgtcagtaagtaaatgtttgataaaggttccattcgtataaacaattatatttaaaattacaatcaaacaaattctaaaaagaggttcactacattcaacaacaaaactccttagcaaaaaatatggttttggttttgggatgacaagaaaaatcatattaaaaaaaatataacatttcttaaaaaaatttagaaaatatatggctataaaactctgcaagctacaaagggaaaaatattatttaatcaattgctataagaaagcattttaattttatgaaatatgcaccagagctttttctttaccgaggtttagtggtggctttggttacacataaatattataaaatcagaaagtcaatgagctataaccgaaaaaaaaaaaacaaaatgaattcatattcatgaatgataatttgatcccttccttaaaaatcagtttaatctcagtttgattcaaatcagtctttcagtttctgtaacggaattagacatcttcagtaatactcaaaagtatattttgttttgcaagtttgtacatacacaattctcttatcatatgagaattttttttgaatatatggactgcatttttataaattctatagggattaaatgggtgagaaataatgacatcagcaatgttgactaaggaggaagaaggcagaatcgggtaaggcatttccttacacaaagccagatctgtcccaaacagaatcacttctgtcttttcaccgttcttttttttcacaacacaaaattcaacttgtatgttttttttttttttgcatgagcccccacattcacattcatcacgcagcggtcaaatcacccgccccacattttcatttattgatctgtttttcattatcgttttctagttaattattcattcattaggttaagtagttagtactagtgtagtagctagttctggttttcaatagtttttacggtttgattatggttggtgtgtatcattcatccgtaaatggtaaaacctcgatcgatttacataactcatgtagacagcggattaaaatagctgtccttagacttaaaaaattctgttattggttatataaaaatattccaccattttctttaaattatgctgaaaaatgataaaaagagattgtacataaataaaacttccatatttttggtcggtataaaacttccataagagttttgtaggtttctgtccaaaagaaaagctatttatcaacttccattactaactagactacccaaaagaaaagtttataggttcctccagcctagaagtcaaagaacagcatcatcatgactagttttcttgtgatagatactatttcaatttaatagataaatactagtaatgattattgatcatttaatgtcaaagattcattcaaatctaatcttttggatgattattatttatgcatacaacctaaactccgcatacatttttcatgttacatatgagctaccaagtccattaaacgttttttgccaaaaactatgatgattaatttagtttattcgacatgcttttgaggccaatctttgtgtttatatttgtacattaacacatgataaaaacttataagattactaataataattcatcttatatctatctatatatatatatatatatatatatatatatatatatatatatcaaatttcgtaaaaggaagatgaagaaaaacgaaacaagtccaaaacataaataaaaataaatatcttgccatacataatgtcataattgattaaagagattatcatcagaatttttccatattacatatagagttatggactctctaattcaacaaaccttagccaaaaacaacatcccctaacttttaatatctaacataaccaaccttttccttcatcaaacaaacgaccaactaacgagggtaaaagccaagcagtggtttgattcgttgtcatcaacaactttccacaccgtcgcttgctcatacgaaaccggtctgcccatgctcgacacacatattcctgccggaagattcgcatatccctgaagaagattcaatccaaacttagtattttccagggaaagacttaaaagactagctagaaaatgtttaacctgctgcatgatcttggcgaactcggagcaaagagctctacgaccagagtcatcaagtgttttgtcgagcattatatcctgaagtgccacaagtgtagtttcaagcatgtctaaaccagcttggtttgcaaatgtgaataccggtgaggcctgagaaccaaaaaataatcagacaattcccaaaccgaaccataaactagattgagcacctcttaaaaaaacagaattcttacattagttttcagggagcagcacaatatggcatcactatggtcccagagttgcttaagcaatgtgtctcctccacaggactgagaatcagctccaaacagatctgcacctgtatgaatactaaaacatcggagaaaaacattttattgagttattaaatgagataagcacattctatattgttacaagtctttagattaaggttctaagaagagtacctgtaactacgggtgatccaacggacaagagtgagagcttcaggggaagtgggaagttgcattgagccaggacgaggcgtaatggctagagccactctctgaatcgaaccaacaacgttcctcacatactgtctcgccattgtagcaacattgtctctggaatggttatcaaacgtgaactggaaggctattgttaagaccaatctagagtttgtttccgaatcggttttggtggaaccatctagggacgatgctagatcccgtgttcgacttgcagattgatgatcattctgtaacgttacatacaggaataaaagaaaaaggactgtgtcaatttcaagatatcaaatttcttatcataaacagttttctttttaccggatttgttttttggtcgagtggtatgacacggaaaccagaaggaagcaaaggtgcatcatcagcaaatgattcatcgattggggcaaagacaagctgagcacaacctccaaccacattttcatcaacgccgctacaaagctggacaaaagcaaaaaagaaaccaagaattcaatttcaataactcatctttaagaatccctgagtgtctttagtataaagcaaacctgcagtaaatacatatcccgggataagcccatgtcttcaggtgagtaagcatgacctccaagtctaaccacttcgagaaactgagaaacaagtaagcaaaataggattataggcatggcaaaagaatagacaacaaggaaaatgttcttgagattctttgtacctcttcatgttcgagtgtctgtgcgagaggaagaatgacttggttactcgggaacccaccggttctgacgcatggaacagcatatggagttgctctgagagatgcagcagaataggcatcgacaccatagtctgcccattcagctcggtgttctctcaggaaccgaatcaatacaaggggtggaacattcttcaagagcagataaaaaagagaatgatgtcagaaattgaagaaaccggttcttttgtctattcacaagtgtcaaaacatgatataggcacctgcaacagcatagaagctttggcacagaggacaccacttccaaaacttggaagaaatgagctaccgtattgggagccagcaaatttagcagaggaagagttaatcatgatcgtaatatcctctcctccatcactactcattggagaccatccatcatcgacaaaaccatttacagcatcattgaaacccctgaatttcaagaaaagcaattagaacaatgctttagaaaataaaactaagcttatcaaggaaatgtattaccggcagagtctctggctgaaagtccttaaaactgcaggctggcgtccaccactatactggacttctccactagtctcttgagcaatttggcgcacatgtctcagagcctgaaatgtggaagtaaaactcataaagagagcctaatcaggtcacgggtggataaggtttatatggaacttacagcgacagtcattttttgagcaaggattttggaagactcataaagaggcctgaggacttcaggaacacttgagacctaccaaaccaaaaaaacgtatcaatcaacataaatagaaggcttttacgaaacctaatgtgctattacaaatccaatatgcttacatccaagtccacatgatcaacgatgtgaataatggaaccaccaccatcacaaggacggataagaaacccgcttgacagcattttggctctcacgaagcttgaagaaagtggaccattggggccaccagttgcagaagtgagtgatctctcacagacctgaaggcaaaaaagcaaatataaggcaaatctaataaatagaatcatagatgaacaaaaccaggtcctaatacccaccacatagcttccatcttctagacttgtactatatctcagcgtccaaaagtcacgagctgctgctaatgttgtaggagcataaatctgataaccaaccatgaataatgatcattacattttaaaggaacaaaaacaacactcatggatttatgaaacagacctgagtgttgacaagctcgatagtaccaccatttccagtgggtataacattcagagtctcgacacatcgacagtcacggaaccaagatggacgatctttgaggatttcagcgacctacacagtatttgaagtttagattgccttcgtagaatttccgcttcttacaacacaagattaaaataaaaagaaaacaccattaccttcatgggttctaaactcacgaggccacaggcacgtgctgctattccactgcagttgcgtgaaacagctacgataccaatagaatccggaccaggctacatacataaccatgaaaatacatattaaaacattttctaaaaaccacttcatttccacatatgaaaacgttaaaatacttcaacttatctaccttcatcccaatcatctggacccagtcgacagcagttcctgtagccttgcaaaggaactccgccaaggtctcctccgcaatcgagagaagactaccaaaaaaacactccatttagtctcttctcataatgtcacaatgagaaattcacaaacaaaaaaagagccttccttacttagctgggttgttaacatcacgctgaggatgctgatgtgttgggttttgctgctgacgttgctgaccactcacgaccacagactcacagctgttgtctgtggtcgtcccagaagcctaagacacaacacagagatttcaccagtcactctctaacaacagagaactcttaaagaacaaatacatatacaagcatcaaagataacaactcaacaatgcatttagcaaaagggattcaaggacttacagtgtggattcgatgtttcatgaatccattctcataaaccaagttggagacttgcttctgcaaacgatcattctcttccatcaaaagcttgttcatagcactcagcttcctgttcactgtctgaagacgagctgactctttcctctgcttctctcgacatctaaaaagtcaacaaaacaaccaaaagaaaccagaaaagttaaagacaaacctatagcagtatgataaatgtgttgaaataatagaaaaatgaacagaagaaacacacacttttttgctttagaatgataccagaatgacataaagaacaaaagataatgtaatttccaacatattctctgcagaaggaaaaaaagagagaggcgttttaaagctcatcaaagacagtttgattagctgtcacttttccttgtgattttaactttcaactgtgtcaacaaaagcctaataagcaaaaagagaaaaacaaatttatagacatagatctgaaagtttcaaaagcttaacaatcaccaattagaccaaaaacaagaagattaccaaaaacattgtcagacaagaacatttttgtctccaaatacaaacaaaagaaattcaattttataattacagaaacaatcaaagaacacaaaaaacattccattaaagacaattaataaagaaataataacctgcgattctggaaccaaactttgatctgtcgaggctcgatgttacagagaatgggacattcacgaataagctgttgtcttctcagagagctaggtttaggacactcagcataaactctctcaagagcttcaacttgttccggcgtgtatctaacgtacttgccggaatcaaatcctttatcaggagagtctctatcgtccatggagtgatgagccatcatatcttccaaacaggtcagtagaaatcagagagagagagagggtttacaaaaagaagaataaagatcgatactttgagagaagtaaaagagactcagatgaagaaatattagatgggtaggctctctgagaagagagagcctcctgtgagagtgttcatgagatggtaatggttggagaaaagagttttttgggtttttttcatttgctctctctctcaaaggagattgaaagatggaaagaggtaaaaggagcaaaagcgaggcagctaagtagagagaagagagagaagagagagaagagagaggaaaatactgaaaaagtaaaagtaaagatctttctgagagagaaaggacaaggaacaacccaacaagatgcactaaactggtaaatattgttttcaaaaaaaattaaaggtgaaatttttgggagagtaggttgaattcaatgtttttggttaaaagctttttactgttaaggcaaagtaaaaatatttaaactttttcttatacaaagctaagcttgaattttaattcaaagcttaaattctaaaagttaaaatgattaactaggataaaagtttatgtctttgataactcattatcaaagcggtagagtttgtacaactttgacagttatcatttataaaatctttatcaaaaacgttataaaaagttttattctcaattttattatacaactttctcgtacaactcttttttatagtttgcaactattccgaaaaattttacaattcatctaaattaccagttggacccatatatattctttggttgccaccatataaatattattagttaaatagataattataatattgattgaattagattaacaattcattttaaaagtttcgtaatatttgatgcatagttataagtaaataattacttgttttattattttttcttacaactcttttaaataggtttaatatgagatggaatcttgattacacttctctaattcatatcattaccacctaattttctttgtgtaaacatgtttctgtattcaatattcttggattagattaaaaggacaagtagatgttgacaattaaaaaggattgaaagtgattagttttgaaaaacttaaatgcattcagatttcagactaaggctaaacacaaacagatgagaaaaccaacacgcaaagttgttgtctctgcaaattttaagacatatcaattattatcagaatccctagtcctaatggcaatcgataagaataaatatgtttatctattggtaacaaaaataaatcatgctacaactatttatattcgtaaaacgtaagtgttgttgtcagaagaaacggaattttgacaaaatggggtaatttgctaacttagggaaagaaagcacttctctttaagctctgtgacagtggcctacccaaacatagcatcaaattttccctaccctctttgctctctagtcctaagacgttgtatgtatgtatgtatgtgcatgtacatattttcatgatgatggtgttgttgtatgcctatcttttgtatccatgtggaagagacgatgcatgacaagtatgtacaatgtcactatgcgcgtgagatgcgtgaaatctgttgttttttttggttaaccttaattggttttatttcctttaacttgttttgaaagttttgaatataaattagggaatttaatgaaaaaaacccttaactttggccagatccattttaaaccctaaactatgtttttagtaaaacaaaccctgaactaaaacctgttaataaacttaactccacagtaattaattattaatgggatattaatttctaaaaaaaaaaacaacgagacatttgtatttagcgcaaaaaccacatgatgttctttaaaactattttgaatttattacaaaaaaacgttctaaatgattttgaattgcttaattagtttggattttagaagctgaaagaaagacacaacaacttaaaataatccaaagagtcatacttaaataaatccaaccaacataactatcgaagctgttgcaacacaacaatatttgtcacaaaaaaaacaatcgtttcagagggacaagatattctaaagtaaagacttgtcaagcattaactttgaagagaagattgtattggctgagtgatagggttctcttcatccattgttttctgttttttccttggtcgtctttgaggtttcttgggtggttttggcactgctttacgcttgcatgaacgtttgttgtgtccgacttgttgatagttgctacaagtctaaatatgcaaagattaaattaaataatttgaaaaggaagatcttgtgaaacataattcattgttttctattttaccatttgaactttttcacgtgtataaagaactttttgaggtggacgatcttcagttggatcacggattctgtcattgttctttggtcgatttttggaaattaatatcccattaatatttaattactgtggggttaagtttattaacaggttttagttcagggtttgttttactaaaaatatagttcagggtttaaaaatggatctggccaaagttgagggttttttttattaaattccctataaattatgagaaaacaaagacaggtctgcctttgctgggggtacaacctgtatttttggttggttacgatttttcaattggtttgtatccatttgtccaaacattgtttcttttctattcttttttggttttcttataactttctatgatttttggacagaaataaatatataaattaatatatttatttcttatgtgaagtatatatatacgcaaaatacaagattgatcatcacctactatgaaggatttcgatctaacggcactttttacctagatagctaatttgatatttgaagtagagaacaatggagagattctcatcgaaataccatacaagtagaagctcttaattatgaggatcatgttgcacattcaagtaatatttctctgcacaattgtctgtaaataggagagctatttcgtagaaaaccgagtaaactaaatccaaaaaaattctgccctccaaatagatttccaacgataaatacaaaatggaggcagaagcaacacatgtggatgtacttcgctcctcaaacgtctctggtttcgtcagaaggtttggtctgatacctcaactcgatcctacaaataataagaaaacaagctaattggattattgatttacaagtggcacaatagattttttttttttgggtctaaaatgagagataaaattaatttacaaatgggtgaaattccaagaaattacaaaattttgattacgaagaatttattaatttatataggttattaagttattgactattattttttagaggttgtattgtacttgcataacattatcatagatgaaattatgtggatagaatccttgtagatatgaaatgatccttggtgcaaaggtttgaatatcgaagtcaagtatggcttcaatatctcatttgatgtattcaacatcaaccaagacacgataaccatactaacgttgatagggctctatattcctcttgaaagtcagaaaggattcttgttctggagtgagactgtgagagatatagtacctaatcttctatgaggaggaaatacatatcgaccatccacccgttcttgcacatagaccacaaccttggtgtcattgtttgtggattcttccattcttcgttttattaccaaaatttcttataacaaaacaatatcagtagcattgtatttaactaaacatcatggacattatttatttccctttttcctcggtgggttttatttaataatcacaagtctaaaacccacttcacgtttacctaattgcttcccaagaacctatctatacctttatacaaagatttgtatatatcatacactaaaagacatagatgatctgagaccaaacagagccaaaatacaacaaagctacttgtaggaccttctcaagatgtaccactagaagcagccatggcggatttaccagcgctaaggttggatttttcttcatgactactgtcttcgtgatgctcatcctccttcttggcatttagaaaccgcccgccacatcctcttggtcgtcttatcgcatgcaaatgccgagattcatgcaaatacggctacaaatacactctcaagatttacacaaatgaagtaagatatcataaccaataaacgatttaagaaaagttttcttaccttacgtgacttgatgactttattctgagactcaagtcttgctcttgattgtctgcgccttagtataccgtggtattgctttgcgttaacaaaaacaggttcctcgactgcatcagatggtaaaggaacgccttgttgctgcactcccatcaactgtagatgtacctgaaatgatttgtaacataaatccaacttatccagataagaacaatcgtcgtagggtggactaagtaatacaccataccccggtatacggttgtggaggcggtgcaaatatgcttctgtagtaaggatctggatatggatattgtccaggtgcctttaattataagaatacacatacataaaacatgaacaaaattttgttacttgtatatcgtctgaaaatgcagaaaggtgatattgtattagtcatggtgccaagaagtagttaaacctagaaattatcaactagaaggtgctacatatgaagagcaaaaaaatacaaattagctagcttcaaaggcaaggcaatcaaagatttggacgaaactcattagcaataatcaagagaggtgtgatcaaacatttccatttttaccatggaatttgtagtccccgggtctgagtagactaaacttgtaacaattgattcataatttcttgcagaagggattggtggttggaaatgagaatctctctgttcttgcttctcatgacttccaatgttatctggacaagaacacaccaaacttaacaagagagcaccaccaaaagaatcattaacagcaaaccaaatgaactataaaacaagcttaggtaaaaatctatcttctgaaagcagaatcaacttgaaataaaatataagcataaaatgaataaggaagagagagagcaaaaccagaaagctcatggattgaagaagtcatgactcatgagcttaatgtccgaagcagaattctgaaaagttccaaagaacagagtcagtacatgatcctggtaaacctattttaaataaactcaagaaccagaactatcaaatccccacaaaatcattaacctcatatttaaactaaacaagtcaagctacttagaataatcacagaaccaaatcagaacatccacaactttcataaataacaacaaaagatgataaaccataattaaacctataattctcacagtcctactaaatcctaaaacagcaaagcaaaattctaacaaaaaacaaatcaaaggctaagaatttcaaaaccaatatataaaatttacctctctgcaattttctctgacgacgattagagagcctcttcttgaaaatgaagaacagagagagagcgagagagtgtcgttttcttcccttcctcaagttattccgcacttttaatatccccaaacttcagagcgtccttctcaactagcataaaacgtcatgacgttttcagtcttcagcaagtaaagaaacggcagagtttgtaacaattgatgcggacgcaatatcgatcgtacaagtggagaattagagaagcgttttagattgcacgtagcagattacgggcagatctaaaatttgctgaccgaagcagctcgcttacactactgattaagtccacggggacctaacctctacccgttgcccgattcttattggtattttctgttgtgtgagtcatcgatagcgaaaccggttcgtatttgtttgaattctagagacatcagacaagagagtaatctcggttcggtatgaatctatgacactaattcgaattgttcagctacataaccgaacaaaagccgaaaattcaaaatacttatgttttggtaaaccgatgattattatgatttattgatttataaactctctaaaattttcattaaaatgacgttaggcgattcgaatattttatgcaatattctataacctttggttgggtttatggcagcacatgtaagataagattattctcaactttaatagtatataccttttcgtcgttttcttgatggctcatgtcactacataaatgatatattgattattctctgagaatattctcttctcaaaaccaacaaatttcagatattatcatcatatcatgtttgaaaagtagaaaaacaccaaattcaaatttattacgattcttaaatcaaaaatcaaaaacagcaaatacaaataaagagctcaatagacttcaacgtgccactgcttgttcttcctgagctgagaaagcttcaagtcccagctctcacctctctcttctgcaactctcttaagtgtatcttgaatcccaggcatcattcctttaagcccacagaagtaaatatgagctccattgtccaaaagcttgaagatctcatcactatattcttcaatcttgtcctgcacgtacatctttccacctttcttgttcttctcctctctgctcaatgccttgtcgaacctaaagttgtctggatggtcttttaggtacttggtaaactcttcgtcatagagaaggctatcggtgttggccacgcctaagaagagccaagctaagccgctaaatgtcttgtttgggacgttttccatgaacattcgacgtaagtagcctctgtatggagccactcctgttcccgtggctatcattatgtgtgtcgcgtttggatcactctcgggtaatagcattaccttcccagatggacctggttttgaaatgtatattgagttaaaagaaaacttagtccaaggggtctttaagtatgagatcagttggttgggtaattagtttacataccggtgatttgaatcttgtcaccgggctttgaatcacataggaagttgctgcagactccgttctttgaaggatcttcttttccagtctcagggtcgtaataaacagctctacgtacacacaaactcgctgttttaccgtcaaagaaatctccgtaccttgttgatgcaattgagtaaaggcgcacattgtgtggcgctcccggtttcttcgggttctcaccctacacgcaaaagttccagttcattaatagatttaagagattaagaatggtggtaacaatttgaagacaacgtaacagcacgagggacatgacttactggaggaatcacaccgtaactctgtccttcccagtaaggaaggttaccatcatgatcgatgacgatatgacaagtttctccaggggctttcgggccaactactcgctccacagagacaatcttagcggtgtaagactccttgggtttgtacaagttcaaaggaggatccttagggtcttccaactctataggagagacagtaaccttggaactacttgtttgttgaaccgacatacatattgtcgtgctcgggtaccgtttcccatctcttatgcttgttgtcttctggttcaatgctaaagaagatgaccatgacttgctgttgaagcttatgctattgttctgctgcagaatggaaatagagtacaacacaaagcaagcgatggtttaagatcaaactcaagcaaacaaaacaatagacatcatgtagaagacaatcagaatccatgactctgagtatgaacacagctcaagctcgaatctttatacttatatgagagattagatgcatcaccttgaagacggatcttctaagagaacgttggttttcaattgaaactgagacagcaccagcctgtatagaagaaatttaaactccatcagattaaaactcctttctgataacaaatgaaactcaaatacaggatcactaagaaaagatcgttaatcgaattaaagacaagcctaaacccagattaaagatcaataaaacctcaaatcaataaagtttttaaaaattccctcgttttctccgaaaacagacaaatggaacattaagacccaaatcaaacccctaaacaaaacagaggattcgaaactctccagctataatcactataatcaagaagatataaaatccaatcgttgactaaaaaaataaggaaatgtgtggaggatctgacctgagaaacagcagagtgagacattgttatcgatctgagaaaggattattagtctcgtcggaacctgattagagcaatcaataatgagaggaagatgatgatgaactctagggtttttaaatacagtaagcaacacgatcctttgaatctcctcaaaggccaagcttccttcttctcctcttttggactcctccaactgacgctctcagacttcttaattaattaattagatttttcttgtaagctttaaaaattaattcattattagcaataaccgaaccgaattgacaaaatgttcccaaaccgaaccagttcaaatcattttcctgaaccgaacacaccaaacataatcaataaccaaccaaaagattattagtatctgttttcttacaataatacatgataacatctttattgttcttgatacaattgagaaaattatagagaaaacccaaaaaaaaaggaacgattctacttggtattattatgaatgtgatcacaattaacagaggaattttgcgttttcgggtaaccgagaaaataaatgagagcagaagcgaccatcaaagccacgccggagagtccacacaccaagctgcccacaaccagcacgtgattcatcacgcgatcatcatcctgatcttttgatagcgtcttcattggagacttcaccgcactcggcaatatcgagctagacggtgatgatatcgacgttagatcatttgaagaaggtggtccaaagaatgacgtcatttctgatgactcgcctggttcgtagtagtactcgagaccgtgatcggacggtcgtaattctcttgcattgataatcgttgattctaggacgatgatgaacatgatcagcattgaaatcaacggtggatactcactggttttgtgtgcggccattttcttgttgaagttttctcttaggcttaaagagagttacaacaactttacaagaccttcccgtgaaggaaggctttatacgagaatccaaacaagacgaaacgactccgttttaagctacttcgaatgttgccactacattcgactaaacatgtagtatttctttattccacgttggctaggaacagtgtctctcgactcttgtgctttgtctgaatttggtataaataattctcgtgagtttccttgtcggagattggccctaaattcacggggatctaacacaaattaagaaatataaaacctcccatttttatttttccagtttgaatttaccatatacttctcgggagtatttttgtcatcgatttataatatagctataataagatttgttttaaatagcgtgaaaaaggaaaaataacaagtaaactacagtagcagttatagatttatagttgagtggtatccaaggttctatttcttgaaagcaaagaagaatccttgaaagttgtttttttttcatcaattaaaaacataaatttccagaaacagaaaaacaatgatatttgcatcaagataaattaaacaaaattcatgactttttgactccaccaacgatgatgatccccgaagaagaagttgagtcgccgcttcagcatctaccatgtgagtcgtttacgtctcccccaaacgaattcgctgtgaactgcttcgcacgtatctcaaaaatgcattacccttcactttccctcgtttccaaaaccttgcgttctctcataaatcatttcaggcaaattctcaatgctagctgatcttcatctcaaaagtgttagtagaggaatttgagtactgtatcttttgttttcacttcgatcttggaaacaattttttatctccaatgtttcaagtttcaactcaaccttggtcagttactaatctgatagtaaagcccatttttaattgggcctggcctatatagtcaccaaacgcaaaaacgatgatactctctctttacagataacgtaagataaggagaggtcgtcgatgcgatgacatgtactgccacgtcatcaatggaaagaacacaaaatcgaatctctctgtctccctcttcttcttccagtaaacttggatgacactgtgaatttcataatttgcccttctccggaatggctaatcactctcggcctcacatctgccagtgtttgactcggctagcctccgtcaaacggaacgccgtcgtcacagtctacggaaaccggaagcgcaccggcagggagttcgttgacggcgtactgagccttgccgccggactgattcgtctcggcctccgaaacggtgatgtcgtctctattgctgcttttaacaggtacatttttctacgaaagttctgaatttttcaaatttgaatgaatggagtgagtgaggacttaaaatttgggttttttgaatctgaaccgttgaaagtttggtttgttgttatttgtggtttcagtgatttgttcttggagtggttattagctgttgcattggttggaggagtagttgctcctttgaattacagatgggtcagtctctctttttcaagtccagtgtctgcttattacatcctttttagtatattgtgttatgtgtaaaataaagttcctgacacattatttggtgttcttaatgatttatttgtgtgaaagggcagagcttgaaagaagcaaaaatggcaatgctgctagtagaacctgtgcttttggttactgatgagacatgtgtctcgtggtgcattgatgttcaaaatggagatataccttccttgaaatggcgtgtgttgatggagtctacttcaacagattttgcaaatgaacttaaccagtgtatgatttgttttataaaccttaaaactcaagattaaggagatggaattgtgactcaattttttttttgttactggccagttttgacaaccgagatgcttaaacagcgtacactggtgccttccttagcaacgtatgcttgggcttctgatgatgctgttgttatatgtttcacttctggtacaacatgtttgattctgcttcctccataatgatcttcaggctacttgatctctttttgtttcgattttatcgccttcttgggataggtacaacgggaagacccaagggtgtgacgataagccacttggctttcataacacagtctctagctaagattgctattgctggctacggtgaggatgatgtacgctttttacctccacttatctgtttgtcctcaatgaaatctatagagctgaatacttccgtaagtaaatagtctcttaaatttctctgcaggtgtatttgcacacgtctccattagttcatatcggcggtctgtcatcagctatggccatgctaatggttggagcttgccatgttctgctgcccaagtttgatgccaaaacagctcttcaagttatggaacaaaaccatataacttgcttcatcaccgtcccagctatgatggctgatcttattcgtgtcaacaggtaaaagtccttgcttgaagtaaatttcggtctgtaaaccgttggttggctgaaatacttttactcaaaggacaacgaaaaatggagctgaaaaccgcggtgtgagaaagatactaaacggaggtggatctttatcaagcgaactccttaaagaagctgtgaacatcttcccatgtgcgaggatactttcagcatatggtgagtcactctcatcaagcttctaaatcaaccgtttttgttaatgttttgactttgagatgttggttttaaagggatgacagaggcgtgctcttcgctgaccttcatgactctccatgatccaacacaagagtcttttaaggtgacttatcctttgcttaaccaaccaaagcaaggcacatgtgttggcaagcctgcccctcatatcgaactgatggttaaactcgacgaagattcatcgagggtcgggaaaattctaacgcgcggaccacacactatgcttagatattggggtcatcaagtagctcaagaaaatgttgaaacatcagaatccagaagcaatgaagcttggcttgacacaggtgatatcggggcctttgatgagtttggtaacttatggcttataggccggtccaatggccgaatcaagactggaggcgagaatgtttaccccgaagaggttaccttccaacacaagaaactgctcgatattaccctcaagtttttttatggattgaatttacgcaggtggaagctgttctagtagagcatccagggattgtttctgctgtggtgataggcgtcattgatactcgtcttggagagatggtcgttgcttgtgttcgtttacaggagaaatggatatggtctgatgttgaaaaccgtaaaggaagtttccaactgtcaagtgagacactcaaacatcattgcagaacacagaacctaaccgggtaaaatatctttgataatctagttacttaacgagtaaattgttgtatatatacttatcagtttgatgaaattcatgaaacttttgttggacaggtttaagataccgaagaggtttgtccgatgggagaagcagtttccgttgacaacaactgggaaagtgaaaagagatgaagttcgaagacaagttttgtctcatttccaaatcatgactagctctctctgatcattacaattttaaaccgttaaaacattctttatttgtttgatgatacaaatttttagttagttttagtttgatcattaaacccattattgccctttaatacagagacaactaaaccatacagatcaaaatcaacaatattttcgagccgatcatttttctctgtgatcaactaaaccaaacccattcttgtatcaagacttcaagccgatcattttcgaagctctctctcaaagaagtttccgattagtatctaactatctatggatttaatcttctatcatatcgttttcaagctttattttaactggatctctttggtaaaaaattgcgtgtttctcttggttgttgtaattgtaaattaattttaatataaatatggttgcacagaacaaaaaaagaacaataataaagtggattcaaacctaaatgtatattatttgatttttccaacgtgaaaagaatgcatgaccgtacaataatcaggaaccactaattttacctaccaaaactatatgtatatgttattactttactgatgggatgggatgggaccataaataattcatattacatttatgatcatcagcagagattgagactctcaaagcatcaccgtggtgataaatggaggtgtcttccctaattttttaatatttgattaaagacacacatgaagaaagataacaaaaatgtctataacaagacattaagggtttgaatggttacggcggacaaaacctccgatcataccactttttatttactattcatcaattataatccacagtggtctggaccaaaaaagataaaagaaaaccgcagcggcttatctgcggaccgcttttacatacaaataaacttggtccacaacggtttattgtctgcttcaaaaatgaagtagactaaaccgtagacaaattagaccgctttgtccgttacatccattcaaagagtaaagacatctttaaagacactcttgattgatcaagacttttgacctagaatctaaaaacgaagaagaagccaaataagatcgaaagagaggtaatttagacaccattaattgttcgcaatgtttataggaaacacttcattcttttatagagagagaaaattatagaaaaactaagcaagtacttgtaagtgtatatttaatctctaagtttaatctcttaattagatttgttttcaagcttagtttaatctctaagtttggtaagcgttcttcaagtggtacctaccactgtccagagcaattaaattcactggccatagctctttactacttacttgctctattccgtattcttatttaatgaccctctttgcttctgcttccttcttatcattcactcacgacactaaccatgaccaaattctccgagccaatcagagactcccacgtggcagttctcgcgtttttccccgttggcgctcatgccggtcctctcttagccgtcactcgccgtctcgccgccgcttctccctccaccatcttttctttcttcaacaccgcaagatcaaacgcgtcgttgttctcctctgatcatcccgagaacatcaaggtccacgacgtctctgacggtgttccggagggaaccatgctcgggaatccactggagatggtcgagctgtttctcgaagcggctccacgtattttccggagcgaaatcgcggcggcagagatagaagttggaaagaaagtgacatgcatgctaacagatgccttcttctggttcgcagcggacatagcggctgagctgaacgcgacttgggttgccttctgggccggcggagcaaactcactctgtgctcatctctacactgatctcatcagagaaaccatcggtctcaaaggtaactagctttttagcgtttagtgattattccacaaattcagctactacactttgtatgtatttatggttattattattatttatctcctggtagatgtgagtatggaagagacattagggtttataccaggaatggagaattacagagttaaagatataccagaggaagttgtatttgaagatttggactctgttttcccaaaggctttataccaaatgagtcttgctttacctcgtgcctctgctgttttcatcagttcctttgaagagttagaacctacattgaactataacctaagatccaaacttaaacgtttcttgaacatcgcccctctcacgttattatcttctacatcggagaaagagatgcgtgatcctcatggctgctttgcttggatggggaagagatcagctgcttctgtagcgtacattagcttcggcaccgtcatggaacctcctcctgaagagcttgtggcgatagcacaagggttggaatcaagcaaagtgccgtttgtttggtcgctgaaggagaagaacatggttcatctaccaaaagggtttttggatcggacaagagagcaagggatagtggttccttgggctccacaagtggaactgctgaaacacgaggcaatgggtgtgaatgtgacacattgtggatggaactcagtgttggagagtgtgtcggcaggtgtaccgatgatcggcagaccgattttggcggataataggctcaacggaagagcagtggaggttgtgtggaaggttggagtgatgatggataatggagtcttcacgaaagaaggatttgagaagtgtttgaatgatgtttttgttcatgatgatggtaagacgatgaaggctaatgccaagaagcttaaagaaaaactccaagaagatttctccatgaaaggaagctctttagagaatttcaaaatattgttggacgaaattgtgaaagtttaggttgtttacaacataattgaagactataaatgtgatttcaaaattaacaaaatcatagtcaaataagtgtgtgcctattctattttgtcaaagtaagagtgtatggatctattctatttcaaagggttgttgattttcattgtacctgatatctatatttactcggatctatgtttatttttatgacaattaacaaagtttataaaagtaagttgtagtctattagacgattaaccttgaattcaggaaatacttaaaatcattatttgaagttccttttagccctatttcataattacatgagttgtgttcaacaagtatgatttaactcttgcttggtaatcttagatcatctgctgcttgaatgttatctcttcttgttgagtaggtaggtatgtttgtaaaagagatcatcaatagcaagaattggaatttgacaacgagattcttatgcactattgtacatatgtaccaaaaccacagtaggagaaaaatatatatcaccatggcatttctgaagattcaagaaacattgatttcaataatgaagctatacgtggccgattaattctcttgttaacttgataagaagttcatggccaacaatgctgctccaacagctggctctacctgaagatacataccagtacacacttattcagtcgttgacggggaaagagagagagagagagagagagagataatgaatgagaggtagagaatattcaacctttggtatgatagtttgagcccctggaaagtatctgttaatgcgcttagagacttcttttccaatgtcccatttctgattagcgttaaggactccgcctaccattacaaccgggaaagaagctgtcccatctgaaacaagaagaatctgatactttaaggaaccgggtgtcgagcaaaggaataaaaaacagagtcagctggacatgtaaaatcacctttgccacataaaccaagtctctgtacaacagctttcacactgagagctaaatcctcagctgcatcaaccaagatcttatctgaaatttcatcaccagcttctgcacaagagactacttgaggaacaagagcagcgatacgtgcccaagatggatcagcgtaagtccaactacatccagaaacattagactagcattttaagttgtgtacggttttcgtcctacgggacaataaatagaaaggagcacttctcttcaggtctgaagatttttaaatgcagtgatggatacaaggaaattatagaaaggcatatgttttgagatcagtcattagtttgaaaaagaaggtacccgatgagttcgtctggagaggagagtccaagtgcttttaagatggtacttgtaagcatcgtttgtgggccacgaccatcatgagctctaatcaccgccgttaaggcctgtgcagcaattccatagccactgtaaatagtcacatcatcattcacacaattatcggttaaggaatctcaatacatttcaagtgtatttccaacaactatataatgagaaagtctacagctacaatcataattttgactcatgcatctgtgaagccttatacgaggtaaaatcaaaactaatattcttctggcaagatggaaccggtgataaaacaaacctcactggatagaaagaatgcgaaagcagagacattgtgatgtgattttttcttgttaatcgtagaactgaaattgatatgaaccacaacatgggaagaaagataccttccccaatcacctaagattggtccaccaccagatgccctagcctccttgccatcttcatcaaagccataagctatacatcctgtaccagcgattagaacgcagccatggagctttcccatggttccactagctaaagccactatagcatcattctgaacatataccttgacatgactaggaaacatgtccctgcaaaacatttgggaagagggtaagctcgagatgatttacacctaaaattcctataacctaattcacaatggacatgactaccaccttatccaattttctatcttttcctggtctgagggatgattaacacctgaaacacctaagcatacaccgcgaacatctgatttatcaaaaccagactgtacaagtgcctcagaaatcacttgctctagtgaatcccttgctgcagtttctgcatacacgatgcacattgaaaggtgactttaatatggaagaaatatccaagtggtgccacagctatatccaaatatttgctgcaagcaaaaccaataccgcacacacaaaatagattaattccacacaactagaaccaaaacacacacacaatggttattatattcagctaagaacaaatccattttcaattccagaatcagctaagagcaagtaccacattgcaacagaacttgattaaattagatcagacacactcctattaatgattatcaaagccaaacattcattgatatctattgcccggagctaaaattatcgcaattcaacaaactccagaaaagttcaacaacccaaaaagctgaattcaaaattcaaaattgaatagagaatatgagacggaacctccaacgctgttgcgattggtgcaaccggcgacggcacgaccgaggatcggaagaggatccgggaaacgttcaccaaacgaaaaaaatggaacgcaaacgcataccgttgaggtggcgccaccgtcaaggcccaagattacgccgtttacgaaaccgttctcctccgtggcttctcctcctccatcagcttcaagcttccgaaggtttccattgctatgtggattcctcattcaccaataaaaaccaacccagatgaggtcaaggaagatggagaaatgggtcgtcgagacttgagacacgccagtaagaaattagtgccctttcgatcggagatcaaggatacctgaaattttcaatttcgtcgaaagatatatatctctctgtctttgttgactttttcaggaaatattattttaaaagggtttatcaacgacagaggattaacaattatagcaaaatctttcatacacgatttttctttttataggtaacttttttaagaggagtagatttttagatacatttatctacacactacagaattcggttaaatgataatagtctttgtatttgaaaaaatattcatgaaaattagtattcagatgaaattatatacacaagcgttctaatcgttttgacaaaggaagaagcaagtttcaaaacacatgagaggagaaacgaatcttctgctttggatcttgacaaaagggaaacctccggtaattgggaagcttgttatatgagtcatgagtctcatgactagtgctgttgaagatctagctggctctgtcaacctgcaaatcataacaagagtggttctgagtgctaatgatcgattagatcaagaacctgttatgtagattaaaatgttgcgtatgctaggacaactcctaagttcctaaccaaatcaaatcctacgctgagacatgaatgacaaaacactaaaaccgctaagaagtatatccctagaaacctcctagttctgtgagtccttgagccacgtgacttaatggattagagacttttcctatcactccaggtagcattcgcacagctaagctttgttagattcacctaaagtgaacattgttctcttagagtagatcatctcctcctaaaacatgcaaagtgtaaatgcaactcataagaacactcctagaaggctagaatgcaatatgtggaagtaaaactgtgaaaagaaaaatcatgcaaccttttgtttttaggcttttctatgcaaataaatataaacagtgcaggatttaaactccactaggtgtgactacgccgagatgcatagccacaaaaaacatcataaataaataagcaagtcaagcgataggataccctttcacatcccatcgggaaaatgcaagaaatgaacgacatgggatgtacaatggaatggatgtcatacctaggattttgatagcgctgcagaaccagttttggaaggacccttgaggctggaagttcataagtgggatatcaaatcctctaggagctcaaggtgcttgagtttgagaagtattgactctatgtacccttaaaattcccaaaaggaacctaaccctttgctcctcttgcagaacccacagttcctcctttactatggaggactcatcatacgactactcctcaacttgtcattcattatctggttactccttttctaatgttctattttttagttacaaactaaaagtaagatagaagacaattcaaaattcgaatgacagttttgtatctttgttggaattagtataagaaatcttttcaagaaattataatattgtaagaacagatagtgaataataagagtattcaattatcagttcctctaatgctgatgctaaaagatacttccttttaatgtaatggttcccatttctaaactaaactgcattgcaactaaaataagctgttacagctttcattctgcctccaacaaagttttcttctatctgaaagcacagcataacaaatttgtcaagacaatagtttccaataaattagctctcctagtattcttcttgacagtgcgtcttacctcaagatttaacggaggcgacgagagccaagctagttcttccacttgtgctaaatcaacatttcgcggtagaaacataatgatgttaggtgtaatggactgagcaatctgaaacaatgagtacctacaccaaaacaaaaactcattacaagatccacaactatattgaacacatcaataggtaaagtaatcttttgttacccgtctcttggttgaagcatatccaaattgtaactctcaaaatctctatacattggtcctccccatggtggtgaaagaaacactacatctccctagtagacaagcgcaacaacaacaacaacaaaagggtcaaaataaatcttcacacttgcagaaatataaaaactgatagagagaagaaaaagaagattactttgagagaaggagctaattgtatgaaatcaccaatgacaaaatcaacacgattagcaactccataaaccatggcattgttcatcgccaattcaactttcaccggatcaatgtcaatagcaacaacagaagaacatctatataaaaaagagtcctttagaaaaacatcacaatcttcttgatattgagagagatagaaaaaggtttacactttagcaaattgaatagtgttaccaccaacgcctgagaagcaatcaatcaccactttgccacgatatctctgagcttgtttgattgcgatttcttcaggagtcacagagtaccatccttcttcatccatttcgataccttggtcatatcttgagaagagatcgtaacgttgaatccagtacttagtgattttatgtctcctaccattatctttctctatcgttgattttacctctgcagaagaagtattcggtttttttcatcagaaaagttcaaaaattggagaaaggcgcacagattctgggcagcttctatttacctttcttcaagcgcgatcgtttcttgagcttcatcgatctcgtcatgttgtgtgactcgtgagtcaaagagtcaactcgttcaacgcctctgatagtccgagaagataaagcggggttcgattcgattctacgggaaatcgaaattctcggtattaactaacactcgattctcgaccggtttggattaaaccggtccgagtcagtccatgaatcgcttgtatttgggatttggtaatattgagtagcttaatatcaacttattaacttttcttcataataaaagttggaagttcataagtgggaatcaaatcctctagttgttcaaaaaacatctcttacaaattataaaaatgtaggaacagtcgaacagataatgaaagacaagagtcagttcctctgtttccttatgtagaaagatttcgcaactaaaccacattgctactaaaataagctgtaatggcttttatttcgcctccaatggagttttcttctatctgaaatcgtgcatagcatgcatatgaaaagtgtcaagaaaagagtttgcaacaaattagctcttctagtgttcattaaataaagtacctcaagagtaagaggaggtgacgagaggcaagcgagttcttccaattgggctaaatcaatgtttttcggtagaaacatgatgatattaggcgtaatcgatagggcagtctgaaacagtgagtagctacacaaaaccaaaacttcattacaagatatgtattacaatatataagaattaagcactactttatcatgtattgaacacaaatctaaaccaatagttaagagttagatatgttacttacccatctctcggtaggagcatatccaacttgtagctctcaactttgctatacgttggacctccccatggtggagaaagaaacaatacatctccctgccaaagtacgtagaacatatatatatgcatgatttgaatctatatgtgactattgtttcaatgttattacttatttgagactctctcttttttctttccatttttgtattcatttgaattaattgttctactatttattatgtatatacaaatttgtttataaaaaaaaaaattaggatacaaatttgtttagataccctttgtagatctctattttgaggagaaaaaatctatagagagaagaagatttaccttgagagatggagctaattgcatgaaatcaccagtgacaaaatctatacgattagcaactccataaacctttgcattgttcattgctaatgcaatcttcattggatcaatatcgatagctataacagaagaacatctaaaacaaaggtataaagattaaaaaaacatattttacaaccattaatcacatacttgttatagagagaaagataaagttaatattacactttagcaaattgaatagtgttaccaccaacacctgagaagcaatcaattactactttcccacgacatctctcggcttgtttgattgcgatttcttcgggagtcacagagtaccatccctcttcatccatttcgataccttggtcgtattttgagaagagatcgtaacgttgaatccagtacctactgatcttaggattcgtaccatgttctttctctatcaatgattctgcttctgtagagtaaagaaaaactagagatatataagaaagcaagaaagtcacataagattggaacattgagcagtgtttatttacctttcttcatcgatctcgtgttgtgtagtgtgattcttcactaaaaaaaagtcaactttgtgttcaatgccaaaaagagagtgaagaatggtccgacaagagagagtattggttcgaatctcccgggaatcgaaatattcgttttcttttaatatttaaagagctaatttgatctccaccggtttggattaaaccggaccggctaaaagaaatagatcaattttgaaaatcttaaggcttgatttcatgatggtgtttttgatgaatttaaattgtgtttcctgaaaaaaacaaaggtcattttttctggtttcttgtgatgttttagtctaaatgctaatgatatataatataaagttgcttgcataatctttggtatggtcaacatagcaatcccgtaacagcaagaggcagctcacgtgacgtgatttgatagttacacagcatgagatatatgctaatcacaaaaaagtcaaatacattaatatttccatggtttgaatcattataacgactgagttggtaatcttagtcacaagaagataatttacaattttaagttgtaggattgattcaacgatcataacttaagaacgtctcttcaatctgtggttcctttgcttcctttcttcgagtaattatataagcttttaggtatattctcttgtactaacggatatttgttgtttctagtattttttttcctcagatgaatctgaattcttgatttgtatgttctgtacatgttgtgaagtttaaactagaaaaagtgggaggatagtaacttgaagcatatgagccaaaagtcaaactatttaaaaatacaccaaaggagcttgagattgattaggtaatttaagttagttattctcacgttctttaactatatagtagtgcttatttccttcctagcattaagttgcagaaaaaacagagaagtagagattttttctcttctcttcaaatttcatagttcattaaaatttgtgtgttgaatgaggcaatctcatgtttaagattgttcttaaattgtcctctgagtgattctagttggttttgtcttttgactttttgttgtcttgatctctctattcaggtttttttggtcacgtgagaagaagctttagacatggcgtcgtggacttcatctgaattcctctatgaagaagtaaaaccaccaggtattcatttcctagaacgtttcaggcgttcaggaaaactctctttcaagcaatatcaagcaatggtctttgtcttgaccttcattgcttatattgccttccacgcaacacgaaagcctaacagcatcgtcaaagga

SEQ ID NO: 65 - DNA, 95383 bp, Arabidopsis thaliana
aagctttagacatggcgtcgtggacttcatctgaattcctctatgaagaagtaaaaccaccaggtattcatttcctagaacgtttcaggcgttcaggaaaactctctttcaagcaatatcaagcaatggtctttgtcttgaccttcattgcttatattgccttccacgcaacacgaaagcctaacagcatcgtcaaaggaacactctctgaacaaccaaccggacatttcaagggtgcagataaaggtggatgggctcctttcgatggtccagatggaacagctctgcttggacaaatcgatttggctttcctctctgtttacgcggttggaatgtttgtggctggtcatttgggtgatcgtttggacctcaggacgtttctaacaataggtatggtcgggacaggagtgtgtactgctctgtttggagtcgctttttgggccaatatccatgctttctactatttccttgcgattcagacattggcagggtggtttcagtctattggatggccttgcgtggttgcggttttgggaaactggtttgataagaagaggagaggagtcattatgggtgtttggagtgctcatacatcattagggaatatcattgggactttaatcgctacggggcttttgaagtttggttggggatggtcttttgttggtccggctttgctcattacgtttcttggcattgtggtttacctattcttgcctgtgaaccctcatgctgttgaagctgagagagatgggagtgaagttgattccacaatgagactcggtgacaccattacagagagtttcttaagctctaggacgagtactggattcgatagaagagctgtcgggttcttagcggcttggaaaatccccggtgttgctcctttcgccttctgtctcttcttcaccaaactggtctcttacacattcctctattggcttcctttctacgtaagccagactgagataggaggagaacaattgtcacaggagacatcgggaaacttatcgacactcttcgatgttggaggcgttgttggaggaatcttagccggatatttctctgaccagctcgacgggagagcaattacagccggaggattcatctacttaacaatcccagctctgttcctctacagaatatacggtcatgtctcaatgacaatcaatatcatcctcatgttcgtagctggattatttgttaatggaccttacgctctcatcacaaccgcggttgcagctgatctcggtactcacaagtcgcttaaaggcaatgcaagggctttggctacagtgactgctattatagatggaacaggatcagttggtgcagccattggacctgttcttacaggttatatcgctgcgattagttgggatgctgtgttttacatgttgatgactgcagctttgatctctggattgttgctcactacgcttattatagaagaagtgaaaactttgttgtatggatcttctgaagaagatcatgaagtcgctgctgcttctacatcaagacctcccattgatgtcctcatatgatatatcatgactttgatcttttttctttttgtttcttttgtttttcaatctgacttgtcttcacttacatgacttcgtacttgtattatttattgtaaggtttgaatgaaaacatccctcttggttttactgtgtcttgtcattgtattatctattgtaaggtatgaatgatgtaactaacctaacccaaggaggataacttccggtataagttacttatgcattaatcttctatctgaaaacaataaagatctccaaaaccaaacatgagagccaattgcaatacacaatagcatgcctgcaaagaagtatgtttacccaaaaataaaaataaaaatcacaatcgtttccaacttcaaaacttgtttgagtgaaatgattcgtcactatcctaaaacatcaaatgagagtatagtctctggtatggttttcaaagaacttatttgcttcttccaaacccaaaacatttctcagttagataaagcggagctgcattttagaatctttgtacacacatccacttctatgcctaaacattacaaaataaaagcatagcttatatcaaatagactttgtacaattagctctatataataaaccttgccttgtaacacacacttgggacaaccacaatctttccatatcaaaatgggcttaaaatcctatatgggctctgtatgaatatgaaaaattgatcgagggacaagcacactattaattactggttgtaacaataaataaatagatgggtgatttgattgtatgaatgagaaatgtgaacaaatgtttttttccctgctactacgactagtgtacttctagggacggtacggaccaaacgatatcgtaaagacaaaagagaccttaacgtgtccagaagcaagcgtaggttgacgagaggataaaataggaaattagagtcgaggggttattaatgaatgctgatgatctaccggacaagtgcatgtgacccactttccctattattgccaccgctcttatcatttgtctctttctcttcttttctcctttttttttttttttttttttttttttgggtctcaaggacttctttatttgttttgagagtaaaatttgcctaatgatatgataatagttttaagagaaattagatagatgacataaatatgatatttttttcttcttaataagagccattttgtattttgataatgtgaattttttttaataacatgtttttttcttgcattgtaattttgtaacatagataaaatgtaaatttggaatcataaacttgaacatgtatttactaaattgaatattcatctaataaattatatgttactagatgaaattatgcttcccttagctatgaaataaattatagaattgtccaaaacccaatttaagtcaaataattgctatttatttaatttatctccaaaatattgtcatcttgaaggaaaaaatattctttctgtattttaactatttgcaattaacataataatttattaactattgtgtacgcaaatttaatctttaatttgttgctaaattaatagttttgggcaaaattttggtcaacagttactagtttttagagaaatgtcagttgacttgattaaaacttaataaattaaaaaaaaaaaacaaattttcttccaaattgaaaactaagagttgtagatgatttttttcaaagtcgattgaaagacatagagattgaaatcgaattcacatattgtgacgaaaacaccatgaataaatgaaggacaaaatttcaatttctaagggatagctaagaattttagaggttttatgagtttatttggaaatctagaaaccttccaaaatctgttagttaataataatttaattacatggagttttctttggttttgccgggacatgagtttacttattaccagtttcaaagtgacaagaaagaaaggaatggtaaatgagtaatgaggttcttcgtacttgacttatttggtgaagagaacaaaccaatcagcaaacacagatttttaatttagtatcattaatttacttgtttgttataaataataataaaaacaaatattcaaggaaaggttttattctctgctctttcttttccaatctgttccaacaaaacaacccatgttcatcatttcttctttgtccagataactcttttcagcttttctgtattctttctccctcttaacataatttgcctcttttgttcaaacccagatctttctgttacttgttttctcattttctccattaattcattctccatttcgaaagaatcttactttgttctttgtacttcttgtggactcttctgggtcgtattgcttcagatctactagctaaaaggagcatgaagttgggatctttggtttgttttgtgccttcttgaaaagaaagtttcagcattttagtttctgattgtaagaacaaaaaggaaatttctttcttgagactcgttttaagcccttggttctcttgctgcttctctgctattgtctggtggaggctaatgaacaaagaagagtagctagatagggttttgcttatctgtaattgaacactctctctctttgtgagattcagttgcagtgatcgattgactcggtgattttaggattctttgagtggctatgtcgaagctgaggaaaaagtatctggaacatcttctatgtgtgttgattttctttacttatgttattggctatggagaagctcagtccaagagcttccttgtagattgtggctcaaatgctacaaccgaagtagatggaagaacatgggttggtgatttatctcccaacaagagtgtgaccctgcaaggatttgatgccattactgcttcgacatcgaaaggaagttctgtttacgctgagatatataagactgctcgtgttttcgacgctgtgttgaactatacatttgaaggtataactcaagggaattactttgttaggctccatttcagccctttcgctattgaaaaccacaatgtgaatgagtcttctttcagcgtctttgcggatggtctgagactgatgcttgacatcaacatcgcgggagaaatcgcgcataagaatctcatcttggaaagcactggtcacaatgctactgcctcttctttggttaaagagtttctgttacctactggaccaggaaaactggttttaagtttcatcccggagaaagggtctttcgggtttgtcaatgctattgagatagtctctgttgatgataagctttttaaggaatcagttactaaagttggtggaagtgaagtggagcttggtttgggtggacgagggattgaaactatgtataggctaaacgttggtggtcccaagctaggtccaagcaaagatcttaagctttatagaacatgggaaacagatttaagctacatggtgattgagaacgctggtgtagaagtcaagaacagctcaaatatcacatatgctttggctgatgattctcctgtggctcctcttcttgtttatgaaactgctaggatgatgtcaaacactgaagtcttggagaaacggttcaacatttcttggaagtttgaagttgatcctaatttcgactacttggttaggcttcatttctgtgagcttcttgttgataagcaaaaccagaggattttcaggatatacataaacaaccagacggctgctggtaatttcgatatatttgctcacgcgggcgggaagaacaaaggtatatatcaagattacttggatccggtctcctctaagaacgacgttctctggattcaacttggacctgactcatctgttggtgcttctggagacgctcttctgagtggtcttgagattttcaagctcagcaaaaatgggaatcttgctcatctcatcaggtttgattcgactggtcactcggtaagtgactcgaagatgcggattatttggatcagtgttggtgctggtatagcaattatcatttttttcgtgttcttgggaatcttggtagtatgtttatgcaagaaaaggcgaagcaaatcagatgagtcgaaaaacaatcctcccgggtggcgtccgttgtttttgcatgtcaataacagtactgcaaacgccaaagcaacgggaggctcgctgagactgaacactcttgcagcatctacaatgggaaggaagtttacactagccgagattcgtgcagcaactaagaactttgatgatggtttagctattggagttggagggtttggtaaggtttacagaggagagcttgaagatggaacactcatagctataaaacgagccaccccacattctcagcaagggcttgctgaattcgaaaccgagatcgtgatgctctcaagacttaggcataggcatcttgtgtctttgatcgggttctgcgatgagcacaatgagatgatcttggtttatgaatacatggcaaatggaactctcaggagtcatctctttggaagcaaccttccgccattatcatggaagcaacggcttgaagcttgtataggctctgcgagaggattgcattaccttcacacagggtcagagagaggaatcattcacagagatgtcaaaacaacaaacatactattagacgagaactttgtggcaaagatgtctgattttgggctgtcgaaagctggaccgtccatggaccatactcatgtgagtacagctgtgaaaggaagttttggttatcttgatcctgaatactttagaaggcaacagttaacagagaagtcagatgtttactcttttggtgttgtgttgttcgaagctgtttgtgctcgagctgttataaacccaactttgcctaaagaccagatcaaccttgcggaatgggctttaagctggcaaaaacagagaaacctcgagtccatcatcgactcaaatctgaggggaaactacagtcctgaatcgttggagaagtatggggagatagcagagaagtgcttagcggatgaagggaagaacaggccaatgatgggagaagtgttatggagcttggagtatgttttgcagattcatgaagcttggcttcgcaaacagaatggagaaaactcgttttcgagcagccaagcggtagaagaagcaccagagagctttactcttccagcttgttccaatcaagattcctcagaaactgagcagagccaaacaggatctgctcttcacaattcggcttagaggaagcaattggattggccagtcccaaaataattcttttgttcttttgttataattgattgtgatctatccagaagctcttttgtaatagagcttgtaatatacactgcaaatataatttccttaaggtattcgtttaatcattctttccatttgtttccttcgctaataagtgcaccagaagttgtttgctgggtttcttcaactcattctcacgcacaattactcaaggttctttccaaatagtagagaaaaacttattgaaagagttctaaacgatacagcaggcttaatgctctgtctaaaggcaaagacatgtcttagctaactgcaaaatgtaaagagttacaaatacttgtttggtaaagccactcaaaaacggaaaatacagcttggttcctttctcggaaatggatagagcttcaagatccagagaggacaccgcggataggtggacagacggatggatctcatttcttcccaccaccggaaacattgaacttgaagaaaatgatatctccatcctgaacaacatatgttttaccctcctgtctgtattttcctgcggcctgcattagttgaagggattataaattagaccaagtgtcatcgccatgaacattataaatataatcatgcctcttcaacgaggatatcttgcacagtggagagcttccttaacattttcatgtctgtttttagaggctacttactccaccgagaccttaagagattgtagaaggaaaagaagttatagacaaataccttgactgcaggttcattgccaagttccttgagatcctcgaatttcatgacctgtgacatcaacaacaacattggaataaatcacattgaatttcaaaacagaaaaatatttgattagatatggtttgcattaggattctgctttgatatctacaggcctgcatcgatactaggaaatcaacaccaagatgaatataagaatatgcaagcaagcatttgtttttgtcagtgaaaacataagaaagattatataaactctataacagaacaaatcatcaaaatctggaggggaaaggctttacgcatgtaaattttaggtaggaataaactagtgaattgaccaagattcaagagaaatgagaaaatggtacctcagcacaaataaatcctctctcaaaatcagtatgaatggcccctgcagcttgaggagcctttgactgccgtcttatttgccagcacttcacctgcaaatcaaagtatcattgatggatgtattttataaaccatcaaattccagtaacaatgcactacttgacacataacactgatcatgcactaccaaatagctcattacagaacaattatgcttagaagaatttcacagagaactagagactaaagcgtgtagtgaagccaagtaaagtgggactgttaatacctcatcaggccctgctgtaaagaagtatatgaggttaattgctgaaaatccagttttgatgatcctcggaagagcactgtcaaagcagcaatggccataagattcaatttaacagattcataaagaaaaatcatcttcaggagcaactattcattcgcaaggtgctgttcttttattcctaacctttgcagtttgttctcctcacaatactttgctgcttcatctggggccatatcagcgagactcctttcaaacacaccactgaaaggaatcatagtatcaccaccgtgttcttgaaccctacataatgatgaaacagatatttttagtttaggagaagtataataaggtaagtaaatgtgtaagcacgtagccatattagaaacttttgcaacaaccaaggggcaaaatgttttacttattattcaacatagtttgtgaaaggatatatattagtaccaggcatgaatctttggcaagaacttgtttttcttcctctgatagtctctctcattcaggttaatctgtaatttaaatttcagagtaaccagtgatcacaaaaagtccaaccaagatgccttaatagttcttacactgagatgaaacacatagttgaaacaaacatgaaagcatagagatcagaaatagctaaggaacacactatggttaaatttgggggcaaatagtgtcacaaaaatagacagtatgacctacattttgcaaactgacccgaaaaaaattgagggaacaaaattgtcgactatagatatgaaagaagcaaatgcatttatcttgatagaaacaatggtaacagaaagagatgaacattcaagactactcaccaagtaaacaacgggctttgcagaaagcaattggaaagtgttcaaaatctcgatatcagctgttttccagtccccaaaacggacatccttaccatcttctagccaagcttttacctaaaccagagaggtacagtcattttttcggccaattaataattaatgagcaataacatttgcagaacaagactgcatggttgtcaaattatagcataccttttgcaagagctcaagttctattttcagctgcttgtcattgctcctcttcatgctcttctcgacatcatcaatcttctttccaacaaattcaatatcctaaagttgcaccaaagaattcagtttgaaaccaaaacaacaatggatgaaatgaagatccaactaatacaaaaaacagactactgtattaatatacacagaaaggatttcacgagtttggagatatagcagtcaaatatctgtttagagatttgattcacctttagccgcaactcttcagtaatggtctccaaatctctaacaggatccacgatatcgtcgacatggataatatcagcatcttcaaaagcacctgcatatgttcaatcgaaaagtcactaaccactatataactggcaagatatcttactatcagcaactattaaagaaacatccccgttgttcaagaacagatatgcttggagaggaaaacataaactaactatcgcaatggccctataggtatcaaatgggaagaaaaatatataaaggtttttaacctgtctctcattgaaaagcctgctcaagtagaaattcaagacagcacaagtagcagtacagtctaaattattcatcaaatcacgcatcacactaaaacaaagctggcactaggagaaaaagcgagagggaaaaaccatacgtaaaacatggaaaattccatcaactgcacgaatatgggacaagaagttgtttccaagaccctgtccttcatgagctcctctaacaagcccagcaatgtcatgaatttccaagaaagctggaatctgaggcatcaaaacagacagaagtcagcccattcataaagtaattcagatagtagtaatctcttccttaacagcaagtcatgaaataaagttacaaacttacctcactcttaggcttgtaagtttggcaaagccaatcgaacctctcatcggggatattcacacgtgcctcattaggctcaatggtacaaaaggggaaattctcagctggaattgaaagctttgtaagagtgttgaaaagagtagattttccaacatttggtaacccaacctgcgatgccacaaacaattcccatagtgaataacatcaatacttctccatatcatcatatcaaccatgaacaatcaaccttaatcactgtatcaaagaagcagtttcttaaatatggattaaacatctaaaagagtacagtgacaaacacaacgaaacaaacaatatcatcatgcatcactgatgagttaatagatctctcccggcaaaactcagaagaagaaaaaaaaaaaaaacttttatcgaggaaagtattgcgatgagcaaatctaccattcaccattcgaaattaatcaacttggattctaaaagagagatgaagagaaaaattacaattccgatcttgaggtgagaagagaaacggccaagaataggcctctctacgggacctgcatctttagctttggctttcggaggcatctttctcaaagtctcgagcttgaaagtgaagcgaagctctaagatattctagggtttttgctgattaacaaagcctagcagaagaagctacaagacgccgacgccgaggttaaagagagattgctcagctggtttacggaccggtttaaatcggagggtcaattcccggtttacttttaaccatttgcgggacatttaccaaaatacaaagagctatttttaaccaattttgtggacaaagtaaacccaatattgaacactaaaccgagaaatcaatcattcagcatttcaacttaaccaaattaaaccgaaactcaaattaggtaatcataaaccaactgactaaattttacttcatagatgttcttcaaaattttgctacaaaaccacatgcgatcagataataccacagactcgcacaaaactcatgtcaacttcttttttttagagtttacgcactagctaagagattgtaataagaaacctacattgcaaaattgcattccctctctctatgactattagattaagaaggattcaggaggactagtggatggtctgattcttgaaggcatcttcaagagcctctctgtttctcgcatgaaagagtgtttcggagttgtagacatcgtgttcatctcactatcaagttcaacgtcatcgtcaggttcctccgcactgtctgcatctccattcactatgacctcatcacaaagctcttcgtcaccatcttctccataagtcgttttcaccattgaccagaagttgaagttcggggagatgtagcttcaagaattgacaagaaaacacgtgtgagaaagagagttcaagcctatccaatgcaaatactttgattcatcacttgttttatcatattaaaataattttcaatgtcatttcaagactgtaattaagatgtatgcagtagaatttgtatcaaatatgcccaggtcgggtaaattcatccagtgagtcaagaaccttgtgtaagattctcacattgatttgtccttactttggaagagaaaaaataatcaagagtaaagatagcaaacctgctagacattttcaacaagcacgggtcaaacgggaagaatgtgtcaagcctttcaaagccaccaaaagcacgagagagctcagactcgtgtaggtcatcgaaaatgaaggattctgagacaatgaacagaccaccagctttggcttgtttaaggaactcggaaactacagatggaagacacacctgttcacacaaaatgaatggtgcaagcataatgcatttgatacttggagtgaagactacttaaaataacagttgagctatgagaagaaaatgattagtgtaagtcacccaccagtagtgggtttagtttgtgagataaaattgactccaatgatctaaactgcgattgaaagcgaggaatctccactatggatctcattcggaagcatagcacatacaagattgcctacagtcatagaaaagtaacaactttaagcgatacatgacataatagcatatgatcccaaacgccaataagcttctggtaagggtgtgaacattaacaatgattgataactagagacgtcaatgatttcacagaagagttcttaaggaatcaaaagccataagatggtcttaaacttggactatacctgacatccagaatagaacacttgatgtgcttctggcttcacatcatcattgcatgttccgcaatattccgcacactcgtccaccaatctaggatttcagcaaaagagaaactatgttacaacaaagcgagacttaaatcagatcaaacaattacattttccattttttagcaatacgtaccttttcaacatgctagccacaaaagaagcaggcaaaaactttccacgagacaaatagctagctagataagccactgcactcatcctgttaagtataaagagaaaacaaaagaatacacaagtggtgattagaacaatattagcttcatatcatgcagagaaatctttaccaagaaggacaagattaaactcgcctagtaagtcgacatgtgttgctggagagatatatgtccaacagcttactggcaaatctcacaccacaattttcaggatctagtgagcatgcatagaacatcagaaactgcagatgaaagtagagtgagtctaagccaagacatcacatgccgataatgaactaatgctagaagcctacaatgaaaactttgtagtatgtaaggtgatagctttgatgcctacctgtgaaaattttgttttgtatgtgttcagaatatagttctcgaacgacttaaagaggatttcaaatacctatgccaaaatgaaaaacagaaacaccaaaagatcaatgaatctaccacaaaggaaaggaaaaatatgttgaacaagtaccatttggtgccatacctcatccaaacgatcagagttttgacaggattctagatgatgaaaaaataggaccatcaatttgtccaacagttcagagactacatttccacctgaagtattttgttttagagcccccactggaaactgcaaaaagagatcaaatttatgaatgatgacacattcttctccaggaaaccagaggtcatgtctaacatttcacaacaagagaaaatggtatcttgtcatcaagtaactttcgatcattactaaacagagtaagtttcgggattttgcaaagatagcaaaaaattacactaaccctacctcgtctccttcattcatagtgctttcaactgcatcttcaagttccatatcaaacatgcctccattagagtcatcacatccacttaccaactacaaagatgctcaagcatatcattcacttgccactttacttagtggctacatttttataaaaaattaacatctacttacatctaaatctagcatcctctccattaccatcataagaatcacgctgccaacaacttctccgattgagctattctccaacctcaacaggttatccacatatgtcactatagacttcaagacaaaaagatagtttcaattctttaccaccaatatgacctcactgttacatagtctaaactataaccaaaaaaaaaaaaacttacagggtcctttttgtcaattttacgcatgttctgcgcaagtatagacactaaattccagggagcaagaggaattaaataagaaatcttgtgaagggctgcatgcacccgtggatgaacttcctgcatctttttgactaattgggtttgtgaaactttatgcttaaaagtaggttgactgaaatttcttacgagcatattcaaacaaggatccagatattttccactagtagcggcctcatgatgagaaacaacaaaaacacaaaatgttattctctacaaccagattataaattcattgacattaggagtagttgctgagttgtgtaccagtgatatgattaggtccaccaatgcatccattacactaggtctgtgactatgataccacaagctcatcttaaaaatctaatcacaataaatgggatgaaattcagagaaaggatagaagggcatgtctttaacaagtatatatggattcaactgtgagctcatgcaataaaaacttacagcttcaagaagatctttatgatgaactaaatctatccaagcaacggaaactgatagacttttcaagactgtctgcaaaacgaatgaaaatggagatattttagtaacaacaaattcaaaacaagaattgattgtcatatgagggaggaaaaggaaacacctcaagctgtgccactgcatcgaaatcagcgtcttctgtaaggcacatcactgttttaagctgactataatcgtcggtatctccctggatttgattaaagaaaacacttttaacgaacacgaacacacactgacacacacatatatatacatagtgtacttggaagaagtaacatctgtagcaacactcacattttggacagatgcaagggcctttctaacggcaaacaccaaatctgtgtcggtatattcagcgttgtccattgcatttgagttgaacggaacactcggaaattcttctgctcccattctctatgaacacaaaacacagctactgctgctacttcagaattttgccaagaatctccttaatttaacctactaaagaacaaaacaaaccatcaaaatgcaaggagcacgaaagtaaacagtagattatgtataaagccccctttaagaaaccaccctaacaatttgcttctaaaccaagtaacgacgcctactattgaaatcaaaaccagaaaccatcataaacaaaggttaaataactcacaaaagataaacaattgtactctctctgcttcacttagctaagcagctcaagcaccagaagatagcgaatttcgtcggaatttgaaaaattaatccgaacccgggaaaaaggagaataaatcacgaaaggtttaagctttgatgtgactctccaacgtcttcgtcttcttcttctctgtgtcgtcggctaaggagtcagaagaagaagagagaagaagttcgatggatccgcgaaactaggcctgggatttcggattaaaccgaacaaaccgaaccgaacaaaccgattttttcggttccgattaccgactatgaagagaaggctaaaccgatcggcaaaattataattggagttcggttctcggttcggttcggttcggcagacataaccgatcggttttctcggttaatagatactacctataaaaagataaaaaaaacctagatctaatcttcatagcttcttgttctctatctcgtttcttcttttctccttcaaccttcttcttgcaccttcgttattttcataactcttccttctccatcccttttcttttgttctcttcttcttactccgcctcgacatcgatccatgccagtgttattctagagagaattaaaacgtagtagcctaatcatcctcatccatggctattttaagtcaattctctccattgcatgtggtgttgactatggtagcacgttaggggcagattttgttacggagatattctcatccctcgccattgtcgtcaccgtctccttcgcagatccgctggagggagagaagagggtagcggcggcaagataccatgaaccctaattgttaatgggcttaaatttatttattttgggctgaagtttattttcgttttggcccctttattaatttgtaactgtaattttttgtttatcttggcccattctacaatttttttgacccaatatcttgtttttgggattactcggtttgaattaaccgaatttaaaaaaaaatcggtttaattcggagttgattttaaagcctataaccgaaccgaacaaattgggaaccgaaccgacccgaaccgaatctttattcggttcaattcggcagaattttaaagaaccgaaaaaaccgaaaaaccgattaaaccgaaccgattaacccgagttaaccgaatgcccaagcctacgcgaaaccctcaaaattaacaatttaacccttctttatgaagctaatgacgaaaatacccctattctttgtttgtttggaccttattttttgtttcgttgtgtttgggtatttaactactgtttgtcactctcagcaccccacattggcaaacaaagctcaagattcaagaaaaagaccactttaaaatactcaaacatccaaaagattggattagattaatattcaatcaacttcatcattccaaaagcatttacaaactacaaatctctctaaagctttttaagcaatgcacaaaaacatataactaaccccaaaaaaagaaaaagaatttgatcaactcccttaagtttgtttcatcatcacacaaaaacctctgcatgtaacaaacctattttttcagacagcaatcttgtagatgactgccactggaatgttaacaacgtgacctctatctccaaacagtccaattctcccaaaactagccatcgaaacattcttcatcgctcgaaagacaaggctcaagacccgtgtctgcccgtttcctattgtaaacttggcaggtgagaccttaaccgagactgagtccggtgccatccacccgactatatatgtttcgtttgtagccgtggttgcgatattagtcacccatcttaggacggctcgagtcccaacgagtttagctattgtgactgagggtaggttcaagtcagaggctgcaagggaagagttgtatgacgagcagctttcaccggtgtagttgagaacgactggagatgatccgttgataccacagagaaacttcatgtattcattgtaacctacatttgcagccacatttcatatcagtgattgatctcctttttcatatgctcaaggtaaaataatatgaacattgggggttcaagaaagtatttacctatgtcaaaaatcaaaccagggtcaagagctgcagttgcattaacaaatccgctacccatatcaaacggtgttgcaggggactgactaatgtcggggtttaagacagtgcgttgcgccattatatgctcaccctttctgtctgatagagaagccgttgttgaaagtgcggatgcaatggctgcaggagtgaaatgtgggaacttctgcttgatgagcgccgcaatcccggttacatgtggagcagacatgcttgtccccgattccatcgcaaaacgttcacctaaatatcgccaattcaagatctcaaaaagactactagaaacacataatgagtaatctgataaagagaaatgagggtatgtgtaccttgaaaatcatttgtaccaatgccaagaggactccaagctccccatatcgcgtttccgggagctactaagttgggtttcattatatcagcatcaacgaaagaatcatcttctgggtcaggtcccctagcagagaaatacatgaccttgggagctgtaatgccataggtaggcctcatgccaccaacaattttagcaacagacgcagacccaacaatcttccctgaaccattttccctcaacagagaagaattgtaataccggagtaaagcctgcatgtagaccataggaagagctaagttacattcttgttcagagtttaatacactacttcacattttaagactttgattatacctgagaatcttggggggaggatattagaattcccggtatatccattggacttgaagtcatctgaaaaccggtggcagaaggatctatatagaagacaaggcctgctgctgttaagttcttagctgtaagtaatgcttgtttgatggttgagacaccgagaatgaatcgtactgtataactacagacaaggatctttccttgcaccagcttctgatcgaagctacttgaatcttggcattccccaacatatatagcatccataacagttgtaccattgcgaagcgcatgtgtagctaaaacaagtttatgcattattcttgtaccagctaataaaacatgagaaaccggttaggtcaggtctagatggtaatcaagcaagaagaagctaagctataatccaaaatggacttacatgcgagtccaacaccaggaatagtgacattatttccgaggattatcgagttactatatactctatcatgagatgtagctcctactgtgaagatccatggactgaaggaagacatgctcttaggagctggtcctgtgtttccagctgcttgcactacaaagatcccggctttcacagctgaaagcaatgccatatcgattgggttaaagaacgtagcgataccaggaggacgtctatttggtgtgattgataagtttattatgtcaactccatcttgagccgcctgcaaaagaaaacatccataaccatgtcaaacataagaaaaactgtttatcaaagtttctgttacaaaagtaacatttttagttacctgatctatggctgcaatgatatctgcagcaaagcctccaaacctcttatacaatgccttgtagatagcaatactaacaagaaaagacaagacttttagtttctatatgaattgtttccatagtgaacatcattccgtggtattgacttactgagcacgaggagccatcccgctagcatttccaaggcgatgacccgcaactaccaccgggatcccgtgattcccagctgcaacagaagctgtgtgcctgaacaaatcaaccaatatcagacataacaacttgggtggtcaattagttaatcagcatctgagtggataatatacacttacgtgccatgcccttcaccatcaaatggtgaagcatcatcctgagatgaattcaagactcctctactgagagcagactcagcaaaatggcgtgctccaatgagtttcctattgcaagaaccgggcgggaaaccaatggtaacttcacagacgccagtaaagtgaggagggaccgaatatgtatgccccgagattttgtcactgaaactaggatgagtgggatcaattccagtatcaataaagcctataacaactccttctcctgcatattcagagcctccatcacggagccaagctccacgaggcaaacctaagaactgtggtgtgtgagtagttgctttctcgaccagaaagtccagaaccacattttccacttcttctctagctgcaagtctatcagcctaaagaaaaaacaaaccagttttcaaactcaagagctcataacaatgaacaaacactaacatttagacattcatatactgtttccaagacaatgtaagtacctgttttcgagtaagaaccgcggaaaacccattgataagatagtggtaactataaagcttaaggtaattctcctttctcaatacatttctcagcaatgaatcgtgaactctaataatagaagcacttcggttcctatatatgtataaacaaagagattataatcatactatagcataaaggtttcagcttgaaggcattagacattaatgttaatagcttcgtttaacaacataaaggtttcaacttggagcacgaattcaacaggcatgcctatatatccgtttagactttcaggaaaagaccaaagacacaagagacaagtaatctgggacccaaaattgacgaatttcaactaatgtcggtctatgaagattgagaaaaagaccaaaccctcccggaaaaatcaacagcgattccacgaagaaatcaaaccctggataaagattgaaactttgaagaacaaaaagaaagaatggtaacttttttctacatacaatgttctgtaaatttgggacgaagtagcggtaaggctgtgtttagagtcactcgattctctgccggagaaatgaacagatggacggtccttgagagtaacaatgtaaacagcagaagaaacggttgcgttttggtcagactcagccaaacagaacacagacgacgaaaccaaacagagaaggaacacaaaacgaacaagagaagactcatccatggttcttgagctgaaattctcagaagaaaagaggaaaagaatgaaaattgcagagacccattagagctccatggcagtggagtagagaagcgtatctcagaagaagaaaggggaaagagaaagagagagagttaagtgggttttagagtacaatggtcttctgagaatacttttagctagaagaaataagaaaaaagcgttctcggttactgaatgtttttattaatgcaactgcagagatcggtggaagacttttaacttgttctcacttgtagtttcctattgtttccaagtgtgtttatgctttaaaatgcatctgtgtagcctttactaacatataaaatgatcatctttcttgtcttctatttcatttttggtctattcaatataatatcattcttaagtactataatatgatagaagttcatttatttggcacacataagtaggagaaaaaacaaattccaaaactcttggtttgttaatttcacattaatcaaatgttgcatgttgatgttgttatgctaaatgggtgaaacaaatgaaagtggtcatatctttgagtcttttggtactttaaattctttatttgtcttttatcatttaggtgacgttttgttgtattttccaacggtaagattctatgagaagtcgcttttgttctctccttaataaccatccgtgactcttctttgaccattttcagccaaaacagaacataccaaaacggatttatgcggtttgtccaaaaaaatcatccctcccagcattatgtaccaaataaaaaccaagattaaacctattcttagcaatctacgatcatgagaataagatttgctttattctagaaatactacatgagatgaggaaaaaagctacaaagcaataattattaccacatcaaaagaagtaggtccaacatatactttttaaccttttaattaacacgagtcatgactcattatacttgctttacatcatttctcttgtatttaaccgttgaagacccttttctagcaagaaaataatggattctattatcaccatcatcttttgccttggtttcaactcatactaacactataaaccatctcattttatggtttccaagtgtgtttatgctttataatgaatttgtgtagcctttagtaacgtaaagaaaaatgtgttagaaacgtgaatgattatccatctttgaataagtcttgctcaccaaaacactagctcaccaaatttctcccttatatatatagttatttgttttattgtaaataacgagaaaataagaataacaaaaatctatttcgctcttcatttctcttacggctctttccttcatattcacatcaaatataatattattatttattttagcgttatattttataacaaaaagatcattgttcttgtcttttatttcatttttggcccattcaatatttaatatggaccgaagacacaaaactaccacggtttaaccaaataaagcatgcaatattgcaatagcctcaaacgcaggcttaagcccaataacaagttggaatgtgtacgatctgtcacacataaaaaacaacgtcccgtttctatattcataaaaactacacctcgttagtttgttttaaagaaacgtcaagtagttttattcgcttagccacgtcggacgttgacgatagccgatagggttcaacgacgatttgcctctgatgataatttcgaacttcgagtgaattgcagaaaaaaatcagtagagctttagtaaggatacaaaaatggcggtgacgatttcgacgaatgctttcgtaaatgcatcgcttttagatgaaagtcggaattctttctggagaccattgtttcatcagccatactataattgccgacgagtcgttcgtcttaattcgaggaaattgaattcaaaggtaatgttttgcttgaatttgaacacgaaggaggttggtttgcaaaaacccggtgataaaggttttgaattcaaacccagttttgatcagtacctgcaaatcatggaatcggttaaaacagcaaggaagaagaagaaattcgacagattgaaagttgaggaagatgatggtggaggtgggaatggtgatagtgtttatgaagtgaaagatatgaagattaagagtggtgagctaaaagatgaaactttcaggaagagatactcaaggcaggagattgtaagtgataaacgtaatgagagagttttcaagaggaatggagaaattgaaaatcatagagtggctacagatttgaaatggagtaagagtggtgaatcttcagtggctctgaaattgagtaagagtggtgaatcttcagtgactgtgcctgaagatgagagtttcaggaaaaggtactctaagcaggagtatcaccgttcctctgatacatcgagagggattgaaagaggttcgagaggtgatgaattggatcttgttgttgaagaaaggagagttcagagaatagccaaagatgcaagatggagtaaaagtcgtgaatcttcagtggctgtgaaatggagtaatagtggtgaatcttcagtgactatgcctaaagatgagagctttaggagaagatactctaagcaggagcatcaccgttcctctgatacatccagagggattgcaagaggttcaaaaggtgatgaattggagcttgttgttgaagaaaggagagttcagagaatagccaaagatgtaagatggagtaagagtgatgaatctttagtgcctgtgtcagaagatgagagtttcaggagagggaatccgaagcaggagatggtgaggtatcagcgtgtctctgatacatcgagagggattgagagaggttccaaaggagatggattggatcttcttgctgaagaaaggcggattgagagattagccaatgagaggcatgagataagaagtagcaaattgagtggaaccaggagaattggtgctaagagaaatgatgatgatgatgatagcttgtttgccatggaaactcctgcctttaggttttctgatgagtccagtgacatagtggacaagccagctacttcacgagtcgaaatggaagacagaatcgagaagttagcaaaagtgtatgtgtttatgctattaactagatttggttcatgttcttagattacatagaagacaaatattaggaggtaaatcatgaattttgatttggttatgtgctaatgcagatgaaattagggagtgagattaatacatttcttatgcaattattatcatactcagctgaatttatgttaaggaagtttatttcactaggttgaatggtgcagacatcaatatgcctgagtggcagttttccaaggcgatcaggagtgcaaaaatcagatatacggattacacagtaatgagactgatccactttctagggaaactaggaaactggagacgagttcttcaagtcattgagtggcttcaaaggcaagaccgttacaaatctaacaagataaggtaaatattttactgactactctaaaagtgagctatggatatattgcattgggagccaggttgatttcacttacagaagtccagaatctctttttttaaacgtaatgctgacaaaaatattaccattttggatccagaatcatctatacaactgcactaaatgttcttggtaaatcaaggaggcctgtggaagctctcaatgtattccacgctatgctggtaaaacccttgtgccatgcttgtatatgttcttgttgctttgatataaattataaaattaagttaatctttttgttttcttcgccagttacaaatttcatcatatccggatatggtagcataccgttcaattgcagtcacacttggacaagctgggcatatcaaggaactcttctatgtgattgacacaatgaggtctccacctaaaaagaagttcaagccaacaacacttgaaaaatgggatccccggcttgaaccagatgttgttgtttacaatgcggtcagtagtttataattatctcattcttatgaatatatatagcttacacttattctcggatacttatgtatagtcactcgcctgatgccaatgctggacatctaaccacaggtgctcaacgcatgtgttcaacgaaagcaatgggaaggagcattctgggtattgcaacagttgaagcaacgagggcaaaaaccttctcctgtaacctatggcctcatcatggaggtgaaatatctcttcttatcataacaattattatttcatttcaacgctattgatgagtagtgagtctgtatttgtgtctaagcaggtaatgttagcatgtgagaagtacaatttagttcatgaattcttcaggaagatgcagaaatcttctatccctaatgctctagcatatagaggtattttgtgaactctttattcttttcctttagattattagtatttgaattccccactgaagagtaaaccatttgtacctgtgaatcagttcttgttaatactctatggaaagaaggtaaaagcgacgaggccgtacatacggttgaggatatggaaagccgtggtattgttggatcagctgctctttactacgaccttgctcgctgtctatgtagcgcaggaaggtgtaatgaagggctcaatatggtaaattttgtaaatcctgtagtccttaagcttatcgagaatttgatttacaaagctgatcttgttcataccatccaatttcagcttaagaagatatgtagagttgcaaataaacctctcgtggtgacttacactggcctgatccaagcatgcgtcgactcgggaaacatcaagaatgcagcttacatcttcgatcagatgaagaaggtctgcagccctaacctagtcacttgcaacataatgctaaaagcttatctacaaggcggattgtttgaagaagcaagggaacttttccagaagatgtcagaagacggaaatcatataaaaaacagctcggatttcgaatcaagagtattgccagacacgtacacgttcaacacgatgctagacacgtgtgctgaacaagaaaagtgggatgattttggttatgcgtatcgggagatgttgcgtcatggataccatttcaatgcgaaacgccatctcagaatggtacttgaagctagcagagcaggaaaggtattaaaaaaaaaaaaatgagacaaattgaaacatttttgattggaaatgttatgttatcatctggtctgaacaatctcttgcgtttgtgtgtgtgtgtgtgtgtgtgtgacaggaggaggtgatggaagcgacatgggaacacatgagacgaagtaatagaattccgccatcgcctctaatcaaagaaagattcttcaggaaactcgagaaaggcgatcatatttcggctatatcatctcttgctgatcttaatggaaaaattgaggagactgagttacgagcattttcaacttccgcatggtccagagtcttgtcccgatttgagcaagattcagttttgaggttaatggacgatgtgaacagacgcctaggttcgagaagtgagtcttcggattcggttttggggaatctattgagttcttgtaaagattatctgaagaccagaacacataacttgtaagttagctatttgccaatctaatgttataagaatgaatatatatataaatggtatcgatcaaatatgagaatgtcagttattttgatgatctaataagtatggatagatgcatggtgcttgcaagcaaacccataatatggatattgtaatggagagagcaaagattgctactagaattcaaaaataattgtgtaattttggaatgtgaaggggctaaagtacgtattattctcaagccacctaaaaagactaattagacaaaagagacgtgaagaagtagaaaaattgcatgttggaagaacgatacaagagagtcaacgtgcatggagtcgttggtcgctttgcttcataacaatgcaattgcaaacttgtctaatgtagtgaagtcaaacacacataaacctattactttcttttagatatatctgattttaataatactttaaaaaaacaccagaaaaataatttggatatatctattagaccattcaatacttttcttctgtttgaataatcattacatgcagctattaacaatgtgtcaatgcatgtgtgtgatgattcgataatattcggagtactgattataactaatcctaatggatagtagaataattaaaagtttgtgtgactaaagagtgtaataaaacaaaagcgataccaaacaatatgaatgtgagtaattgagcatgttagaacaggtgagtaaaatatcaatcatcagcactaagcaacaaatactaaaaccttcttttttttaaatgatactatatgaatgtatttaatattctttaaccaattatatttaatcatctatttttttattggttgaattggttataataaattatgtttttatataaaagaggtagattaaatgagatttttatgatttcttaatttgtgtgtaaaaaccttaaattacaactaatataaaacagagggagtatgatttttaattattgaatggacaataattattgattattcttctatccacaaagtgataacaagaatttcattcaaatgtaattgctaatagtaattaagaatctttcaaagaatgaggatcacagaaacaattccagatgtttttctatataaaaaaactaacgattgcgccaactatagccgatcgaaaccaaaacatgaagaaatacactgaccatttggaacaatgagacttaatactcatgaaaatggtaacatttttgaataaaatcgtaaagattaccaactatagtcttaagccttgtattagtgaaccgtaccgatagtttttaccgcctaataattcgtaatttttgggatttctgcgtttatatttcggggtatatgaagaaaagagatagtgagattctgaattcaaaattgtgaccgacaataaaaggatggagtggagtggagacatcgcatttacaagagttttacgtaggggaggccaactcgcacgcaacgtacgatgtcgtttaagattttttaagacaccaatacacgtacgtggcgatatctcatggatttatgccatgtttatgtgaaccccacctgacattcacattacagtttttcattatgcatatttttttgtttttatatcctactattttaaattctaaacaatcaataaaagggttaattaaattgtaaaattatctaccaatagtctaatactgtctttgtatcaccactaaaatttaaagatgcgtaatgcatattcgtatattctttctctttattcactcccattttatttttcgtttagatttactcacctccattgtaagttactaagtttggcatataaaaaaatggcatcaattcttctaacctgctttgttttgctatttataaccaaaaatgggtcactattacacatctcagtctcactgactcactcccaaaagccaaattaacaaactttttgtttaactacaaattgattaaaacaagttctaaaagtagtttatctaatttaaattggactttttaaatacaaattattctttaatctgctcaatagataaatatactaaagcaaagtatgttatatttaataacatacatcaaacaccgaatagtttttttttgttctggctgatgatgaaagattcaaaatgattctacaaaaaattaacaaaaataataagaaataggttttaacccgcggtataccgcggagataatttattttttaaagttaatatatataaaagtttgcaaattgtatttatattttataatttacaattgttattaagtaatgtcctgccaaatccgtcccgtaaaaaaactcatttattttattaatgttgatcttatttataatatgtttatgaaccattgtctaaatattttttaattttgtagtaattaaatgctatcaaatatctctgtggtttgatgattataatcgaattgttatactaatgcagaaaagcaatatcaaaaatgataattttgtagtaattaaataatattaaatattttggaacttttattttagtaactaaacgtgtagttaacatggaaagattttacgaagattgttaaatgtcaaatatttaattcgaagattttctttctaattatcaaaaacaaacattaattcagtggcagccattgtaaataagtctcaactacaagatttattttacaaaatagctccaaaaatgtatatgtagattggttatatagaaacaaattacttgatagaatacatataaatgtttttaaaataaaatttaattaagtaaataaataaagactataaacagaaacatagaggatatatcaaaattgtgttaaaaaaaaaaagagagaatatatcaaaataaaaatgtttttgattttgccattactatcattttgtgatcgcaaaaccacttaaatgaaactctggccgacatgtcagcacgacggagttggtctcctcctccaccaggcacatttatcgtagccataacaaatgcggcaattctattggctaatcatgcttttcccctcccccctataaagctcttccctagaaaataacctcaattacttaatagcctaccattgttattttcaatagtacaatgctcctaaactaaaaaaattagtatgttatctcccacaaaacctagttacatctggtcatcgaatttttcatagaatacaattatggactgaagaaaagatgaattccataaataaaatttgagaagtttatacagctataaatggagaatctaccctcctcagttctctagtagttcaacttgctttcgatattaaaaatctttgaacgagatggtttgataaagctcgatttcataattttcaaacccgtagttcaacacatgggaatttccaaagtccaaaacccatcacttgctactttcaccaactcatgattatgttttacatcattaacagtttcaatatgtttactttgttcattttttacagtttaaccattcattcatttagatatctttcttagcagcataaatcaaaacgccacaatcacttatgaatcaaaacacgttttattaataaaaacatcataactcaaccatgccacatagtcaacaaggaatatgaagaacggtcaacataactctaagaacattcctcacaacaaacacacatcaaaatcaactatgaatttgaaatcaagataaaaaaaaaaaagaaacatcgtaacataatctatgaccacttggaactattagattttggtcccgaatattaatatcaaacataacaaataactatttatttctaattagtcaggtttcactagaacaccggtatcaattaaaaaaaaaacaatatgcacaatatttttcttatacaatatggaaattgaaatgttaatagaaaattaaagtttaattaataatcttgattagtactatataatataaattaatctgcagactgcaccatcattcttgctacatgtcatgttcatatcaaaagcaaagcaaaaaagctgacaaaaaagtcaaatatattttttactaagaaaattcctcatttctttattgttttgttttcttataaaccgaggaatttccgccatctctctttctctctttcatcgtcctcaccggaacgcgcctactctctttccacatcgtacgtttcctctctctaaattcttcaactttaaaggtgataaaaattgaatctttcccacaacccacaagaaaattcgaatcctttctctctttctatctcttagtcacgctttcgatcagcaatctcctcgaattctggttggttccgtctctgttttctgtacacaaagccctgctgctgttgatacacgtgagccgccattaatgcccctttgttttcttcttccaggtacgttttcttcaaaagggcctttttttttttttttttttttttttggcgttttctttcttcttccgtttctgcttcttctgagaattcttcttcacattacctttgtcttctaggattttctatttcctctaaaatcaggatctttcagctgaatttcactttgattttatttaggttagtcttcattttcattttagatatttatgtttctttttctgagttttttgcattgtcatttgtcatgggaccgacattgctccgacaagcgtttcccaatctggggttgatttttatatgtttccaagtgttttaattcaaataaggtttccggcaaattttgaaacttttcatcttcaaattgctgcttttgggaaaaagtttcagcatttggttcttgtcaattcttatcaatgctatcttaactcttctttgtgcatttctgtttgagttctgtggctaaggttgtttttggagataatttaatctcgagaaatttctcagttttgtttttgggattttgtagaatattaagtcaaagtttgctcttttgcagctgatttaggaagttggtgatcaaattacatctagtgtttgtttccgccagctgaagtgaatcaaaatgtttagttttggccgagcaagaagccaagggaggcaaaacagatctatgtctcttggaggttagaaatctctagattcttgtaattgatttcactgaggaaatggtttatctaggatgattgtgttgaaattttcagtttgctctcttaaaacttgaaagttttgagtgttttttgagactttagtttggaatttaagattggttgatgaggtagttgaagtttttgtggtttggagcttcaaagagtgaagcttttgtggttttttttccatttggatgcaaatgttaacagatcttagtgattttgggaatgtaggactggattatgcagaccccaagaagaaaaacaattacttgggaaagattcttttgacagcttctcttacagccttgtgcattttcatgctcaagcaatctccaacattcaatactcctagcgtggtataacttcttactgtcctttgctcgagttactggtgaaacattgctcaagtttcttaattgtttcttcatttttgttcttctgtgtttattttttgcagttttctcgacatgagccaggggttacacatgttttggtcactggtggtgctgggtatattggttcacatgcagctctaaggcttctaaaggaatcatatcgagtaaccattgtggtatcttctttggcttacatggatttaggttattttgttcaacattattgtaaatgtcgatatcacaaagtaaatctctttctgtttaataggacaatctatcacggggcaatctcgctgcagtcaggattttgcaagaactatttccggaacctggaaggcttcaatttatttatgctgatcttggagatgccaaagctgtcaacaagatattcacagagaatgcctttgacgctgtgatgcatttcgctgctgttgcatatgttggggaaagcacacaattccctcttaagtgagtatattgagctatgttccctgtgatctttcctattgtgtagatgtaaaataagtaacattgtgttgtgtcaattgtaggtattatcacaatattacatcgaacactttggtagtattagagacaatggctgctcatggagtaaagactttgatatattcaagcacttgtgcaacgtatggggagcctgatattatgccaattacagaggaaactcctcaggtgaatttttgatttgtaaactgtttagtatccacagtttttcttttatgcgctctaaccccagaacgtggtcctttcaggtgccaatcaacccatatggtaaggccaagaagatggcagaagatatcattttggatttctcgaaaaactcagatatggcagttatgatcctaaggtttgttttagtgatcctccactaagttctatcttgtggttcaatgcatttttttcacttcccatgaaattgacaaggttctctttctaccagatatttcaatgtgattgggtccgatccagagggcagattgggtgaagccccaagacctgagctgcgagagcatggacgcatctccggtgcttgttttgatgcagcacgtggcatcatgcctggcctacaggtaatcactttcttcagttcatgaactttttctgaagtccaattagttttttttcaggttttttctcaagcttcactttcagttttggtcagggtcttgagtattattccttggacaagtcatcacagattggcactattagattcttaatccttttccttcaagttctgtcttttgtttttgttcataacttcgggctggcacatgctgtagaacatgcttgtaaaaaagctgataagtagttatagtttacagctgagcaaaatacataattgagacaactaattcttgagtttcctttattaaagcagtgtttaaattagtctacttgttacatgcacatggctataagctttcaagcttctctaatcattgatcttcatttaacttttctttttccccagatcaaaggaacagactacaaaaccgctgatggaacttgcgtacgggattacattgatgtcactgatttggttgatgctcatgttaaagctcttcaaaaggcaaaaccacgcaaagttggaatctacaatgttggcaccgggaaaggtattgttgactcttggcctacattagtactgtactgaagaaaaactcttgctgtttagcaaatggattttaaagactgtttttgttgtgtatgggtggagtaggtagctcggtgaaagagtttgttgaggcgtgcaagaaagcaactggtgttgagatcaagatcgactatttgcctagacgtgcaggtgattacgctgaggtttacagtgatccaagcaagattaggaaggaacttaactggacagctaagcacactaatctcaaagagagtcttgagactgcatggagatggcagaagctgcaccgtaatggctatggcttaacaacctcatcggtctcggtttactgactttgttcattcctttggtgatggacggagattttgattccagatggtattgaggagagaagcgtaggagatgatgatggtttatatataaatataacacaagatatattatccatattatgaaaaaatgatatcacatgacgagatttttgattgatattcattttgtaatggctttaggttcttttaggaagcagccattcattagtatatgtacctctcacaatatttattgattagtcttaataatatatagcattcctggcttttaatttgtaaagcggaatttagatctaagctccgtgttgcatacattagcgaatgtttcgttttcaaaagtctgccttttgtctcatcagttatggagattctggatttcaaggaacaagatctgtagttctgttggattcgaaactcaatgaaaacaaaagcttcagtgagaaatcaaagtaaaatgcaacatatccaatggaaaaaactgtttatctatgataatttcaagatagggtcggtaataatatgatgttcttctggtagatcataaggcaaattgattccatggactttgaggtacttcaggcgaaagattgaagtgctctctcgaagttatcttcagctgatgctgctcgcttcacaaggacgtgttctggatgtgaaagtttcagctggctgcaaaaggattggaaatggaggaataagtcagcttactgatgcacttgttgttatgcagaaaatgcaaaaggtcatgaatatttatactttaggtagcgagaagatgatttcccgacgtgaagactgcatacaacgaggtttgcaagagtttctgggtctttagcatcctgcaatgagaataaacatctatgatttcaaacttgtccattttataataaacggaatagttgaaaagtttagatttggtgtaaggagttttcaagtatcctcatagatttaaatcgagtgagcatttccgatgacatgatattgagaatgggttgtgtcgatacagatttaaggaaagaaagagtaggttcatcactcaccttgttgagtgcttcaagtagtagagtctcagcttcttcaaaattacccatatgcatgcagcaaactgctttgccgttcaagatcaagcttgtcattgggtacttctcagagaaatcctggaagattagataagcttcctgtatcttggaaccaccctgagatcataaagaacaatttcatattaagaaacacattaacaaacttctctacactatatggaaaaaagaaatggatattcatatcatactactgccagattcaaccacgcgctcgcgagctgagtgagtgtgtggtcttcatcaatctgttgcatcactctcagttgtttctccgcaaaatctgatctgtgcatctttatgaatatctggacattcaaagcatgcctaaaatatgcagaaacaacaatcatttatcgagtaaacgaaaagagatcgctgtgacaagacaaaacaaatcgaaaagctcacagatccatggttcctccagaatgagtgtgcttcagagcctcattatagtcttcctcatgcatgaatatagtaccagcaatcaacctgataatagcattgtttcctacagttggatctgccaaccattccctcaagctcgaaatggttgattcctaaccaaaatcacagaaacaactacgtattcaacaatgcagatcactaaaataagatcaagatatattcaattccggatctctgaagctaaatcatcaaaagaatcctagaattctactaaagttatctgaaattccgctaagcaaacgttacagaagatgaattgaaacatctcaaaatctcttgaattaccttgttttcaggactcgatagatacatagcaaggagtttcactgcctgtagaggagtagcagcggcttcatcgatctcactgatgacaagctacgaagacgaaatttgaaaaacgtaaatcagcaaatgatcaaaacaaattgaaatccaaatcgaaaaacacgagacggaagcaaaacctggtaacttccgagagcgatgtaagcgcgatggacgagacagtctcgctcgacgatatcttcctgcgaaagattagggatctcgctgttgttgatcgcagcttgataagcacccaagtagaaatggtttctcaaattgaagagatgatctggtcctgccatggatgccattgtcttagcttcttcttcttcttcttcttctagatctcacagatccgtgtctaactccaaaataaagaaaactgaagtgtgaataatcaaaaccaaaaaaatatgacgccttaagatgtacataaagccccatacattttgaatgttacaattgacactcattgttatctattttaggcccaatgggcttttcgatgacccaattagttcgacactctgcttctctttacacgtctcctacatacggacggtgacaatcttgtcttaccaataaaacgcgtttttatccaattcgcgcgggagttgttctaatgacgttagcaaaccactccgttcaatcgtgctgtcacgttatgtcgacaaacaaatccaacaatttactgacacgtgtcatttagcttccccaataaatgacccgggaatagttaaaagccggtttaccagtattggttttaatcagccaccgagtcatcgtgactgtaacttaaacggcgtttactgcttcaagataaaatacgctttgcccaaaaaacgttattagttcgtaatccgtttttgctctcccttttgagatcttttaattaaaaaaattccgttttaagtgaatgcgtgtaagcaacagttcgaattcgaagcgagagctaaaatcaaaatctctctgatttgttgttttgttgatgtaagtttctttgatcctttcgcgaaatttgtcatcttccccgatcgagttttactttttctttgtgaatagtttgacttttcgtttttcttcttcttcaatctcgcatggtgtttgtgcgtatcttgtttggaattggagtttgtaactatttgattataagcaagttttgattcgaatgcatgcgtgcaatccacaatccagaactagatgtatatgtatctctatgtcaagagtgattaaaatcgattcgtgtggaattaacttggaagtgaaagttttaatattgtttccggaatttacggtgagattttaggtgttgaccagcgttgttagacaagaatttgtcatcaatttgatttagttttgaagcatttgggttttggaattttgttttgattttctgcaggttttatgaagtgatttgcattagattggattgaaatggctacggagcctacaaggagctggttccagatacggcagcagaaaccggataaatcaagccctactaaaaagggacaagagggaaatgtgaagaatcttgggagacctcctatgaatgatgcaccatctaatgctactaaacagaaagttgctgcagcgaagcaatatatcgagaatcattataaaattcagaagaagagtctccaggaaagaaaagagcggtacgttctcgggattcttcttgtgatgccaatatttacttcttgtgctttagttgttacaaatggaacttcagagtagtcttattttctagtactgatggttgggtctgatttaggaattaatctgctactggtttagattgaaccttctgatatcagctcgctcttgaatacagtcggagcatcttggaacaaaacctagctgatgctgatgttactgttgaagacaagatggatatattaaagaactttgagaaaaaggaaatggagtatatgcgtctacaaagacagaaaatgggggttgatgactttgaactgcttagcatcattggccggggtgctttcggtgaggtatatctctttatgtgttctttgtggttgcctctcttatttttcacttcctttttgtaagcttagctaatatcttgtctcatctttacatataaaatttgatgttgcttcttttttagctctcttactggctaccgaagtactgataactagctattattctttttctatgaaccaaagcttctgttagtgattttacttggtgtattgatttaatattatttcatttctgtccaggtgagaatttgtaaagaaaaatctactggaagcgtatatgcaatgaaaaagttaaagaaatccgagatgcttcgacgagggcaggtaatgcactatctgatagcatctctccaaatcaaagagtttagttgtgattaaattggtaattcattaacatctgcgtaaatacgctaatcctctctttatgcggtaaatatcaggtggaacatgttaaagctgaaagaaatgtgcttgcagaagtggatagccctttcattgtcaagctttgttactctttccaagatgatgagcatttgtatcttattatggaatacctccctggaggtgatatgatgacactgctgatgcgaaaggataccttacgggaagatgagactcggttttatgttgcgcagacaattctggctattgagtctatccataagcataattacgtccacaggtttgaacaactggcatttgaagcttttcatattgttcttttttccatttttgcatcttacttgacatttactatcactagaatcatatcaagcttccggatttcctacagtgcttgtaaattagctttcagttgatacgtggtgataatttaactctagtttcttcctttgcttttgtagggatataaagcctgataatttattgattactcgaaacggccatatcaagctttcagattttggattgagcaagtctctggaaagcaaaaattttccagattttaaggcggagcttgttgacaggagtacaaagcctgcagcagaacatgatagactctccaagcctccttctgcacctaggagaactcagcaggaacagcttttacattggcaacaaaacagaaggaccctggtatgtactagattcacttatctctatcttctggtggatgctgttctgttccacctgaagttcatctgaaatattccataaagaacgattcttttccaacttagaatgaagtgaatgtgcatattcttctgttacttggagaaggatataacccctttatttttttatgaatgtttgcattaatctcctttggaagtttcctattttagttatttatatgacctttccatataatcggagcgtaataagatggctctttcgtgtatcgatcaggctttttctacagtaggaactcccgattacattgcccctgaggtgctgctgaagaaagggtatggaatggagtgtgattggttagtgaaccagacccctctcttttacactctacaattaatttattcagttgaaattctaaaaactgttctacaataggtggtctcttggagcaatcatgttcgagatgcttgtagggtttccgccattctattccgaagaacctttggcaacatgtagaaaggtatgcatatattggcttaaatatcctgctagtacattattgcgcagtttggtataagattattcacgagtcctgatgatttacctcaaaattagcctatcatttaattggactagagtaaattgttttgagtcatattttggtatggcatgatccaagtccaatccctactacgtgtgactagtattatatttatcaaacaattgctcagtttatctctgcagattgtaaactggaaaacctgcttgaagttccctgatgaagctaagctctccatcgaggtaaaagatcttatccgaagactgctctgcaatgtcgaacagaggcttgggaccaaaggagttcacgaaatcaaagtacttaaaacatctttctctttcctttcaaattctaaaatggtttttgcatattagatgtctgatttgtttcccattaaaaggcacacccttggtttaggggagtcgaatgggaacggctatatgagtcaaatgctccatatataccacaagtgaagcatgagcttgatacccaaaactttgaaaagtttgatgaggtttgttcaataccatcaacttctttcttctaataattctcaacctttttttccgctgttctgtctttgcgatatatcgattaatattttgatttacaggtaccatctacttgccaaacttcttcaaagtctagcccttggagaaaggtatatatatacatttccttcgtttctttgcagtacattaaaccaagttccaccattcatactaagtaatttgcagatgatctcatccaaagatgcaaatttccttggttatacattcaagaatctggagatagttgatgaacaccatatccctggcatgggtcagtaacctttttatcacatgaacaaattttgacagagttagttatactatgtggttattaaatggctcattatctttcgttttttatgcagcggaactgaagcggaagagtaagacagcaaataaaccatctctcaaaacactcttcggtaaaaaatgacttgagttttttttaaaccaaactttggttcttaacttttattgaagattcaattctttcttgcagaaacaccatatcctccttctgagaatcaagccttaaaggatttgcttgattcacctatttactctgaaggctctagagggtcttccggatcaccattttcacgaccgaatcaatcacaggcccggagatgatcaaaagggaaaatctaaaagtgattaagaacaaacaaagtaaaagtaaaaaaaaaggtagtcattgttcttcagttgcaaattttcatcttttcatacatatatactctgtaatgtaaaaaaaaaaacagtgaacatccgaaagagaatcaaaaccaaaatgcatataggaaactttataggtatacaaacatattccaatgtttctgtgatccccaattatctaaccttgtaagctcttttatttttatttttgcttataaatatttacatacataaacattttgtacataatggctttggaattggacttgccttgattggtaacaacatgttgagtttaaatcgaataatccagctgagattggagctttgatgaacatgttttctcgaattttttagaaaacatccaaaactagtcaaatcgtttcttttccattgaactgttgcctcaccttttctcgaattgtcaatccgaataaaacactttattcatgatttgttttaataaaacaatagaacaaaaaaaacaaaagagagtgaaagtaatagactaatagttatgtaatggaacgtactgacacaaccaaggaagaatcaaagctatcttacaaaacaaaaaagacagatcaagaagaagaactcatgttcttaatttccacactgcaattactttgtttttctctttcaccgtttagtctttttgacaatcctggagatctgttcttttctttatgaattttaccaatcattatggatccaatactctttgcctttttgttttgttctatatacatattttctttctttgacttttgtgtttctgctagacgagggatactacgacatttaaagccatttcgattacttgcaaagtcatagtacgctagctagaccattaaattcatataattctttgtcaatccatttctattagaataaaaacaatagaaagaaaatcatatacagtatatatatacctagagagttttctctctttaagtatatttaacgcaagtttgtaattaatgcgaaaaaaaattgtacagtgtctctcaaattttagcttcaaactttttagattttataactatttctagtggctattgcacattagaaatcgattactctacttgtttttgttttgcattattttttagtcggatgtccctaagggaccgctttagatatacacaattgctagagaattgatgatctcttctatgctatatcaactttgttatatcatagtattattgttatgttattatttaatttcgattgtttcctaattttcttaaccttttaaaatgacatattttaaggcctcgcgaactgatatttttaaataacatgcctataataaaaattaataggtttatagtaaaccaacaaaattgaaataaaagttaagatttcatgaggtaagagtgtgactagggtttttagtaatgaacttgtggagtacttaaaggggccatggatagattgcacgtaaagtcaatatttatacaaacgtgtttaacgaaggttacatgctacgacgcccaataactcattacttaaacatcgttatcaccctcaaggtaagtgattataaccatataatattagaaaacttgtgtacaggcataatattatgtgtaccccggcccttttcgaatgtatatctcttgtgaaccagctccattggctttaactgcgtgatattttattgtgctatatttatgatgtgtttgtttttaaactatcatgtatttgtttctaactcgcatgagaattgccaatctattggacgaacctagagaccatttttcgactcaaatttatatattattttatctgtgtgcagatagagatttgtaaggatcattgtattttaaaacgattgatgggagttgtaattatgaacgtgggtataagtgttcatcatgaagtcgaccgaatattagttcacatatatcttagtaatttcttatgttatccccatagatatatttgtatagatatgattcctctatatggttaattaatataccttctaggctagcttctagccatttacttgttcttctgcgaagttgttaaatatactctttaaatatatcatcccacatattgttgtgaatatcttgggttggcgtattatcatctaataaaggtgtttagttatatttgacacaaaagataataatatgggaatccaatgaaaaagaaaagaatttgcattatataccatattaattttttctatatgatcaaaattgaatacagatgaattgcactgttatttttcaataaaacatttttcttagcatattgacaaatatatttcaactattcaataaacaaaataaaaaacaaatagtcataaatggctgattctgattagttaacgaataaacgtattccgagaattgcagctgattttttattaacactaggtaatcattcgcgttacgctgcgatattttcagattttttgtattgtttaatttaaatataatttttaattatctaatcattcactcatgtaataagtaattattcttagtattaaaatatattttctaacaacattctcaacaacgcattatacacaaagttcctaaacaatgttcgtcttaaaccaattaaacagagagtaatgttgggattctcgaaacctaaaaatttgatgattaaacttcttacatacttttcaccctcggcgatttattatatagatatatagcaatatgcaaactattcaaactattaactaatgcatgactattatacactcataattagagttaagattacgaaaaaaaatcttcaagaaaactaataaaataattttattaaaaacatgtaataacaaaataaatttagtattaatacaattaaatatgtaaaattaaataataaatatatgattaatctataaattaaaaattaaagagcttacattaattattcagtggatacatgacaaatgctaaaatgatgatatcatatgaaaaaaattggccaactttcatatatatgattgtcgttatcattcatcacttctcttttcgctactcgtatataatacgtaaatatgtgtgtacatatatgatgttatatgattctcttctcacatgaataatcaaattcgctgtggagtgatcttgtcatgaaaccatgtcaagacaagaaatcgtaatctaattaaaatggatcaataatgagaggtcgaattccgttaaataaattaaagattagtaaaacttgacatggtatatatccaaaaacagtgtggtgtaatggtattgttctcttacaataatatgaatctcgtttattcttcttgcgggcagaaaaaaaaagtattaatttataaaatacttctattctaacgaattatttgcgccgagtaatcaagaaaccaatattatattagaacttcacaaactcaagtaaactcaaaaagataatctaaactaaaaagtacaaagacttggccatcgattggattatctataggattaataaatagagtatctcacttactttaacttatatttccatccatactttaatattaatatccgttgatattatacttactactgaaatctctctctctctctcatatcaacatgtagaaggggaagaagatgttcttctcatcacgaaaagtcagcgtctctctcttcatcatcaacctttcttcttcttcttctcaatcttttctcaagaaaatcacaaatttcccaagaaaacactcacatatatgatgctatatatagaaagatagtctcatctaattctctctctccctcggattcgttagatgtgatcattttttcttgatttttgatcagattcttgcgtatagctgtatatatacaccaagatacactcatcatcgtcatatatagattatgtgcagcgtctctgagcttcttgacatggaaaacttccaaggagacttaaccgacgtcgtacgaggaatcggaggccacgtgttatcaccggagactcctccctcgaacatctggcctcttcctctgtcacatccaacaccatcaccgtcagatcttaacataaaccccttcggagatccctttgtgagcatggacgatccactcctccaagaactaaactccatcacaaactccggctatttctccaccgtaggagataacaacaacaacattcacaacaacaatggtttcttggttccaaaggtatttgaggaggatcatataaagagtcaatgtagtatcttcccaagaatccggatctcgcatagtaacatcatccacgattcttctccgtgtaattctccggccatgtcggctcacgttgtcgcagccgcagcagccgcctcgccgagaggcatcatcaacgtagacacaaacagtcctagaaactgtctattggttgatggtaccacgttctcctcgcagattcagatatcttcccctcggaatctaggccttaaaagaaggtacaaaatttagtttatcaacttttctcgatcttggatcaaatgattcattaattgttagctttacacacgatatattgaattaatcaaagatggttttgtgttatgatatgtataaaataattgggatccaatttacattatttttatgataccatatagagtagagtgaattagggttctataggccacttggtagctaggtttataggaatctatcaatcgctattaacattcggaaaaagtcggatgcatgcattgctaataatagaatgaattatatatggtttgtttgtttgtgtgacacttccctttattgagttttatagggggttttattttatttttgtttgtcttttatcaggatcaatatcataatcatgaatttgtgtgtatatagacactatatatataattatttagattcataagaagaaggagggttgaggttgaagacacatgcaggagaatctatgaactgtcacaattaaaagaacatataactgcgttacatcatatcttaaacccaactgataataatgtcccactagtccactaccaaacttagctttcataacttaatgtacacacgtgtcttgtatatagatcaaaaaccacacgtttgtaagtatgtatgtacttggatgcaggaagagtcaggcaaagaaggtggtgtgtattccggccccggctgcaatgaacagccgatcaagcggagaagtggttccatcggatctatgggcttggcgtaaatacggtcaaaaacctatcaaaggctctccttttccaaggtattacattaactcatcataccataatactcatatgattcgaaactaaactttctttcaccaccacatttttcatggctcaagtttttatattcgtatgttgttacaactctcctctcaaattgtgacattttgttggtctatacaatatactcacccatgaaaataacatttgtttacatatacaaattatgataagttactattacagttcagtcattacgttaactctaaagtaatgaatgacaaaaggaaagaaaaaatttgcaatgatgtcgttttaattaacttcattttgtaattttatccttcattttctcatattttgatgataatcttgatgaatattagtgattcataatggttttttattatatatttggctaatctctatggttacttatgattgttgctttcaggggttattatagatgcagcagctcaaaaggttgttcagcaagaaagcaagtcgaaagaagccgaaccgatccaaacatgttggtgattacatatacctccgaacataaccatccttggcccatccaacgcaacgctctcgccggctccacacgctcctccacctcctcctcatctaaccctaatccttccaaaccctcaaccgcaaacgtaaactcctcatccattggctcccaaaacaccatctacttgccttcctccaccactcctcctcctaccctctcatcctccgccatcaaagatgaacgaggggacgatatggagttggaaaacgtagatgatgatgatgataaccagattgctccatacagaccggagcttcatgatcatcagcaccaaccagatgatttctttgcagatcttgaagagctagaaggagattctctaagcatgttgctttctcatggctgtggcggcgacgggaaggataaaacgaccgcgtccgatgggatcagcaatttcttcgggtggtcgggagataataattataataattacgacgaccaagactcaaggtcgttatagtatagtgttaattacaggtaaacaaattatattaaattaagttgagcttgtgaaaatgaagatcatatggtctggtcaggttgggggtaatgactaatgagctggtacatgacagaccgtaaacagtatttatcgtcatttgttatacatttgttttttttcggaagatccgtctgtagttaaaaaaaaaaaaacggcattttttctatgcgttgttataatttttattttgtgaagactattagattaatgttaaaagacaaaatatacatattacgaaagtagtgtatcactctattcaatttcaaatggagagtattctttattatagaaaaaaagtcatacacagttatcaacttttgttttggattttttaaaatcattttatcaactgtaattaaagtatcaataataaaatgaaaagtaaagaataattaccggtattgtatgacggattcttgattagtatagttttcaaaaaaacattaaaaaggttatcgataatttaagacgaatttgtaacaaacatagttcgattgaattattgatgtataatattttaccgggaatccatcacaaattattgcgaaacatgttttgtaaaaagaaaatcggtaacttacacgtataaacatatatgtatgaggtgaacatattacactgttgttatcgttggttattactgacagaatggattcgtcggtatcatcatttaattggcatttttcccttcgtattaatgtggaaaagttgatcaaatgattttttaaggttgaaagcgaaaagatatataaatttacagcttgatcaaaatttagaaccatgagtgaaatttcaaccaatcttatacaaaaaattgatgacacagaaatatttcaagatgttagttgtataagttgtatctctacaaaatatttatgacttacatgcatttgttgtcttacaatcttagcgtagtaatttgactcgaaagttctttaataagtcagaaaacattaatcgactgaaataaattattatgcagttggattgttatagttaatgagttatatttgtctaagttttgctgctggaatgggagcaggagaagtgggtctaaggaatatttggtggatgggacacaaagtgaataagttcgttcatgtacagttcaatcaccaaacgcatccaataacaatactaagctatatgaagctatgtatgaaaaaaaaaaaaaaagctatatgaagctatgtatcgaataatctcaattataaaatcgaatttaaataaatcgaaattttgatatcatttataaattagtttattgtaggcaacttcttacaaatttatttttcaggtggactggactgatgacatacttcaacaacaaatttaagtgtttcaaatctaagggttttagatttaaacaaatatatttataaatggtagtacgtatttctatcggttgttgtccttgtcccaaaataaagctatcgagcaaatttagcttttattcccacacaagtttgtatccatatatttaggttctctttactacttcaaaatttgtaatgattgtttgtattctgactttatattttctggacggtgaatttgttatttttaagtagaaaatcttacatttgcttgtttataaataatcgatgggcgtaggatgaaatattcgtgtactaaaaagaaaacttttttttttatcatccgaaataaatgatctctagctacaaattatttttcttaggacatgatctttgggcctcgatcatatagacatatacaacattagcaaagtcataaagatctacaggaagatgaaaaatatttgtctttcaaaaattcttcaatgctctaatattctttcttttcgatattcataaagatgatgcagtttaagttttgagtatttgccggtagtgaattatgctcaatataatgtatggtgtaaatgttggaaagaaaaaacaatctgccgaagggtgttgaaactctccgataaataattgagatcatttggttaaatcttcttgtgaaaatttgttcacagtaatataattaaaatacctctaataattgcatgactaatctgttaaaacatttcataaaatttcagatttaacaaagtaagctagtatcttgtttaagaagttgctatgagcctattattggagttggatcggtgtgaattgttttggatctatattactataaatttatgtaaaatgtgtaagaataatttctcaatcagacagtgcatgtgggggatcttgaaaggcagggagaaaagccctagtttcacggctttcttaatgaggaatttaattttagagaatccattctaattttatattatattcccaaaaggcaaagagcttaatattcatacaaatgttgtctttaacacacacaaaaaaaaactgttgtctttaatttgtcgttttatgatgttattcatatactttgtgaaactgtcacacctctgtttgcacactatttatttttaagatatcaacggttaatagcatgtcgcagaattttgttttgttttatcgctaacactgatatattaaaatattgccgcgtttcttgtaaaaccacaattttttttaaaaaaccattaaaattacatgcataacaatttttccttacggtaatttaaaaagtaaacaaaaaacagaagctttccgaaacgtatatatcattagtatataactaatagcttattaattagaatttttatgaataatattaatatgtaactaacagattatttcatcacaatttcattgtcaaattctttttgagtttttgtataccatatatatatttatcgtatggcaaaaaaaaaaaaaaaagtacgtgagatttatattctatgacttttgtttggtaattcatatgagttatttgataggtcatgccatgaataatctcatggatctattatttctcttgtatcaattggattcaaacgttatattccctttacgttggttaaattaaactcgatatcaaggaaacgaaaagttttttaaaaatgacaagcaagctaagcaagcatcacgtttcacatacacatatttcgtttttggttttaatcattcacatatataaattataatattattttattataactgaattatatgaaatgatccatgagagtgtcagagactcagactcagagcagcctttatcaaaatgttgtcccgcgttatttacgcgatcgatccaactgatgtgtgtgtcaacttttaattccatcttttgtctttttcttttaccgtttttttctaaaccaagttgaaatccagatactaaaaaccatgaaatctaataatctattataactacgtttacgtgttaccaaaaaaataaatatatatagtcgcttacgttctaacttcgttaaaaaaataaactgcaattagttcatcatctaaaaatgctttaacttatggatgatcattaaaataaaataaaaataatattaacttgaccaaacgtaaagactacgagctttgttggatcagttgtggccaccaattttttttgtcaaccattaattattatattcagatttttgtaacaaaattgtaggctctgcatggtagacatcattagcgtaaaaatattaactttattctgttttgtgccaaaaatattaccaatcaaagtaattgggtagaaaaaatatttttgtccttttgcaggaaatatataataaactctcatttttaatggagtaaaaatatttcactactttttgcttttactctctcttgttcatttttgcctttttcctcttaattactcccaaaccaatcacagctgtagaaattcataaatagaaatagaataaagaagaaaaaaaaggtaatgagtactaacattttgatgtgggattttgagagagtgtgagaatataatggaaatagtgactttaggtcaagtcaaatcgtccatctagtctgattgatagaaagaaaacttcatcacaactctttgtttcctaaataaattgttttgatttgacgagtggggaaaacaatagtcctaacattttattgccaaattttactttttagaaattattacatttcctgaaatcttattgcatgattaatattgaagacaaaatattaatgtactgtaattttaagtacctatattctcaaaaatttgttttagtgctcacaatattcttgccttttagtattttttcgaactgattgtatgtactttttgtgaatttgttttcttcttcagtataactaaattacaacttttcttgtagttgtatgttatatagatatttgatctaactttgttaagaaacaatgaaatattataaatttatacacatatttttaatggaaatgtatttacatatttgtgttgatataattacaactgtgaaatcgactataacaatgttggtttcaaatttgataatttcttttaatttgtttccatcatatttcttaatacatatttttaggcgaaaaagaaaaaaaattaggtcggttatattatatctcttccgttattgaattgttttatgcattatatttctaacctccgtcgcttcgccgtaaacacttcctttctagcgaatttgtgttacaccaatataataaaagtccacgtaatatcaatgataaaatagacgtaagaactaatgtgataaatttagtggcaagtcccatcattaagccttttagagtagtttctttgttacctcaaatcaattaatgagaccatgcatttatgaaaacgattgtttgcaaatagttaagactaattatttcacacacaaaaagttaaatcaaagaactatgaccagtgatcatggtttacgacatggaaacaaaggatgggataagcttaacatctatcatatcattgattaaattattattattttgactaaatagtaatttggtcaacactattgtatttttttaaaacactaaccactatgattagtacgttttttggaacttatgattagttcgattattctcatgaacttatggtttaatttattcgcataaacttattgatcagtaactttaagttttcttttctatataagtgatatatatatatggataatggatatattagcccgactaattcgaaaatattaggaattttaggaattaatctctatataataaacagagttttatggtgctcaaaacaatcctaacacacttaaataaataattatctgcaacccatcaccaaagacctaacactattcaggaagatatgaattcattaggtatgattccgctttcattatgaatcatcaaaaccttacaataggacttcaagttttatggaatcataaactagtttgatattaactttaggttttcaattgtcatctccattaaaattaacttaggttttctgtcatatactgtattttgctgtttttgctttgtgtcgtgactcgtgcgatagactcctgagacaatgactcggtaaaagttgacattggtagttcctgtgctccctctttgacttggatgccaagttttctaaccgaaattactaagtcaaatctttaattcctaaatgggccaagcccaaactaaaagacgcgctacctctttccacgtgtcactttttgttactttgtcgcaaagtcttttctttttctcttaaccttaaaagataattaatgggcctttttatatagaggcccatttatctgaaagaaagcgaaatcaaaatctctcctttgtttctttcttcttctccttcctccataagacaagaagcgacagagggaaagaagaagaattcctaaaacccttgagcaattttccgtttctagaagatcgcgtccggttttggcctctagacccatgtctgaaaacgtccctgatcaccaaagtaccaatggtttttcatcttccgatttctgtatatttttgaaattggggtttctttagtcaattaggattctgattctgttcctattgctcccattcttcagtttcactatgttttcatgcttcttgttattgagtcctcgtgtttccatttgtatgcattttctgctttgtagttgttcctgaagaagaagcaggcaagaaggttgttctgtctaaattagtgactttgatgcgtaaattgtcagaacaaggaatcgatgctcaaaactgtcctccaggagtacgtagttgcttgatatgtccgaaggtatcgcatgcttatatatatgccaatacttaaagtactatgtggatgttgcttgattcatgttgagtatcttggaaaaggctaatttagataacttgtgggtgcattagtgtgaagttggagactctggagaaaaaagcttgactctttacatataccctgatgggtttgttatcttattatctcatataataaagttatggttttgaacttgttgttcatgagaatgtagttcatgatcatgtcttttaattttctgattctgtagttcgtcagctaaatggacttgcaggaggaagtgtgggttaaaaggtgtactacaggtgagttgtgatggttgagtatgaggataaccaacattttataaagtaaaaaactttattatattttggacttatcctcatttctgtttgcaggtggatggtaagttggtatctaaagatccaatagggaaggttgaaagaaaaattacggtggagagtataaagctagaacctctctgtgatgaggttgttatcttcatttatatgtttcatgagagaataactgaactttgtgaattcgtcatttcgttgtagttatatgagtttgatcatatttattgtgttgttggttatgcttcagattcaagatttttttgctgcaagagcgatttcagggaaaacactcgagagaaatcgagttatgcagaaaagaatagatgacgaggtagcttacaagtattcttctgaattgcttatgttttcaagaataatttagaaatcctgaaaatatctagtaacattcttggttctggtcctgtgtgtctgttgttatttactttctcatctctaattacttgctacatttaatgccgcagattgtgattgcttttacgtattggcaaagaggggagcttgtgagttgcaagtaccgatctctaactaagaagttcgttcaggttcacatcatacaaattcccttctcaacagtagacatgaacaactctcttacatgcttctttctttgactttccttcaggaaaggaatacacggaagatcttgtatgggcttgatgacatagaagaaacatctgaaatcattatagtatgtctgcatttatcaaccttacatgatgatacgattgacagattaaactgtgaagagcagtatgttaattcttaatctgtgggaaaattaaactttaggttgaaggggaaccagataaacttgcaatggaagaggctggttttttcaattgtgtgtctgttcctgatggagctccagagacggtttcttcaaaggaaattccatctgaatccaaggtaggtttcatactttatatctctttttttcccatttctctcttatttgatttcttaagcattttactcttctgtcaaactaggacacggcgtttaagtacatatggaattgcaatgactatcttaaaaaggtatgcgataacttaatatttttggtttgatgtgtgattgttttgaatgtcaatattccaagtataaaattgtttttattggtaggcgtctcggattgttattgctactgacggagatggacctggtcaagctctagcggaagaacttgcacggcgtttggggaaagaaagatgttggcttgtcaaatggccgaagaaaagtgaagatgaacatttcaaagatgcaaacgaggttagtgtagattatatgtaaaatttatgaaattgcttttgtggttactctggtcttaatgaccattacttggatgattttcttaggtgcttatgtctaagggacctcatttactcaaggaagctattctaaatgctgagccttaccctttgaagtcatgaagtgtgtccaagtcatgttcttcatatttgtcttattaatttttcggaactagcattaagagtataatttttattttctttctaattttgcatattatacacattctaaatttaattattaaccaagaaaatatattaattgaactttttgatgaaacagagtacatagcacttttggattaaaaaaccaacgaatttacattagttaagaagacaattaactaatggttaaactctaactaatattgaaactaccaaggaacaaattagaaacagacagaacatagacaaatctaattcatcagatttgttgacaacaatttgttaatgtctcgagaaatcttagggtttgtcaagatgcattcttcggcttttaggacttgaaccatttcccttggaaccacacacacttcttctgtagatagcttctcctggatttcttgagaaccaagcaaaaactgcatttctcttcccacctttgaactatccagagtctgcaaaatttaaacaagtatcgtataaaaaaaggaaggaaaatactgcaaggaaccatttggatttagggtttatcttatacctgcattttggtctgcttcagttggagaatctcaatttgagcctgcaagaacttgacatatttagctgcggcattgaacatttcggcagtgttgtgtttctggcttccagggattagttttcccagctcttgagtcttctctgtgattcttcttctcctctttcgtgctgcgatgctctgagcagatagctctcgcttcttggtgtcgccttgttcagtccacccaaccttgaacgtcgatgagaaatcaggagcttgaaacttggaaatgttggaagcttctgtgatgtaagaatccaagaggtaattagattcagggctaggggaaaaagggtcgtgactgttgaaatggaagctggagtcaatgagtttctggtgttttggcgtgtggaaggaatctaattcctgtgactcgttgaagactcgggtcttagggctaggaaggaagatttcttgagatggaagaaacgactcgtagaaatgatcatagtgatcaaacccgaagagagacggtgaaagagcttcgtcgggatacaatggctgatgttgcggttgctcttggaagaagaaactgtcagtttcagggataatcatatccacatcagggataaagcaatcctgaagctggattacatctgagttggagaagtagcttaagcagtccatagttaagaaatagatgatgaatttttagcaaatgaagaatgtgaagcaatcaggagcagttacagatggggaggttttgagtaaatggtttaattaagacttaattagctttaattgctgctaatcaagcttagagagagtaaacgcagaaaacaaaggaaaggacaggagaagatatatgagagaagcagggattctgtcttttgttttcttttgagtgaagtaagacaattcaggtagtaagtttgtaacttgtaacttaactgtcacgaaataaatatgaaagagagagggagaagttagggttttggcgaggattaaggaagggctatagtgggttttaacttttagatttagcttaacaacctcctaaatattaggcctcgtttattttctttttcttaattccatttcaagaaatatatacttatattagcttgacgttattttggtacattttattagttcttcaaagatactagattaggaactaaaaaaaagtttaaaatgaagttagagttctacagcctctaaagcctcagtaggctactaccaatcagcccaaacaattttaatttgccaataacttttttattcgtggaatttcacgaaatatatacaaaaaatatataatttctttatattataccacgaaagcatacaccacatttcacacttgaatcccaaagagaaatcagacactactttctaatgaagaattagttatctagtaccatagaaatgtaattcacaaaccgcatttagtttatcctcatgaacttatgtttagtagtataaattcgcaaaaacatatattaaaattcattaattctacaacatctaaaattcattatgtatattagttcttagtattatataatagcatattgggctattacatttattttttactattttaaaacaatttaagaaaaatgaattaagtaagtaatttgtgtcatattttagcgtttttcttttatcggtggcgcgatttactcggtaaaagaagagctactacggttttagcggctaaaaatgttgagattggtggttccacgttgttctctctgactttgccgccaagtttcctatctcaactaattaaaaatgggccaggcccaatcgctcttctacgtgccacacacgctttgactttgttgccaaggtttttcttaaggaaataatgggtcgaaataaatgctaacaggcctaaagtaacaattaatgggcctttttgcttcgaagcccatttatctcaaagagagcgaaatcaaaatcttccttcgtcttcctccataagacacggatacagaggagggaaagaagaacccctaaaacccttgagcaaccactatgaatggataatagctgaagagcttttactcaaatcgatacttcgagatgcgatttttgcttcgtttaccacaaattcattttcggaaactctcgtgctcgatgtctgtactcatgggttcgaagcaattcctcgaattttgtcttcttccttcttttgcctcatacccttcttctccttcttattcttcaagtagacaagtatcttccgtttctagaagatttcgaccagttttggcctcgagacctgtgtccaaaaacagtccttattaccaaaggaccaatggtttatcatcttacaattcaatccccagagtcccaactcctggtatgtgttgaattccttagttcgatttctatatatgtttgaaattattgacatttggggttatattttagtcatttaggagattctggttctgttcttattactcctcttcttgttatttagtcatattgtgtttccatgtgtatgcatttggtttatagctgcttgcaattactacaagctatagtaatggaactgtttgatgaagtttctcagcattttctgctttgtagttgatactgaagtagaagcagataagagggttgttctatctagattagtgactttgaggcgtaaattggcggaacagggagttgatgctgaaaactgccccccaggacaacatagtggcttgatatgtccgacggtatttcttatagtcttgttcatatgcttatatttgccaagacttaagtactatctggatgttgctttcattgatgtttgctctttcttttgggattcatgttgagtatcttgaaaaaggctaatttagattgtccactgttctggtgggtacatcagtgtgaaggtggaaactctggagaaaaaagcttgtctctttttatagcccctgatgggtatgttatcttattatctcatcaaaatatgttttggtcatgagactgttgttaatcatggtgttttattttctaatttgtagttcatcagctacatggaattgctttagggggaagtgtgggttaaaaggtggagttcgggtgagttgcgatggttgagtacgagtacgagtacgaccaacattttatgaagtaaagcttgattatattttgaacttatccttattcctgtttgcaggcggatggtgggttggcatctgctgatcctatagagaaggttgaaagaaaaattacggtggagggtatagagctagaacctctctgtgatgaggttgttgtcttctttcatatgtttcttttgacatacttattcttattatttcttctgtgtctactgctttccttagatgatgactgaactttgtgaattcttcttttcgttgtagttatatgagtttgataaattttatttgtgttcttggttacgtttcagattcaagattatttcgctgcaagagcgatttcacggaaaacactcgagagaaatcgggttatgcagaaaagaataggtgacgaggtagcttacgagtattcttctgaattggttatttttcaagatttttgctgtcctcagattctaaaggcgatggccactcgctgttccgatcttgattgcaatttagaattcctgattttctagttaaatttttgacttaaggaacatgattagttctgatcctgtgtgtccgactctgtcttatactttctcatctctaatatttttatatgtttaatgcggcagattgtaattgcgtttacttattggcaaagaggggagcttgtgagttgcaagtaccggtctctaactaagatgttctttcaggttcacatcatacaaattcccttctcaatagcagatgtaaataactctctcgagctttctgttacgactgttctcttacatacttttttctttgattttccttcaggaaaggaagacacggaggatcttatatggtcttgatgacatagaaaaaacatctgaagtcattatagtatgtctgcatttatctcctttaaattatcgtacgaaactaaactgtgaagagcagtatgttaattctttggggaaaataaaactttaggttgaaggggagatagataaacttgcaatggaagaagctggttttctcaattgtgtatccgttcctgatggagctccagcgaaggtttcttcgaaggaaatcccatcggaagacaaggtttgactggtcttctaggtttcatactttatatctctttttttttccgttctcttttatttgattccttaagtattttactgttcggtgaagctaggacacgaagtataaatttctatggaattgcaatgactatctaaaaaaggtgtgtgataatttattatttggtttgaatgtcaatattccaagaatctgggaataatatggtctttattcgtaggcgtctcgaattgttattgctactgacggagatggacctggtcaagctatggcggaagaaattgcacggcgtttgggtaaagaaagatgttggcgtgtcaagtggccgaagaaaagtgaggatgaacattttaaagatgcaaacgaggttagattagattatatgtaaattttatgaaactgccttcgagattaccttgatttaaatgaccacaatgattccttacttgggcgattcttaggttcttatgtctaagggacctcatttactcaaggaagctattttagatgctgagccatatcctatactaggattattctccttcaaagatttctttgatgaaattgatgcctactatgatagaacacatgggcacgagtatggtgtttcaacagggtggaaaaatttggacaacttgtatagtgtaagcgttaaagtcatgtccttttttcaaaaatattgttgtaggctcatcaactaatgtgatatattcaatttgctcctgatcaggttgtgccaggggagttgacagttgtgacagggatccctaattctggaaagagtgaatggattgatgctatgttgtgcaatcttaaccatagtgttggctggaaatttgcactctgttcaatggagaataaggtgtgtttctgaacttgtccttaattggaaaaactgctttatagtagctttacctgattgttcttatttgtgctacttcaaggtacgagatcatgccaggaaacttttggaaaaacatataaagaaaccattctttgatgcagagtaagcctctttgctttgaaaagatctacatctttctgattgcagccaatagctggtgctcttgtaatgtctgaccgtgtacttaactttgtcctttcttgaaagtggtgtgtatgtttcccctttttttcgacagctatgggagatctgtccaacggatgagcgttgaggagaaggatgaagggaaaaagtggttgaatgacaccttctatcccataaggtaagatattcagccttgtagaactcgactctccgctgatgcaaaataactacctaaagcccaggaagttgtgcaacttggacatgatatgttaaaattttggtgtttgggttctcatgactaatcagatgtgagatggattcacttccaagtattgattgggttctggaacgtgcaaaagcagctgttcttcggtatgggattcgaggacttgttatagatccttacaatgagctcgatcatcaacgtactccacgccagtgagtgaagaaaatattttcactgaataccctctttcctttctgaaacatgaaagattaatattcgttttgataggacggagacagagtatgtcagccagatgcttacaaaaatcaaacgcttttcccaacaccactcctgccatgtctggtttgtcgctcatccaaaacagttgcaacattgggatggcggtgcaccaaacctttacgatattagtggcagcgcacattttataaacaaatgtgacaatggtattatagttcacagaaaccgcgacgaaaatgctggacctcttgatctagttcaagtgggtaccaatcccttcatcttcatctgtaatgtattattttaaaaatggccttcttattgtgtaaagttactaacctttttgtatgttttagattggtgtgaggaaagtacgaaacaaggtggcaggacaaattggtgatgcatacttgtgttatgacaggtacataaacttttcaactaccttcttatttctactaatctaacttaacggactaaacaagttttcacaagaacttatgatagtattttgttactttggcatcgaaaactagctgaagttattccgaagtacccaaagcgtagagacctttgcctagaacaccaaacctttatcaaaactctgttcaaagttacaatcgataattctactatgttggttcagtaatgaaatctttattcgacaggacaactggttcctactcggattctccagtgacgcctggaatgccagagaggagatcacccaagcggtactgatcagtttggtgaatttaaaggccgtcaaacacggtggacatagcgtatcgataacatttgtcaactaaattttatcccttttgggttaccattggtgaggaaaaagatgatcttgtgagattcttacctttgtgttttaacagactgtcaagattcaagaacaagattatgtctctactatgtaatgtggaattatgaatcatggtgtttctctattgtgtctggtaggtctgatccaaaatgtgactgaattcgatttttgtacagctctgtgatctttttgtgctctgtctgtttctgtagtttgttctgtttctctctgtctctgtctcctccttttgttgcggctgatttggtgttgtgaattagctgtataactgttgacttcaactacctctctgttataattatgcaaactctttgcaaattgattcaattatttccaatgttatactgctttgtgttacgtctatctagttgatttctttgagtattaatctaattgtcacgcaaatattttataatagaatcagttgcggcggtgcactataaatgtcgatcatatataatcattgcgaacgtaattaatatagggaatataggtgaaagttgtggaaatagtttattctcgtcaaaggatatgaccaagaccaaaattattggtattatctaatttatcaatccattgtttttttttcacacatttgcttattctgatatatttagtattgtttttaattatacatcataaagacataaacatcatagacaaaacttttattgagaacttatataaataatcattttttgtgtatgttaatcacatatttacattaggaaataactaagtttagaatttttcgaccaatattcaaatcacttaatcatctgatttacatgcaaacatttgatgatatgaaaccattcatatgaaacagcaactcattaatataaaaatataatgattagtgtctttgttggcatattttggtgtcaacagctaaaagagacatttacttaccaataaaggagaccgtatatccaattccgactgtttaatgaaaatcatgatatattaaggaacaaatatttgattgagaaccgttacaacgaagagattcttctccactatcacattatacatggtactttctaattatattaaaatgggacgtaatttagaattaagtgataactctgtaaaattagaaaggaaacaaaacaaaataaaaccatattaaaatgaatttcacacaaaaagtgactttggtagtgaatatatccgtccgttgcgccgaacatactctgtcgaatagcaccacgtgtcgtgtaaacagatcagcatcgacgaccgttgagagaacatgagaagcgaaacgtgggacctcaccaatatctttgtttattaatttatatttcttggtgctacgtaaaatatttgttctgcgattttgagaatttgccaggctggcaaattggggccaggttggatcatccaacggctgtggttggttcttcatgtttactggtagggtccatcatgtgaccgttgctaagggcggtgtggaccacctctagtcctagggttttttccttctctgcataaagctcccttctttgttcctcctcctctctcttctcttatttattcacaaccccccattaatctctttctctgctgcagcttaaactttaaaaaacactacaagaacaacttcttcaggttctataaagagattccgaagaagaatcttttccagaaacagtgtaagtcttatcttcttctttaggttggtttctctctttttctctctttagaagctgttaaattcgaatcctttttgggttttagttctattgtctctcttgatttctcgatttttatatagataaacttagaaagcttcgaatttgagctaggtttctctcgccttcaggaaaaaaaaaaagaaagtttcaatcttttcctcctgagatttagttctgcagagttgaaattggattctgtgttatgttgtttgagttcgtttaatcgttagggtttatacaagaattacgtttttgattttagatctctactaatcaggaagaagaattaagcttgtttcttttagatctcaactaattcaacaaggttaattagttctagggttactactttggtgaattgtataattggtgactaaatattgtttgaatcgattctgaatgacaggctttaagatgactgctgaagttaaggttgaggagaaacaggtggagtcagaggttgttattgctcctgctgttgttcctgaggagactactgttaaggctgttgtggaagagactaaggttgaagaagatgagagcaagcctgagggtgtggagaagagtgcttccttcaaagaagagagtgatttctttgctgatttgaaagaatctgagaaaaaggcactgagtgatctcaagtctaagcttgaggaagctattgttgacaacactctcttaaagacgaagaagaaggagagctctcctatgaaggagaagaaggaagaggttgtgaaacctgaagctgaggttgagaagaagaaggaagaagcagcagaggagaaggttgaagaagagaagaaatctgaggctgttgttaccgaagaagcaccgaaagctgagactgttgaggctgttgttacagaggagataatccccaaggaagaagtgactactgttgttgagaaggtagaagaagaaaccaaggaagaagagaagaaaaccgaggatgttgttactgaagaagtgaaagctgagactattgaggtggaggatgaagatgagtcggtggataaggatatcgagctttggggagtgccattgcttccaagcaaaggagctgaaagcacggatgttatcctcttgaagttcttgagagcaagagactttaaagtcaacgaagcctttgagatgctgaagaaaaccctcaaatggagaaagcaaaacaagattgattcgatccttggagaggagtttggggaggatcttgccactgcagcttacatgaacggtgtggaccgcgagtcccacccagtttgttacaatgtccacagcgaggagctttaccagacgattgggtcggagaagaacagagagaagttcttgagatggaggtttcagctgatggagaagggaatccagaagcttaatcttaaaccaggaggtgttacttctcttctccagatccacgatctcaaaaacgctcctggagtgtcaagaacagagatttgggtcggaatcaagaaagtaatcgagactttgcaggacaactatccggaattcgtgtccagaaacgtgagttgattattatcatcattcgttttgggactcgttgatttggtctactgactttctaatcattgtttgtttttgttctgcagatattcatcaacgttccattctggttctacgccatgagagctgtcctctcgccattcttaactcaacgaaccaagagcaagtttgttgtggctcgtcccgctaaggtcagagagactcttctcaagtacattccagctgatgagctcccagttcagtacggtgggttcaaaacagtagacgataccgaattctccaacgaaactgtctctgaagttgttgttaagcctggatcatctgaaaccatcgaaatcccagctcctgaggtataattagaaaaccaaaccctaccttattcctgaagttgttaaaccctatctttctaattatggttttttgttttgtggttgttttcatagactgaaggtacattggtatgggacatagcggttttgggatgggaagtgaattacaaggaagagtttgtgccaacagaagaaggagcttacacggtaatagtccaaaaggtgaagaagatgggagcaaatgaaggaccaatcaggaacagtttcaagaacagtcaggctggtaagattgttcttaccgttgacaatgtctctggcaagaagaagaaagttctgtacaggtacagaaccaagactgaatcctcttcctgaagtggaggatttcatgtagtctctggatatataatattcttttctaaatttaaacgtttggtgttattatttatttttgagtgatatgtaagagaaagagatactcccattatttcattgatattcaatcttttgcttctttctttttttggtaaggtcaatcttttgcttctttggtatgagatttttcctctcttccctatttgatttatttgattaaaactgtatggataaataaatatgttcgaatattcagagttttacatgggctgagtattggcccaatggcctttcagagtaacaccaaagaagaaatatgtgatatgttttgtatggttgttctgaaaggttttacagtgagaaaaacagttgaacaaccaaaagaggaatggtttgatgattaataatttttcttttgatctaacattcattatattataaaccccaaaaccgggaaaaaattgaaattcggatggaaaaaaacataacaactctatccatagttaaatcttttttttgtttgtcatctctatccatagttaaatcttagttcttacttatgagtaaatgtccttagactactcatgttacgatcgatgatgcatgtgtgtgaacttaccttaatggatatacgcggcgaaaacaaagactgccacaaaatctactctttgtgttgttattggtacacatcaatggatgaagaatagtggctcgaaccgcttcattggccagaaaaatataagattagctactacatttttttctaaagtaaaatcaattttgttttttgggatcaatttttgcagaattctatgtagtgattacgacaccacacgcatgcatggcatcatcagagaaaaagattatagatgactagacgcactgatccttctacctttttttctttaaattgaatgattttaatataaacaatttgtaacttgtaatagatttgcacttctcctcctataaatgcgttcgtcaacatctttgctttcgtacggtaaaacaacatctctcgttgaaacaaaatgtgtttgatcattttaaattttctaataccttacgtcttttattttaatttctataagaattgtctgtatggaaagtttttttaagatttttgttgcattttttttaatggacagcttagtcatgcttctctctaatctatagactaacatgcgggtaacatataaatggcttatataaatatattcttaacaaaaaatatcaatattcttttcagcatatcagtgttataattaatttagaatccacgtctagtttatattttcttctttatttgcggccccaataatactacttttggtcaacaatatgaaagtcaaaccagccgctcaaatgtatccttcatgagttcatgttatatttcagtcaatacttttcatatttaaacacttattataattacgtaatatttttttgcccaaaaaaaaaaattacgtaatattcaacatctctaccttgtagagttccaaaacattgtcacaaaatatttataaagaatttattttaactaattaggtcgttaattgtccaagggtttttcatagttgatatagttctgttcaaatatagccatccttaatcgattcatgggatcgtaaattactacttcgagtgttgtaaaaaaaaatgaaacttctacattacaaactcgaatttaatgcatctggagtgatactataaaagtagggatgctctcaggtcgcatttgagagacacagaaatgattttaatggaattaatatattttcagtttttcacaaaaaaaaattgtgtttataacaactgcagattcaatgctgattttatgagtctcacctatagaatttatatttctatattcatagaggcagtataggtgttgacccaacatcgaaagaacacttcgtaaaaaattctttggaacaaggctgaaaatttactcccaaatttagctatccgatgaagataaatcatttaccgtttattaaagaattatcgagattttagtccaaaccaaaagagattatgagcctaagattttgaatttgtattggtaaaagaaattgaacgaaaatttcagaaaaaaatattaataaattgaacgatagagttcacttactacatagtcaactagtgcctagctataatagtttcaaaagacaaaaaaaaacaaaatcggttaactacttccgtgacataattctcattttgatttttgaatccagtctaatttgaaaagtatattcaaaatctttaaatccattaatgataacttttataatacgttgacacacgcaattgtatatacaatattcttgaattttaaatgtaaattctagaatatattgcgatcaccacactaatcaaaatctttgggacaacttgaacccacatttgacttttcttggtcaaatattttggcatcatgcatgatcttctctataaaaaccaaaaggcctcaacgacattcataaactcagtcattatatttatttttgttgtatttcaacgttcaatctctgaaaatgaaatatgcattgattcttgttctcttttttgttgtcttcatatggcaatcaagctcatcatcagcaaactcggagactttcacacaatgcctaacctcaaactccgaccccaaacatcccatctcccccgctatcttcttctccggaaatggctcctactcctccgtattacaagccaacatccgtaacctccgcttcaacaccacctcaactccgaaacccttcctcataatcgccgcaacacatgaatcccatgtgcaagccgcgattacttgcgggaaacgccacaaccttcagatgaaaatcagaagtggaggccacgactacgatggcttgtcatacgttacatactctggcaaaccgttcttcgtcctcgacatgtttaacctccgttcggtggatgtcgacgtggcaagtaagaccgcgtgggtccaaaccggtgccatactcggagaagtttattactatatatgggagaagagcaaaaccctagcttatcccgccggaatttgtcccacggttggtgtcggtggccatatcagtggtggaggttacggtaacatgatgagaaaatacggtctcaccgtagataataccatcgatgcaagaatggtcgacgtaaatggtataattgatatctctattttatatactaattaaattttatagtgtggatcggatagtgattttggtcacatcaattaaaaacttggtgaacataaaattaaccaagcaatcaatttagacaagcaacataatcatatatatttttcttacatttgtatgtacctgaatatttatatttatgtttatatgttctcactatattttcacttttgtatttgaaaatttttaggaaaaattttggatagaaaattgatgggagaagatctctactgggcaataaacggaggaggaggagggagctacggcgtcgtattggcctacaaaataaaccttgttgaagtcccagaaaacgtcaccgttttcagaatctcccggacgttagaacaaaatgcgacggatatcattcaccggtggcaacaagttgcaccgaagcttcccgacgagcttttcataagaacagtcattgacgtagtaaacggcactgtttcatctcaaaagaccgtcaggacaacattcatagcaatgtttctaggagacacgacaactctactgtcgatattaaaccggagattcccagaattgggtttggtccggtctgactgtaccgaaacaagctggatccaatctgtgctattctggacaaatatccaagttggttcgtcggagacacttctactccaaaggaatcaacccgtgaactacctcaagaggaaatcagattacgtacgtgaaccgatttcaagaaccggtttagagtcaatttggaagaaaatgatcgagcttgaaattccgacaatggctttcaatccatacggtggtgagatggggaggatatcatctacggtgactccgttcccatacagagccggtaatctctggaagattcagtacggtgcgaattggagagatgagactttaaccgaccggtacatggaattgacgaggaagttgtaccaattcatgacaccatttgtttccaagaatccgagacaatcgtttttcaattaccgtgatgttgatttgggtattaattctcataatggtaaaatcagtagttatgtggaaggtaaacgttacgggaagaagtatttcgcaggtaatttcgagagattggtgaagattaagacgagagttgatagtggtaatttctttaggaacgaacagagtattcctgtgttaccataagtgtatttatttgattattggttagtgaaatttgttgttgtataatgattatatgtcgtatttttatttattattagtaatttataaagtttgatattaaatacaaatagtataataagatagtttcttttagtattatgttgataaagaaaatatgatcataccgttcacacttctaagtactttttttagtttgtcacttattggtaacatttttgatcgatcaataagtatatggttattgtaaaaagacaataatagttgattttgatttatacagctaaaatagctattgattatgtctggattcataagatattaaaacccttgactagataacattcttaaatggaaattgcatctttttttttttttaaatgaaagagatagcattcttgacatttgacaaaaaagcaaaagcagaagattttttagtttagaaaacataagatttttaattagagaatctatacaatcttcaatattgaatctatacgatcttcaaaaattcaagtctttcttatatatattttttttccggcaaaaaggatacagatgaagatcatgccatttgttttagaatcttgtttctattaaagttcaaaaaatagaccggacaaagttataaattaggattatataaaacagatatggatatgaatcgccataataagcattaaacctccatattgagtaattgactaatttacaaagataaaaaatctgcaaaaaggtatgcatttacaagaatagccgattctattcatgtcaaatttacaaatatataagaatacaaatcccctaaacacatcttaaccaattactcaacaaaagagaagaaaatgacatctctaacaactcaaaccctaatcatcaccatttttcttcttacaatcccaacatccttcgcatcaccaccatcactcgaagacgttttcgcacaatgcgtcaccgattttaaaccttcaaatccaaaatccccaatccaaaactacatatacactcaacgaagccctaatttcctcacaatccttaacaactacgtccgtaaccttcgttacttcaacaacatgacacgtaaacccgtagcgattgtagctgccgcggatgtcactcacatccaggctacaatcacttgtgccaagaaactcggcctccagctccggatccgcagtggaggacatgactacgacggtatgtcgtatttatcaaccattgatttcgttgtcctagacatgttcaatctccggtctatcaatatagatcctaaactcgacaccgcgtgggtccaatccggtgctacgcttggagagatctactacggagtcgccaacaaaagcaatgacctccgtggatttcctgccggaatctgtcctggtttaggcgctggtggacattttagcggtggaggttacggaaacatgatgaggaaatacggtttatcgatcgataacattatagacgctaagatcgttgacgctaaaggaagagttttggaccggagctcaatgggagaagatcttttctgggccttacgtggtggtggagctgctagtttctgtgttgtcttagcttggaagattaagcttgttccggttccagctaaagtcacagtctttaacattgaaacgtttggaaacacaggaagcgtgaacaccacggaacttgtagccaaatggcaagagatcgcagacaagattgacaatgatctgttcataagattaactttaggctcaagcaacaaaaccgtgaaggcttctttcatgggaatgtacctcggaaactcatcgaatcttctagaaatcatgaacgcgaaattccctgagcttggtctgatcaaaagagagtgtattgaaatgaaatggatcgaatcggttctgttctggctcggtatcccacccggtacagcaccaacaacgagtatgctaaaccggatcccacaaaagcaaatctacctcaagagaaaatccgattacgtccaaaaaccgatttcacgaaccggtttagagtcaatattcaagatcatgacagagaacgagaacgtcacaatggcttttaacccttacggagggaggatgagtgagattccatcgaccgagaccgctttccctcacagagcaggaaacatgttcaagattcagtacgcagcaaactggttcgtgccaggtgaagcagtggctaaagattgcttgagccagacagaaagattgttcgaggcaatgagcccttacgtgtcaaagaatccaagagaggcgtttttgaactatagagacgttgacattggaaagagcttaaactcaacgtacgaggaaggtaaagtgtacggatttaagtattttaaggataacttcgagaaattggttaagatcaagagcagagttgatcccgacaactttttccggtacgagcagagcattccagtgctctccagccactagagagactagagacacacttctattaacaattgctaccaaaatttatatttaaatgttaacatgcaagaagtagtactataactatttgatgtaaaatgcgaagagttaatttgagctctctgtttttatcgaattcagacttaaacctgtgtcttggattagaagatgaggaagtagtcatttgttctcctgtatatgtactttcaaaacttatatttacattatatgacaagaaatttataccttttctttattttcactccagtaagaaatgtgttggaattgttatttgtagttttgaagacaaaattcaccagtgagtgataaactgataatggaaaagaacaaagaaaccagtttttaactatttgcatatgtaatttatttgttgcaaattatatttagttaaaatgtttcctctatttatatatatatcagtcaagcactatgtataagaaatgtcaatttataaatttttacatgtcctttaacagaaagaaaatgaatttttacatgtcattcatagagagtcactcgtttatttcttatatagagaataacacactcacatgcatatgcatgcaatatgatacattttatgacaaagataatcaacggaaacggtcaagacataatttgataaacaacttgcacgatgcacagatctgatcaaatatataactctttaacatatccaaaatattcaaaaagaaaaactcgatccaaactagcaacatcacgctcacgcgtaggctaaaaatttattaatctccaaaagtctttcttatgaacactgcaaacacaacaacttgaaaagtcatataggtttagatgatgacgcgtattggctatcgcttaccggagtggctcataaatacaataaacaatacgtaaaagtcaaagtcaaatatatttagtcaactataaccattaatcgggcaaaacctttagctgtcaaaacaacgtgaaaacgatatttgtatatatcatcaagaatcagtagataagagaatgatttaatcccctgactattacaattttggtgtaataaacagtctctattggtttttattctttgttttaatttctcatgacctatagagagaattaggtagtttcgaaaattggctaatcaacttttgaaaactactgtctactttgcttaaattctctacacttagtttcggataagataattgtcggactaatagttaatcccttgacaatctttgatattataaaaggtttagttaatctcttctctatataaatattcatacaccagctttcaaaaatatataatccaaacaccaaaaacaaaatggagaaattgctcgtgatctctttgctactactgatctcaacatcagttacaacttcacaatccgtgaccgatccaatagctttcctccgatgtctcgatagacaaccaacggacccaacaagtcctaactccgccgttgcttacatcccaacaaactcttctttcaccactgtcctccgcagccgtatacctaacctccgtttcgacaaacccactactccaaaacccatctccgtggtggctgccgccacgtggacacacatacaagctgctgtaggatgcgcacgtgagctctctctccaagtcaggatcagaagtggtggccacgacttcgaaggactctcttacacttccaccgtccctttctttgttctcgacatgttcggttttaaaaccgtggacgtaaatctcaccgagagaacggcttgggttgattctggtgctaccctcggagagctttactatagaatctctgagaagagcaatgttcttggatttccggcgggtttgtctaccacattgggcgttggtggacactttagcggcggaggatacggtaatctgatgagaaagtatggtttgtcggtggataacgttttcggctccgggatcgttgattcgaacggaaatatcttcaccgatcgggtttcgatgggggaagaccgtttttgggcgattcgtggaggtggtgcagcgagctacggtgttgtcctcggctacaagatccagctagtaccggtgcctgagaaagttacggtttttaaagtcggaaaaactgtcggagaaggagccgttgatcttataatgaagtggcagagttttgctcatagtacggatcggaatttgttcgtgaggttaactttgactttagtcaacggtacgaagcctggtgagaatacggttttagcgactttcattgggatgtatttaggccggtcggataagctgttgaccgtgatgaaccgggatttcccggagttgaagctgaagaaaaccgattgtaccgagatgagatggatcgattcggttctgttttgggacgattatccggttggtacaccgacttctgtgctactaaatccgctagtcgcaaaaaagttgttcatgaaacgaaaatcggactacgtgaagcgtctgatttcgagaaccgatctcggtttgatactcaagaaattggtagaggttgagaaagttaaaatgaattggaatccgtatggaggaaggatgggtgagatcccgagttcgaggacaccattcccacatagagcaggcaatttgttcaacattgagtatatcatagactggtcagaagctggagataatgtggagaagaaatatttggcactcgcgaatgaattttatagattcatgaccccgtacgtgtctagtaatccgagggaggcgtttttgaattaccgtgatcttgacatagggtcaagtgttaagtctacgtaccaggaaggtaaaatctacggggctaaatatttcaaggagaatttcgagagattagtggatattaaaaccacgattgatgcggaaaacttttggaaaaacgaacaaagcattccggttagaagataatacgtacgagatgaatgttgtgagttgtgaagttatgatcctgtgacatgaaaagaaaagaaagaaatgtattaaaatctttggtttgatatattgttattaaatgtaatatgaaacatatataccaaaataaagttgtatcatgaagtatatatagttaacgaacaaaatcgacatacattactaattgtgctgatccatttttaaaatgttacaaataaatatcctaaaaaactcactgtcatgacgaccgctaccaccatcttaaacaccatcaagaagtgttttcgtttatttcttacatgacaggataagtataacacactcacatgcacgtaaagatatgtatacattcattgaccaagacattcaacgtttctctcaataatcaatactaacggacaacgcgggatttaataaaacaagacttgcacgatacacaaatctgatcaaattcatattccttaatttaccctattaaaaaaggttcgatccgtacaaacatatctaataatctcctaaattttgcatatgaacactgtaaacaataaactttgaaaagtcatatatgtagataatgacgcgttttggctatcacgtaccgtatgctcaagtcaaagtcaaatatatatagtctactctaatattcaatccggataatatctttggctagaatagaacgcgtgaaacaaaaattgttaactgaacgaatgaaaaccttggattaccaaaaaaggattgcttacagaagtgtactattatacagtatatatactattaccaagtttcttttttcttttcctttggcgcagacattagtgtacaaaattaatccaccgttaaatacaagaagagatttcaatatacaaaagaaaatcaaagaaaataggactgattgcattttaaatttttttgccagatgattgattacagaaatatactataataagattaataaataattcattgaacagataagaaccttggacttaaatcctacctatataaacacacacaacataagcttacaaaatatataatccatactccctaaaatagacatcaaaacaaaaatggaaaaattactcataatttgcatgttactaatctcagttttagttgcaacttcacagtcgcaaaccgatccagagacattcctccgatgtctcgtaagagaaggatcaaacccacaggttttcatctccgacgtcacctacatcccatcaaactcctctttcaccaccgtcctccgccgccgcatacctaacctccgtttcgacaaacccaccaccccaaaacccatcgccatcatcacccccaccacgtggtcacacatttctccggtgctagcttgcgcacgcttgttccctgtccaggtcaggatccgaagcggcggccacgacttcgaaggactctcttacacctccacagctccgttcttcctcatcgacttgctcaacttcaaatccgttgatgtgaatctcacggaaggaacggcttgggttgataccggcgctacactgggagagctttattataaaatcgctgagaaaagcaatgttcttgggtttccggcgggtttgtgtactacattgggcgttggtggacatattagcggcggagggtacgggacaatgatgagaaagtatggtttgtcggtggacaacgttgtcggctccaggatcatcgactctaatgggaacacctacttcgatcgaatgtcgatgggggaagagcttttctgggcggttcgaggaggtggagccgcgagtttcggcatcgtgatgggatacaaaatccggttggttccggttccggagaaagttacggtttttagcgtcggaaaaaccgtcggagaaggagccgttgatcttataatgaagtggcagaacttctctcatagtacggatcggaatttgtttgtgaagctgactttgactttagtcaacggtgcaaagccgggtgaaaaaaaggttttagcgactttcattgggatgaatcttggcgggtttgataagacgttgaacgtgatgaaccgggatttcccggagttaaagctgaagaaaaccgattgtaccgagatgagatggatcgattcggttctgttttgggccggttatccggttggtacaccgacttctgtgctactaaaccctacggtcacaaaaaagttgttcatgaaacggaaatcggactacgtgaagcgtccggtttcgagaaccggcctcggtttgatactcaagaaattggttgagttggagaaagttgaaatgaattggaatccgtatggaggaagaatgggtgagatcccgagttcgaggacacctttcccacatagaggaggcaatttgttcaacattgaatatatcatagactggtcagaagctggagataatgtggagaagaaatatttggcgctcgcaaatgagttttatagattcatgaccccgtacgtgtctagtaatccgagggaggcgtttttgaattaccgtgatattgacattgggtcaagtggtaattccacgtacgaggaaggtaaaatctatggggctaaatatttcaaagacaatttcgagaggttagtggatatcaaaaccaagttcgatgagataaacttttggaggaacgaacaaagtattccggtccggaagtaataagttcaattcacatgtattaaagttttcagcaaaataaacaaggattaatatgtattgttgtcaactgtataatgatctctgatttgatgataaaatacaagtggttgttaacttgttctcctacattgctaatgagataattctatcaatgatagtctatcatatagtaataaaaatacatggattggttcatttcttatcaactgattttaaatggaaagatcgtaattcatattaacacacatgtattttgtatatttcaagcacacttaagatttttgtttacataaatctagatatcattatgatttcaagattcggctgattgattcttgcttatatcaatttctttatttcctactattttttgtttcaaaatatcacaattcccataaaatttcaattagccgaagatgtcctaacattacgtcaaagtttagttaaatcacaccaattattaccattgtcaaagttggaaatatttggccgaaaaatcaaaagtacactttctcaaaaagccaaaaattctctatttatccaaatctctaacaaaaaactcaaaagtgaaaaaaaaaaaaaagaatgaacaaaatgtatcttatctttcttctattcttcgctgcatcgtactcaatgtcattgagttctgcagattccgtaactatctacgaagattttgtccaatgtttcaaaaacgtgacaactatctccgacattgatctctccgacgtcgttttaccacgtactagcatttccttcactcctaccttacgcgcctacatcagaaacgcccgtttcaacacctcctcaatgccaaaaccgtcgatcatcatcgtgccccgtgtcgattcacacgttcaagccgccgtgatttgcgccaaaacgcttaatctccagctgaagattcgtagcggcggtcatgactacgacggtctttcttacgtctccgccgtaacgttcctcgtacttgatctatccaatttccgaaacatcaccgtcgatttaaacgacggaggaggatccgcttgggtacaaaccggcgcgacgctcggcgagctttattataggatctgggagaagagcgaggtccatgctttccctgccggagtttgtcctaccgtcggcgttggaggacacgttagcggtggtggatacggacacatgattcgaaaattcggactcactatagatcacgtcgtcgacgctacaatcgttgacgctaacggtcagattcacgatcggaaatcgatggaagaagatctcttctgggcgattcgcggcggaggcggcggaagcttcggcgtcgttttagctttcaaagtgaaactcgtgaccgttccaaaaaccgtaaccgttttcagagttgataagtctgtagacgaaaatgcccttgacatggtttacaaatggcaattcgtagctcctagaaccgacccgggtttattcatgagagtgttgttatcatctccgacgcagaacaaaacaagtacggtgaacactaaactcagggcgttgtatcttggaaaagcagacgacgtcgttttaaagatggcggaggagtttccggagttgggtttgaagaaagaagattgtaaggagatgacgtggatccaatcactcttatggtggatgaatcatgtagacgtggacaaagtcaaaccggagatattactcgagagagaaccggattcggctaaatttctcaagagaaaatcagattacgtagagaaagagatgaccaaaccagaattaaaccggttgtttcagaaattggcgacgttagatagaaccggtttggttttgaatccgtatggagggagtttaaacgtgaccgcagtgaatgcaacggcgtttccgcatcggcacaaactatataagatccagcattcggtgacttggcccgatgctggaccggaagcggaaagactttacattggtaatttaagaacgacttataatattatgactccgtttgtgtcgaaaaatcctaggagttcgtatttaaactatagggatattgatatcggggttaatgatcatggagcggatggttatcgaaagggagaaatctatgggaggaagtattttggcgagaattttgatcgattggttcgtgttaaaacggctgttgatccggataatttctttagaaatgagcagagtataccaactttacctcctaatagaagatagataactttagtccatgtaacaatagtaacttccttatagtgtttttttatgaaacttggaatattttttaatagatttagctgcaagctatattgtggcatatatagcacacgttttgaaaaatacatcctttctaagttctaattttctatatcatatgttggttttagtttgcttcataatacactccatgattccatatatcggaaaagagaaaaaccaaattagactgaaccggaactggagttaaaaccggatctaacactcagcaaataacaaaaagaagaagaataacatttcagtaattatacatacatacacactcttaaactagaacccaagacagaacaataagaaaagttatggaacaaatataatgaaaattatacattgatgaaactccataggatgtgtagggttcagttcctgtcagtaccgtgcaaagcaaggaaaagaccaatccagataaagataatctttgtgccggagaccttcaactttgaatttccattaagaaatggaacgccagagagattgttctggttgagtcgattcgtaaagggttgattttgagcagatgatgatgaagaagaagacgaagaaatcggttggttgaatccagttgatgatggttgattaaacccggttaaaggttggttaagggaagaagaagtagatggctgaccaagaattggattgttgagtccagttgatgatggctgattaaatccggttaatggttgatttatcccggttaaaggctggtttaccgaagaagaagtagatggctgaccaagaattggttgcttcaaaccagttgatgaaggttgattgaatccgattaatggttggcttaacccggttaaaggctggtttacaggtgaagaagaagaaggttgaccaagaattggttggttctggttcacgcttactcctcctgttggttctaatggtgtggtgattttggttacttgtgcagcctctgaaattgatgataccagaaggcagaaaatgattgtgagcatacatctcccggttttggcgaatttcatgtccattttcttgagttttcccagtgtattttccggtttactaaacagcagaacttatagacagacaaacctggagttgttagcttctttaagattgtctgaggagttgatggagagaaaaaagaaagtagttgacctgaaacacaaaatccaactaaaccaaccatatagtgtctttgtttctgtatcaactattacatcactgttttgtgcttatatgctgtgtttatatacaagaatgatagaatttatctataaatacagaagaatttgatcaaaaaccggttctcaaaccgaacgtgttgcgcctattggaaagcgaaatccaaaccatcaaggacatccaaatcactagaagagttcttatctgaaagatcaacttttggagagtttcctgtacttctactcagtgcccaaatcttgaatcctttcttgttcttcttcaagccgactaactcttgactcttacttagatttggaccaaatcttatactttggactctgtctaacaacaacctgtcttctagagagagctggtttttgtaggtgaagtcaggggagagtgatagttgcgtgttggagatggttctgttgttgggtggagagacatggttggtttcttgaagcttaacgccgtgagcacgtttctttgatgacttcattagtcgatgaagccatacaacgagttcgagtacatatgaatcaactattggtttatccgcatgatgaagcgtctgaagtcgtgttggattcccgttgttctcgccttttccttttcctttcccaaactctatcctgtattccaaattaccaattcgtagtttgctagatcagtttgaagattcaaaatttaaaacttcagtagctgatagagacttaccttgaatttgcccattcacctacccatccgaagccttgatgtgctctgtgaaaattgaatgtgaccaaaatgaacaaggagaaacatattaaaccaaaaatgatggtgaaggaatacttacttggtggtgttttcagcgaacgggacaagccattgaagcgacttctccatttcagctttgatctcaggtactgaaagctgcagaaacactcaagttaggtaacaaaacaagaaacagaaccaaacaatgcctgacgatatacttgagaaacagagatcttttttggacaaacctcttcctcctgatcaagagtttgtagccgaggacgaagagctgtcttgacagtagcgggtaatgcattgtacagcgtgtcccttacattagaaggaagtgacgatggtcgagacgcctagaaatttcaaggatcagtttcaaccagagaatatatatcagaataagactggtgagaatctggaatcttaggcttacaatattatcgatttgttgtattagattagcatagtgtaacgaaagaccggcttcacctaatcgttctcttccctgctccccttcattgtctcttagacctattgttggttaagaaaatgatagttgaaatttggttttccagaagtggagtcattataagaggaccagcggtacaaagaaacattaccattgttgccaaaaacttccacaatcgtctgccgtatataacttacaacatccacaagcttctcaattatctgcaacaaaagaagatattagaataactagcatatgtaccacacacttagacacagcaattcaataaccacttgcctctgccagattctgggaccatagggatttcttctgtaagctcttcacgagtttcttctgttgttttagttcattttgtaagatgacgataccctctcctacatgtagaaaaagaaaatgaaatcgggtgttcttgaaagagctaagactgatcaaataaatagtaagaccaacctctccgagggaggtttaaagactctacttctgcaagctttctcctgtaatcttgttcaaacctatccaaagcttgcaactcgtgatataactcctgataaagccaatgcaagttagtttcaaatctcccagaaaaagattacaacagctcattgaaacttcaacatggaaacatacagaagtgattctggcaagagtgacgagctcttgcatccttgcctctgcatcatctttgagcagtttatgctgtgagttctctgtgtcaagcctgaaacgttatagacccgtgtacaatgaaaatccactggcatgtaagtgactaaaaagcattagataaggacttgttcaacacaaactaaacttacttcataaaatatcgatcgagattgtgccactgcagatctttgcacatattaccaaacctgataacctctccagagaaaagatcgagttcctccctacaggaaaaagaaaataaatcaagaaagaaaacgaaccaaagacagaaacaaatggggataaattataaaacacaaaccttttgtcagaagcagcaagaatttgcaactctgtggtatccgtagaaaccaacttcttgacttcctcggaatgcaacatatctttcttcatgaacttgagattctcttcagacaaagattgcagcaaagcagcacctttggcaatagtattggccacttcaaaagccaatatagtgactttgccaccacgggacgatgtaacaccagagagatacgcgttgctcggattcatacgagtcatgctgctcccgagcgtgtctagaacttcaacagctttctctagccccattaccccagcccgtcccataaacgagttcctctgcataaactgtagaaaaaaacaagaaccaaattctcatcaatacaaagatgaaatctttagctagagaagttgcatatcctaaagaagcctttgaaaacaaaaaccttggtggaatcgttccttaatggaggcatcggaccaagctcgccagaaaagttgaaaacaacctcatcaggcttagaacttttccgtcttgagcctccgtaattatctgaataataagaatcagaggttttacttcttctcatagacttaagtttcccagaaaaccctcttgacttatcatcatcgtttgatctcaacttcttcttcttatcatcatctttgaatacacaagaacaaacacctcccatttgtcttctccaacaagttatctctctggtaaagctctaatcttcagaggaaaacagcagaagagagaccaaatgacccaaaagattcaaaacctgagagaaaatcaagaattgcaactatggtggggacaaaaagaaagacttggtaaaatgggaaagacaaagtcagagcaaggaagagtttttattatacaccattcacaagctaaagaggaagcaccgtggcatcaatttgtttactttgacttatcattttaaagagaagtcagagagacgactattcttacttccttttggaatttttttatttgttgtttatcgaaagagaagaagaccattgttgaagatatctcgccggccttgtgacgtgctttttaggttagttttttttcagcaatctctctctcgttgaatttcttcgaattgcagaagatttatccaatcttatttcgagtatattcaaaccttaatttcaacgctaatgaaaagtataagaggaagaagacagaagacatgcttactcgctgcgacgcggtagtagaggcggtttccggcgccgggaatgtaaccagtgcggtgatcgggagattctggtttatttttgtttgttgttgctgaattgggtgtaccgtaccggtttaattctgaaccggtggaaattccggtttagtccaaggaaaattttggataaactatggtttgttgggaatttagtcatccgatctatagttctctttcgctccttctggattgatcagagtttagttgatttgcttgaagaagatgaagttatgattgaagatgagctccgaccgtcgcagaggtgaaatgctgctgcccaaactaattactattgggccatttttaggcccatcaaaataggactgtcaatatgtaattttcacaaagtaaaaaacaatccttttatgtcttttggaagtgagatttaaattgggtatgtaatttttcagcgtaacaaaaacgacaaaaaaaaaataatcatgttattttaatacataattttttgtaaattgttaatattattatcattaacctactgtttaaaacaaaataaataggtacaatttataaatctgactgctaaaatatattatgaaaatattaatattaatggcgtaaaagattagagatggtgattgttaaaataatttgtgatgataaacaaaacctacactatgtaaaataaagtcaatccacaataactataatttgaagcttttgtcaggtcaacgagaaaaagaagtggttgcgaagacggtcgtttacaaaaatggtaactaagctatggcctatgcctttaaattcatgcatctccttgtcaacatttcaatttaaagctttattatgctatatataattaggatgtatctactagatttttatctataactcaatatcatgtaatttccgtattaacatggtgattattatatcaagtaaaaacatctttaaatgtccgtcgttgtagatgtattttagttttactgcttcatggtgtcttcataaatagatgcggcaatttataacaaaagtagattgtgtgctcgagattgttaattacaattagccatgtatgtcttggtaaatctttgacttgtatagtccattaacaaattaaagaaagaataatctgtatattaactttgatttataaatttcaaggtaatatcacaagtgttctattaaagtggttcaaattcttcagattaagaaggtatagtgaactgaatttccaaatgttcttgttctcattatattgtttttgcagtgtcttttttagtagtgtacactttgataaaggccatattaatgataaacaagattgaaagtacacttatcgccttttttacaacatcattattataaaacattgatctacatcctaacatcatcaacaaattttgttataaattatttttttctcatgattctcgttttaaaacttatctagaagagatattttagcacaatgtaaataaaatatagatatatatgttactacttgtgtgggtgcttgctgcttgagcatgcgagcgtgaagtcttagtattttgaaactttatggcgtagctaacatgtgaacttggtattgttaagtgggttatatcttattttatttcagttcacacattagatatatgtttgaggttacagaagaaaataaataactatacgaggattgtagattaatagcatccaaaaccaaaatttataatgatccatgtgaaaatagcaaccaaatgttttctttaacaaaataaaataaaaaccaaatgttatatatatctatatagcccatgtttgttctattggtcgacatcgaatattttctttagttgcacttaaatcgacagattaaatcggaaatgacccgatccaactaccaaaccaaagaagtgtgctaacatgatatatttatttcggtatcttgtggcaagcattatctacgataagttagtaatagtggaacatgacatgtttaatatgtctcgactcttgttaacaatatttaatacaaggacacataaaacatggaatatggagataagaaccccatacaaagaatttaataaatttattgtgctatcaagaatatttcaagatttgcatgcggatcatgagccggctggtgaaactaggaaattatataaaattattgacttttgagtttgacagatggttgttcggtgtctaactatatcatcaattgcactgatcacatatattaaatttttgagtaattacggaattagtaatactttgtagtctttgtacgtttttcagtgttttatttaggcaactacgtacaaacaaaactaagttcatataaagaaattgcaaccaataacaaaagttgggagagctagcaaccctcaagtaaatcacaaattgtttttttgtcgaagtgaacaaacgtgatttttaaatattttgaaagatttttggtggaccactatattatcaaatggatttttatatggtttagttatctatatattttaagtattttcttcattatcatgctctatttttttatgtaaacatctattttttgaaataatcacctcacatataccatttattattattattaaagtttatatgattaaatattggtttgtccatgtatttaaattccaaatatatatatatatatattttaggagatctaaataacgtgttatatttatatatatatatgtttaaccgtactcttttggcatttctaagatcaactcagttaattatcattacaattagtgttaattattttttattttcttgacatttacctaattttctatgtaaagcacgtttctacacattctattgtagattttgtggtgcgggtaagattcatagcaataccaacatgagaattaattacagtttcatatattgtattgtaaatttcttttgaatcaatcgctaaatttttataattcgtcactggtttggtcataagttattcacaatatggactagccgaagttatatatagttttaaattatataaataggtacaaccgtataagcataataagcccatgaaatgagtctagctctctctctatatacatttatacatacacgcataacacccaccccatcaaaacttggaagtgcatcaattggatggtataaaacggacgtcgtttatttgtttttgagcttttgaatgctttctctgtttgcgcattaaccggcgaaatttctcaatgctaattacacttcccattgaacgaaataaaataaattagtttaagattaaataatacacacccaaattccagaagataaaacatctacgtacacgggtcaattagattaattgtacattcttacatatgtattgacggatctaaacaagaaaaggtggtagatctcttaagtggtgacgattatcttataagtttaagtaaaaactcaagaatctagtcagcagacttctacaagaattaggtcgtttttgttattgcagatgtgtgattattaatctgttatatacttaataaatgacaaaatatcacagtatatgtgacaaacgtgatagttattatcaattgtcagaaaatcatttgagatcaatttaaactaaattagtttgacttattttgtacttttacctttcaaatcattttctccatttgtttttttttcaactgttaagaagaactgtcggtagaggtgttttcaacaaaaataaattagttggttgacatatattttttaatcctaacatggtatgttccttccaaaataaaacaccaaaacaccagttataatttatcatgagtttcttaccagtatgattacaccgcatgtcactaaactcacaaaaaggttacttacattcgtttaattttttttggaaatctaaattactcaattttattggtagagtatagctcattaactaaggggaacatattttgtttcctatcacatttattcgtcgattttccaccagaaactgcttataaaatgaaacacatgttttagaaagacacctattcacaaagtagtattaatgttgattatttttttgttaactaggggtaaaaattgatttttcaggatgactgaagcggtcgagtagtccactcattaaatttttgaatggacctaaagcatggtactagatgatattttgcacacaaaaagaatttacaaaaaatgtatatgatgttatttttttttaatttaatattaaattatttttaaagagaaaataaatgtttatacatgattaatgcaaactttttttaacttttggtttaaatctattcttagcattgtcttgtcgcacaccaagtttagatgcatcccgcgagcgatgagtttcctccctttgtaatagtgctcacccgattacgtacattcttgtttattaacttgactagcttttccggtgtagattattgttctccgtgtcatctcttattccgctcccccagatggcgtgtatggcattctgaaaagtatatcccagcaagaatctctttcttttgtttaagtctctacttgcaagaattttcatcacgacttcccactttttctaaatataaatgatgttagacgatcgatatttgaattaagaaagtaattcatattaagttaatttatgattatttccttttgtaacaattaaataaatggtggatgctagtaaaactattctcattggtgatattttgatcgtgtctttaaaataaaaataatagaagaaaatagatgaagtgtctttaaatgagtaataatgtctttacaaaaacatttctgacctccaaaatagaagatgtttttaaatttaatcttaatttatttttaaaatatctacacagatatgaccaatgtggatgcttttagactacctcgtcaattattaacaaagacttatgattacatttgcagttgcactctctctctctcgtctttcaaaagtgttctaattaaaatcctcaataatgtcattaagaatctaattcttaaatcaaattcgtactctcaatagttttctacaactttttctaaccattggttagttggttatgttttctagttaccactgaccataatatttcgtgagaactaaattaatctatatatgtatatcgcagtgtggtcaacaatgtctcccggtaaagatcagttttttttaatactcaatcaaaatcaatcaatcaataatgtaattttctattgttttattccattactgaattcacttagtaatttagagaaaaacactaacatgcattcttaccatatgaaaaataaagcaaaattccacaaacgaatgaaattaattcgtacgacttccactcttaagttgaatttttgaggtaaaagtgattcactatttgggtaagaatatatataccacttggagtcatgtttatttatgtatataaatgtgattatatcaaaagatacaagtgtgattaatagaagtgtgatagaatgatcagtatatgggccacatatgtcattgcataattaatctttaggcaatgtcgttgatgtcactttgttctttaagctaaattggccacaaatactatcaatcactacttatcttaccatttgtttaggtgacctttacactaacaccttttattcacacaagtatatgtgtatcgtgttttacactaacaccttttattcacacaagtatatgtgtatcgtgtgtaaagatcttggtagagatgttaatgatgggttaaaacccactgggtattcaaaacccacataaaattttaagttcataaatctattttttctgaaaaaaaaatacaggtttaaaatgggttgggtacccaaataaataaaacccatatgggtttacctcattgggtaatgggtacctacgggttttttaagtcctttttcaggtgaatcaacattttctcgtcaaaaaagatttcacattttttcgccaaaaccgcgatttaacagtttaccgccaaaaaagacattcaacatttacccgctaaaaaagacattcaacatttttccgccaaaaacgacaatcaacattttcccgccaaaacgcaattcaacattttcccgccaaaaacgacattcaatattttctcgccaaaacgcaattcaacattttcccgccaaaaacgacattcaatattttcccgccaaaacgcaattcaacatttttccgccaaaaacgcgattcaacatttttcgccaaaaatgatttcacattttcccgctaaaaacgcaatttaacatttttccgccaaaaccgacattcaacattttcccgccaaaaaggatttcacattttccgatcaaaaacacaattttaacatttttccgccaaaaatgatattcaacatttttccgccaaaaacacaattcaacctttttctcatcaaatatatatgtaatacagaaaataaatacaatttaaaatatatttataagcaaattatagatacaacatacatataatagtatattagcagttaaaataaactctaagaaaatgacaaacaccaagttgggtacccacgggtagtctcaaaacaatcagtttttttcgggctttacccactaaatcaaaaacccatctgggttttctaaagttgggtttttggtgggcaggtttattttgggttcaggtcgggttgggcttttttacccaccacaacatctctagatcttggagtacatataccatccagtttagttagaatatattattatccggttcaattgactggttaagttagaacagttctatataagaaaattgttttacactttactctttaagaaataagaatcgaaaatcttaacaaacttttcttaatagctcagctcaattcttattttgtaatatggtatcagagtcaggtttcaatgtgtctcgattgtagaccatccgtggatgtccagtcccacaaacttcacgtttcagatgtccagtcctgagcgtgagggggtgtattagaatatgtcctacatcgagattttgataatttatggagcaatatataagtatgtggtaaacctcaactcttgagctagcttttgggtatgaggtagactcatactaatatgaaatcatatttttatcatctgttagaaaacactagtccttttaggaaataccaaaatctacaggatgtaaacataagggatagtggagaatctatttaaagtgaaatggagttggtaaattgaggcttagtactacataggtcagtttgttgacttctaaagtggctttgcattcacaagtatgaatggtcaagcttagcgtttggtggtgcgatcaataaaagattaattatcattagtattaatgtattatagtatcactatacatctcttattaagtgctatacatcacagatacccacaaaacaatttgtaactcaatttaaaggtagtaattttttataaagagatttcataaatctaaatgaaaagttaaaggacagaaagtaatcaaagttgaaccaaacaaccataagaaagaagggaatctggttattaacatagctaaatttgttagttagtgtattttctagaatccaatatttatatatatatatatatatatagctaaataattgatgatttttgaaagaaaattttcctaaataaaactattactatacctccccaacatcaatccggctaatagttacttaatttcatgcttaattgttgataaaataatattttgtataagttatacatacgatcaaaactaataatacatataagggtttttaatatataacaacgccattctaaaaaaattgaggcgacaacaaatatattctacggactatatagttttgaaggttaaaacctatatatacttgctaggaaaaaccaatttataatatttcgaatggtgtaagttttttttccaagtaattaagtaagagttgtaggctttctatttatggatcatccactatttttctacttggccactcactataaacgtaaaacatattaaacgaccaaaagtaatttagattctatcttaagagttaagactacactgttacataaaatattttccactcttaaattttctttctttgctaaaaaatttaaagttgacaaaaatatctaaaataaaccataataactataccatttagttacagaatatttttgattgagtaggattatgcaacttaagacaactctctaagatttattgtatattttattcaaatataaattgaagaaaatatattaaatttttgagccacaattactggagatggtggtgtcagtatctttgaaataatgaagaaattgtcccctctaaagttaaaacccacaaattatgacctactttcaaacaccatatatttctccataaacttggggtcttaatcaattaattataaaaacagattgtacattaacattttccttttttcattgacacgaaaattttagaaagaggttatccaatgtcaataatgtttcatttcagattcggctcaaaaatagaaaaatatacaaataatttgaattaaatataataatgactttttcttcgaactcacagtacataaggcaacaagtgtcagatttgatgcatagagataatagcatttttcgtagtttttgttaaatataagtataatacaacattccaaatttctattacagatttttaactggatcggataattagatcggcatatttttcaagctttcagcaaaaacgatcaccctaaaattattttttttgatggaatgatttgtttgaggatattgaatatatacactccaattccaaaaaggctataaagtatgaattaaacaatcaagtagtaatagccattattaatgattcgaaaatggtaaagaaataattaacactaaacaagagtcaaaagaacatgacgtaaatattacatcaactttacgtataaaccccttccctctctctatttaaacccaacacatacatatgaaactcctcaacaaacacaaaaacctcacaaccactaaacaacacacaaaaatggcgtttgtattaatgaataacacaaacgcgtttcttgtaacgctactattactatccctttcttacattccattgtctttttccacaatccaacaagacttcgtgatgtgtctagtcgacaactccgacgcttcctttccaatggactcatcgttcttcactcacgacctaaacgcctcttcctttaaactcgccttagagacgtcagctcaaaatctccgttacttgatgccttcaaatcctaagccagagttcattttcgagccgctttacgaaacgcacgttcaggccgccgttctttgcgccaagaagctgaagcttcacttgcggttaagaagcggtggtcatgactacgaaggcctctcttacgtctcggagatggaaacggcgtttgtgatcgtcgacttgtccaagcttagacagatcagtgttgatatagaaagtaacagcgcgtgggttcacgctggtgcttctattggagaggtttattacaggtaaatcatatgttataatcttctttttttaaccacgtctacaacgatttatatattgccaccgagaaacgatttaatattctaagctacaccctaaagttttaaaatatttgatttactttatatagtacaagatatacttatttatgaaagaaaaggaagaagttacattcattcatttcaaacatattcgggtttacgcaaaagtatgaaattttagtttctttggggacattttccacatttaggctttggtttggttaagctgaacaatttaaattttttaaaccgaaccaatttactataaaacaaccgaatatgatggttaagctgtggttatgacccggttcttctttggtttatatttcatggtttttaaggatccaagagaaaagcaaaatccacggttttccggcgggtttatgcaccagcctaggcatcggcggtcacataatcggcggagcctatggttcaatgatgcgtaagtttggtctcggagctgataacgtcctcgatgctaggatcgttgacgctgacggcaaaatcttgaatcgcgcggcgatgggagaagacgttttctgggcgattcgaggaggtggaggaggaagcttcggcgtaatacttgcctggaaaataaagctcgttccggtgccagagattgttacggtgtttaccgtcacgaggacgcttgagcaagacggaactaagcttttgtacaagtggcaacaagtcgctgataagctcgacgaagatctctttatccgtgtgattattcagccgacgagcaaaactccgaagagcaaagaaagaactatctcgacttcgtaccaaggccaatttctcggcgacgctaatcgtttgttgcaggtaaaattaatggggtcaaatttaaatttcgtaatattaggggtctgtttgttaatttatgaaagttaatggttatgataaattaaggaaggaaagttttgattatgacaataacaaccccgggtttgtttgacaggtgatgcaaaggagtttcccacagcttggactaacgaagaaagattgtttagagacaagctggatcaaatcggtgatgtacattgcaggttttccaagcactgccccatcagaagctttactcgatgggaaatcgttgttcaagaattacttcaaagccaagtcagactatgtggaagagccaattccagtagagggattagaagggttgtgggagaagcttctagaagaggactcaccattgactatatggaatccttatggaggaatgatggcaaaaattcccgagacagagacacctttcccacatagg

SEQ ID NO: 66 - DNA, 73805 bp, Arabidopsis thaliana
aagctttactcgatgggaaatcgttgttcaagaattacttcaaagccaagtcagactatgtggaagagccaattccagtagagggattagaagggttgtgggagaagcttctagaagaggactcaccattgactatatggaatccttatggaggaatgatggcaaaaattcccgagacagagacacctttcccacataggagtgggacattgttcaagatacaatggctgactttgtggcaagatgggaaaacaagcgaggcgaagcatatggggtggatgagggaaatgtatagttacatggagcagtatgtatcgaaaagcccgagatccgcgtacgtgaactatagagatcttgatttggggatgaatggtaaagggagtgatgcaagagaatgggggaataggtatttcaagggtaattttgaaaggttggtggagattaaagctaagtttgatcctgagaatttctttagacatgaacaaagtattcctacagaacttgagtgaatttggagttagacaagaataagagtgtggtttaagatttctcttaggaaagacttgttacttgtgtttttgtgcttttaaacatggccaacacacttgtatttcaaaattgttatccaatctaatcccttatgaggtcttagaagtaatggcaaatttggctaaaccaaatcaaatcatatttgcctataaatgatgatagtttggtttaatggcaaactccctattgttccaccacaattccctatttaaacacacctcttttaaacaatagtgataggatactaccttgtagaaaatatgtatctagaaggagatattcatcttcctaatttcctccaatctttatatttcatcccaaagaaagaaaaaaatgattgtaataggaaatagagaaccaattttgtacagacaaactacggattgaccctgtataccgtatactgtaagacgatttgttttttaaaatttgttatttttaacatatatgattatgtgttatactatatagtaactcgcggtataccgcaagcctatatttttattttcaaaatttacatttttgtttttaagatgatatataaatatatgctattattttgtttaatttaaatgtatggtacaccgcaagacgatattttgtaactaaaattttaaaattttaagttgtatttgttttgttaatattgtttattttgtctagtgtttaagattgtataagtgtaattgattgttaatttcacccgaatatacaatcatgtattaatatctacctaaatccttcaattttaggatttaaactgtagtataaagttcaaatgtgttgtccaaaaaaaaaaaagttcaaatgtttataatgtttaaacttcttttaaaagaatcaaaatgtgtttctttaaaaaataagttgaagttgtatttgttttgttaatattgtttgttttatttagtgcttaacattgtctaagttagatgcattgtcagctcctcattcgttgttccatgttgtggacaagagcatttcttctcaagcctcaccgtattctgctcaataacactcttatcctgttgttggggctcaataacactcttatgcagatgatgttgcagtacgtaggtgagtcattttttatgtacaagggaatacatataataactaaagtgaatgcagattccgtaaagaatgattggtcaaacgataccttcttgggtacttgggataagttaggagagtaatcatccaatctgcaaggggaatgaagtcatagggtttaaggaaaaattggtcttttcaccaaggatgatctcaagaccgggtggtaccagtacgagtaccaaagaaactcgatatcttttgaagaaatggttgtatgtcatctagtatacgacgaagagaaccttgccattgaggatactgaagccattgaggatactgagaatgaagccgaggagggccttaacgttgaaaattttgggactgttcacgtagatgatttgcttggtcagtatgaaaacctggacatttttcgtggtgatgagcagttccttatcggtctaagggaatgtcgacgtcgatgatcgacttgatcagaccggaaaagatctggcttgatggatggatgatttgctctattactaaatactccaaagatatatagttggtacaagtgtgtttgtgatttagtttttttttttagtttgagactttgatacttgtccaaactctgtttctttctttttgatcaatttgggaaaagatcttgctctttaataaaacattcactagatgatgagtgtattaaggtaaatacttcacttgatgttgcgtctaaaccaactcttatactatgtgggaaagatgtctttgtcatagggatttaaattggagttgcgcctttccttattattctgatcccgagataaagaatagctcgtctttttcgccatcattcctacataatgattccatataggccctgtctgtttcatcatttatcatttccattcagatgatccacttacatgattcatttgaatgatacatctgaatgatgtttgttttactatttgtaatttaatctaaatgatgcatttaaatgaatctttatttgtttgatcattttgtagttcatccatattctcatttagataaaaatgactaaaatacccatgcttttattttgacaaatgacaaatattcaacatcattacccattatcaatatcaaacatattggcgggaaaatatgattttacggttttagcaaaataccgtttacggttttggcggaaaaatatgattttgcggtttcgccgagaatacacgattttacggttttggcggtaaaatatgattttgcgattttggtgggaaaacatgtgtttgcggttttggcgggaaaacataattttacggatttgcgaaaacatgattttagggttttggcgggaaaacatgattttatggttttgacgggaaaaacatgattttgcggttatggcgggaaaaacatgattttgcggttttggcgggaaaaatatgattttgcggttttgacgggattttgcggttttggcgggaaacatgattttacggttttgcggaaaaatatgattttatgattttggcgggaaaacatgattttgctgttttggcgtaaaaataagatttttgcggttttgacgaaaaataaattttgcggttccggcgggaaaatatgatttttgcggttttggcaaaaaaacatgattttgcggttttggcgaaaaatataatcttatgattttgacgggaaaacatgattttacggttatggtgagaaaatatgattttgcaattttggtgggaaaacatgattttgcagttttggcggaaaaacataatattgccattttggcgagaaaatataatttagtggtttcggcataaaaatatagttctatggttttaggtggaataccgctttctataattttacatcaaaaattatgattttgcggtttttggcaaaaaaacgcaattccacgattttacgattatgacataaaataataatccgtgatttcatgattttttagagtttttttttgtttcaatatataattttaaaaatattatataagaaatctataaaaaaaaatattatttaaattatgattataaacaagagtatatctgtcttttgttatttttgaatgaaccatctccatccaaatggttcaaacaaattcatccaaatgaatttcattaatttgcctaaattttgaaactcattcagatgtatcatccagatgattcatccaaatgcttgttaaattgtcataaacaaacatcattttccatctccatttggatggatcatttggatggagaaacaaacaggccatagtcaccggagatatgaacacaattaataacacacatctcgtcagtcataagataacaattaacaataaactggcttgttcaactcttctcttacattaggatccttgacatgataggatccttaaaacgggcaatactctctacatgttgaggtgcgatgcggacatgacattcaccctcgtctacgaatccggaacagcgcctaaattcttcatcgtctccaattcctaagagcctaactcttctaatgtttgttgtttcaacattatagtagaaaatgtagaaggtcgattatcgagtgacaacaactttggagccataatgatctcaccagccttgttggtgcctggaaaagacatttggatatccccaacataatcccacgcgacagaggagggaaacacacatgtttgctttgaccattcatgtctctcaacgtcttctagaatccataaatcaaaactatggaaacgaccataagggaatctcacaatggacctagcttccctttgtattctatgaatattgcttcatacccccattgtaaaacatcattaggagctttgataaaacttatcttctcagacctaacatcaaaacacaccaaaactggattcataggtggggttgggctataagcaccatagtagacaaaaccatcgatgcttactcccacagttaccgggctaaaaggcgcattggtaacttcaatgtgtctccatccttgaccacctccccctagtgttaagaccttgtgctctagatttctctttctcgacggcacagatacagacaatgctttttgttgatcatcaatcggatcgtatcccacgaatcgagtgttaacaggaaacttaggacatctccatcagtgagataccttcttggtttctaaaaaaaaaaaagatattagtattttaataaatattagttatataattaaattttaacaataaaataatatttgaccaatagatgatatacaagtgttcttatgggtttcttagagtttctcacttgagagactaattctactctctctcatactttttgattatattttatttttatattaaacagtttctcaatgagaaaccattgatggagatggtcttaatgacttgctccgtgctagggttacatatcatgtgccgaaattcagcggtaacagagagaaagccatggacagagtcacaagaccctgagtggaaactaaagctcatttatggtactgcaatctcgaaatgaggtaccaaagaagaagcatagtctccctcatgtgaaaacgtgaagaagaagataagcttatccttaggcttattgaaaaaaccattactcaaagcgactacaaaccgtgattgcttcgaggacatagtgaagaaggaatcgatgaatctttggcttccgatgatggaagaccacattttagagacgcgtttgaaattcgtaagagacttggcagacaatctagtaagtataaccatctttagatcaaaagggagcgaatctaaatctatctcacttgggtttgtgtctttctcattaccatctccaaagcaaacctcagatgattcgactcgacaaaggagtttcttcaacctaaacttggaaggcaatctaaccgtctttagatcaacagggttcggatctaacttacttggtctgttgcagaacctgtccttgccttttacggcggttcccgacgaaacccagaattcgactcggagaagattggatttgaatcgcaaacacctagatttgagcgacaaccgcaaagagctagatgtgtattcgacaaaggaggttcctctttttttaaattgggtcttcttcttcaaggagctttttttttttttcgacacaaaatccgacaaaactcattgctagaattgggcccaactactaaaagcccaaagcaaaagaatggggacgactaggaaaaaaattaattaatgagaagtgagaacatgcataattgaatatggttaaatacacgtttccaaaaaataatgagaaacttggggatctttttctttagcatggtgataaactttggaattttttgtttccaataaatgatatttttactacttaatcatctctaatggtatatattacgttaaatatatatattctaactttaatttatttattgcttgcttgaaacctacgtaagatttaaaattattaaatgatacaaaaactttgaaattcaaatagtagttttttttttgcgaaatgagtcttcatcatgagtgttattggtttaagcctttacggaaacacttgagggatgcttggggtagaaggcatccaattagcggactcatcaaatctcggagcgaagccttggtaaggagcagactgatctacaaatggaaagggcgggtactcggggagtgaaggccaaaccggaaccggtaacctaggtttctcaaaatcaggaaatgccggcggtggaaggagaggcacatcaggcagaggcggcgctaggagaggaagatcaggcggaggcggtggtggcgccactgcttcttggaaagaagggaagtcagggaatccaaggtcgtggaccggtgtattacgaccagaagatggataatcgtcggctccaatctgagctactttagcgtgggatctctgtagtcgtgaagaaaatgtttctttgggcttttggagtatgaagaaactcaaaaagacgacgtatctaagaacaagtgaaagtgatgccattgtatttagtgtgtgtgggtgttgatgtttagtctttttcgtaattttagggttactgaagattcaaatttatagctttgaattaattggttgacaattgtaaaatctttgctattatttgcattgtgttcctacttttcaccaaagcatatgctaatacttttttattcaaagtcaaacgtcatgtcaacgaggagtgttttgaccaaagatcaattttgataaatcgaaattattaggtcaacggcaacgaataagaaccttttcgtacacactatatggtcttgttttgattaatctaaaccaaaccgattaggccaaaccgattagggaaaataataaccgatccttacgatcgtgtcaaacaacatttggttttcctaacaaacaattcaaataagtactgaaactaattagcagtaagtgtttctttcaaaaaagttaggacatacaaaattcaaattttataatagatgtaaatcaactaaaattcaaactctttcttctttctatctttttttttttttgccttattgataaattacttatgtttgatagtttatatttttcataaagataaatcaaagctatagtttggacaaaatcatattgataaaactggttaaaaagaaaagatcattcatatgtaattttttcttagccttatttggtgtacacataccgtgactccatgagtggtactgttgttcctgcagagccatatttcccatttgaagatcgtgagagtggcaatagaaactagtgaagatgtggaaccgccaaatgagagacttaacgccaaaagtgaatttgttaacataacatataaggacttggccaaggatcagaccggtgaccatgttgaacacaaagctatagttagaacttacaaagtgccatcgatgagctttcagaatacttatctctcgagggtgactttttggagtggagaaaaagctgctttctgtatgactctctagagcaagatttaataagtaatagtcaacaaataggaattcatatatcagcatattttttctgccatttgaacttatttcaataattcttttagttgtttccataggtgcaatttatgtggctcgtcaataaaaaaaattattaaagacgaaaaaaaactttgtgtatatagatgattttttccgttcattcaattaaatttgattgaatcctatttcatattttaaggatcaatttttatatttaatataaatttgaaaaaaaagttttagtacctaaatgttgttttattcgtactttttttgttatattctagttgatggaatccagtgaattatttttcatattgaaatgaatcaaaactgataaggagttgttgaatgatactcagaacatgtacttgttttgagtgcttatttatttttaaatagtctttacggattgatcacaagtgaaaatatggttagggctcttatgtgtcttgaatacttgcttctgtttcctcgacttttattttgactctacaatgtcatgtttttacattgatttttatgtactataatttgcttttcaggtatgaacggccaagttataccaaaatggtttcgagtttctcccactgacgaagaggtcataaggttaagccattaggtgtaggcgctttccaaaggtggaatcttctagttctcacgatctactaaaagtaaagttgagcacccggaccacttgcattcattcggttctcctctcagttccgtttagctcttattcctctttggaagcgggccgtgggagcatggcgggagacaaagtccggaactgcgggaggtgactgtctcatgaaacacctatacgtgtatgatcatcctgatttgctcatccaccaatcgagagactactttcacaaaggagaatattggtacactttgtaaccagaaaacacaaaggaccatccaacatgatgaagcgaactatgggcataaggaacaagaaaaggggaggtgaatgcatgacaagaagattgagattaaagaggaaggtcatatcatcggggaaaaacaaaaatttatattcagagacaagcaaaataggcattgtggatggcaccaatacgaacatcgccttccttctccccagtttctgctggctgttagtcacatgatctataaggctgaagatgatgtcacgctaactcaagctttcgatgaactcaaccacttatgcgtacctttggtgaagctccagccacttatgggcattgatgcagctatgaatgaaccggaagtaaaggtgaatccagatgaagatgtagaaatactttagaagcaattatgaatgacttccaacacctattgtcaacaaacgacatggagatagatgcaccgtgatcttgttggtttccatcttggcctcagttttcctttatagattctcccgagctttacaaatttctcacatgcttgttatctctgactgttatacattccggcagatcttcaatctgttttagagtatatctcttctttttttggtacctgaaactcatgttttagtctttcaagattctcttaaactaatttgttttttcaaaattctgtttgtacataatttctagtgcatatatggtcttcacacaacaattaaagaaactgaagcattaatctgtagaatgtcaagatcaatgtgtaatattatgggattgcatgcattagcgagttttttctttttttttttcaagtataaaacctctataaattaataatgttgggccacattctattaatttatagatgtattaatttattaaattattaatttagagagagttttctctaattttataacttttttaattttctatgaaaatataagatttctttcgttatatctacatatacatttttgcagccattttgtgaaataaatcatgtagttgggacttatttacgatgactgccactagattttttttttgtcaaaacacaactttcattcattaaggcctcaagagaggaaagttgatacaagctacgataatacaacagaaagaaagatacaagttccatgagttttccaaagggatgttcacttttaaaaagtttgcaatggttgaaaaatttgttgaaactatagcggattcgaccaagaagacgagcttcgcgaaatcctcgaccaacgggtggtcatagacggctcgagcaaacaatgcatacgagcttttagaaacaaattccaaagaggaggctgctggataaaaaagattgagaatactacggtaaccacttttccatggaaatgcggttataatgccgttcttcttcaagcttttaaaaatttgagaactatccttgaacttgatgatttgcacatgaacgagctcgataatcaaaggaagcggggatgaagagttgaaaaagctacggtaatcaccgctctgtggagacgggatcatagtgccgttcttcttcactcttttggttttatgaaaaatctctctaggtgcttcgaaaggcagggttctcgagatataattgtaccaacaaagcaacattgaccgaatatgttccaattgttgtccatgaaaaactggtttcaaatatcgacaccaacgttggctaataatggacaaataagattttcgattaaacctagatttttgcagaaattgattaggatcacacctattggagttgggcttcaaacaccttaaaggcccaaataaatgaatttgccaagacaaggaacttgatgggccgaactggaataggcccaaaaccgaaaaccctagttttcttttggcatgggcgatgagactttgagtgtggcggctagacgacggcgagcagaagatcggagttgaaagagttaccgccgagggatgtggcactggaggagataaaggcgagagacagcggtaccaattggtttgatggattagggttgatccattcgtcgacaacttcgtcactgggaccaacgattctaaaacccaatgagaacgttggtcgatgagggtagcggagcagctaggcttcatggatctaggcgcaggtgacaggttaagctcgagatcaaccatttttgcagatttagctttcaagcatctcgtcaatagcacaacgggataggtttcatcaagagtatccagcagattagaggaccaaatgggagaagaggttctgggcagcctgaaaagtggatctctgaccaccaaaaccgaaagcaaaaaggaagcgctgtggtggtcgggagagtgacaaaaggggacaaagagtttgcgagatgcggaactgagacaagagaattggaggagcttaggtacatcccgacgccggcgagcaaaagctccaccagcgtcggaaaatagattcatgaggatgtcttcgattttcgtgcttgggagagttcacggtttttttttctcattttcttatagcttttctcagacgactgccactagattttaatgtttgtttttgataattagaaaaaaaatcttcgaattaaatatttgacatttaacaatcttccctaaatctctccacattaactacacgattaattactaaaataaaactttcaaaatatttaatatcatttaattactacaaaattatcatttttgatattgcttttctccatgactataataattcgattataatcatcaaaccgcagagatatttgatagcatttaattactacaaaattacaaaatatttagacaataattcataaacatatcataaataagatcaacattaataatataaatggtttttttacggagcgggttggcgggacgttacttaataataattgtaaactataaaataaaaatattttatagatagatataatttgcaaacttttatgtatactaactttaaaaaataaattattctcgcggtgtaccgcgggttaaaatctaagacaatatattattagaaccaattacaagttcaaaaacaattatcatgtctagaaaataacaacaatttttttgatatggtatacatattagttttaaattcaagcaagaacgaatacaaatttaaacaaaagaaaaatactaaaattatattttattaaagtttctcacatataacacatttatagttgatatatatatatatatgtatatataattattattttatgatattaatgagaccttaatgtttacatagtatttattgatttatcatttttttacattagttccaattttgtaccaattttttttattaatttataaagattattaatttattgaatattaatttatagagattttactgtaataggtctctcctataaatgaaaaggcttttacaagttttcataggtatatccttgatcctaagtccatggatttgagttctgcaaccttataccgagtaaatttgcaacactgatgtgagaagataaaaagacacaaatatgactatatgggcttcccacccgatttgagctttccacccgatttgagcttcgaccaagtaaagctttttgagcgaagatttcttttaagtcaaacagagcacgtacttatgtttgtgtctttatctctctgatctcatcttttacaattacaaaacaaaacaagtaaaagaatttgaacgaaaatttgggttcacctctaggggtgagcccttatattcacctccttttgcattaaccaataaaaacatgtcatgtcaaatcctacttaattacataataaattaaagctataattataaatccaaaccgatatataatctcgtttaattacaaaatctaaaccctaattctcctttgtaaattcaaaccgccatttaaactcatttaatcgtaaaaaaaaactaaactctaatcatatcttgtaaacccaaaccgacatttaacctcatttaattacaaaatctaaatatgtttataaacctaaaccaatatttaatccgtttaattataaaatttaaactctaatcgtactttctaaacccaaaccgatatttaacctcgttttctaataaaccataatttcgttttagtagtaaattagattttataattaaattaaatttttattattatttttaagtgccaaattttaattggttaaaataaacgagacgaatataagggttcacccctactacttttcaaagaatttaggtcagccgtcatcatgaaacgtcaggagatagatcatatcccctttgatctaacggtggagattctcaccagattaccagccaaatctcttatgaagttcaaatgcgtttccaagttatggtcgtccattatccataaccaaagcttcatcgattccttctactccatttcctcaacacgaccacggtttatagtcgctttcagcaacggttcatttcccagtgataaggagaagcgtttgttcatcttctcgtcctcacacgagggacatgaatcttcttcttcagtgataaccaatctcgatacgacaataccttctctaactgtttctaataaccttgcgtcacggtgtatttccgtcaatggttttatagcctgttcactttacacaagattcacgatatgtaaccctagcactagacaagtcattgtcttaccaatcttaccctcaggtcgtgctccagatatgagaagcacatgtatagggtatgatccggtggatgatcaattcaaagctttggctcttatttcttcttgcatacctaataaagatagtactgtagagcacttggtgttgactctaaaaggcgacaagaaaaattactcatggaggcaaatccaaggaaacaacaacattccaccttattcccctgtgactatgagagtatgcatcaacggggttgtgtattatggtgcttggactccaagacaaagtatgaatgcagtgatcgtttgttttgatgttagatccgagaagataacttttatcaaaacacctaaggatgtcgtaagatggtgcaatgattcaattttgatggaatataaagggaagttagcttccattgtaagaaaccgttattctcgtttcgatacttttgatttgtgggtgttagaagatatcgagaaacaagaatggtcaaagcaaacatgtgagattcctctctctgtgtgggattctgttgagaactttaacatgtcttttccaggtattaacaagtttggtgagatcattctagcaccaacatgcttgtcaggctatcatcttcgatccttctacattttctattaccatgtagaaacaaagaagattagaagagttaggcttgaaggaattgcagatgatgaaaattttaggcggtgctatggaattggaagtggtcaatgtaacgtctttatctcaccggaacatgttgaaactataaggtttctgtaatgtttctttattcaaggatatgtcatgtttgcttcttttgtttactcacatgtatgtgttgatttctaggtaccaaacaaattggtttgatactatgggatcttgaacaaaagaaatgatgtgttgtctaaaacaccagtgattcatatttaagttggatgtagaatccttgctcaaaatttatgaaatgttttctcttctctttgctctgattctttcttttaatcgttaaattgattggaaattttttacatttttatttgcaaccaaaacatttttccccaacgtatggacacagctgagtgattgtccttttaatataaccttgcacctcaaagcgcctaaggatgttatttgctgggaagatgaatcaatttagatagaatacaaagggaaggtagctttcattgtaagacacccttatgctggttttcaaagttttgatttgtggatgctagaggatgtgaagacacatgattggtccaagcaaacatttgagcttcccttctctttgcgtttgggtacaaatgtgacttccccgggcaccaacaaggctggtgaaatcatttttgccccaaaaactctgtcacgcgaagacatcagaagagttaggctcctaggaattggaaataatgaagaatttaggagccgttatggattcgtaaacggttgttacgtatctatctcacccgaacacattgcctctttttaacgtgtgttctatgtattacttgaaggatcttaatgtaactatgtaagagcttgacaaatttgtgggtgttttttttgcaatcaatatttaagcgctttttaacatcatgatgatttgcatttgctgacctatgggaatcgttagtgttgctctgtttttattttcttttctaaattttcaaaagtatataggaatactacttttcgttcgcaaagtgattgattacatatacttcaatgcttcgcatgtcactggattttcactgtgaacagaagactcatcagtcatcatcaactaggtagtgtgtggagtcgtttggctatgtagggccaacccttggctctagattcgtctcattagtgcttggctaattgggctattctttattttgttaaaccaattaacaaaaaaataaaaacaaagaaaaatcaaattagcttgttcctattgcaaaagttaaaaatttgcaagttaatgtcaatgtatccataggtttacacatacatatctacctctatttataactaaactatatattttcttgcagtactaaatcctttattaaaggaagatcgggttttaatattactgattaggtttcactgattatgaattttgttgtttatatcctttttgttgtgaaatgcaacagctaacatgcacccatgcacatgcgttgtagttatccttattttttctgcatttgatgttacgtaaaacaacaacaattaatatttctcaaatggtttactttaaaaaaaatcatatattttatcttttaattattgttattataatttacatagctccacagaagaacgtttttatcaaatatttgatatgttaatgtaacattaagttgtattccactcttgccagctaattatcattagggtatatctatgccaagtcttggcagctcgcaccatcccataagaaagaaaaaacattttgagattataataaagttatttataaaatgatatttattacatttcctaaataaggtgaactcgtcatgttatatattccgaaagacaaagcgaaaagttatgatgtgtaatgaataaacaaacatttcaatggagaatgatgtgtttatacaaatatatatctacaaactacaatgaataatttcattctcttatggcatatggtgctataaacaaacacacttaccacgcttgatcctacaacacatgaaccatggcttcttcaacccactcttacttcaccactttagcactaaccctaatcttgatctttcgtctcataccagaaaccaccgcatcacgccatctgaatggaaagaatccggcggtaattggagttaccactactagcgagaaatacattgttcctacgccgttaccaccgtttttacgaccctttttcccaccgttacagtttgccgctgcaccgttcggagggaatatcccacaaccaccgttaccttcaccacctccaacatttctaccgtgtctcccaggtttcaagtttcctccctttcagtcccgaaagcctacgccgccgtaatcgtatatacgttgacggcatcaagtctaaaactgtaatgaaatattaaactatctactttaatgtattatctatctctatatatcaccgttgatcatctataaataattgatggtaatatcatggtatgaaactgtaataaagatcactggtgtagtaattaataaattgaataaatactatgttagatatctattagttttccattgtttcgaaaagagatatcttacgttttgattcaaatgagtttttaatttatgtccaacaatgttaaggagaataacaaacaaaacatgattttccaaagttttgatttatggatattagaggatgtgaagacacatgattggcccaacctaacatttgagcttcctttctctttggggtcgggtacaaatatgactcccccgggcacgaacaaggctggggttgtgttcaatattcataacgagtagagctgttttgacagtagcagcagataatgcattgtatacggcatgtaagcaattgtgttcaatattcataactatataatcactttggtggtggagaaatcagagagaattgcaaaaattcaaaggtggttccttttttttttttttttgctctcttctggccttcaaggagtctccttttcaacacaaagtctcggttttatcacttaaccaaaccggaaaaccggtttaactaatccatcctcttaataatttaactaaagaggtatataaataaagaaagaagaacagagttcttcttcattgttgaagaatcctaacgaactcaaaaagattctctctcattctgttacaacttcgccgccgatttgaatctccgatggccacctcaagccatctctttctcctcttcctcatcaccaccgtcacattcctcacttccgccgcttctccagcgtatctcacgtcccaagatcaccaacacgccgacagaatcatcgaagcaatgatcggagccggagatttccgtgactgggccgcagattttctctccgccgtcgatgaccaattcggtatccctctctccgccactatcttcatcccaagcgatttcgactccgctgatatctcctcctcctcttcctccaccactggcaacaacaacgctaatccccgtcgtctctccgtcgcttaccacatcgtacctcaacgactctccttcacagatcttcgtctcttcaaaccactctctcgtcttccgactcttctccccggaaacacaatcgtcgtcactaacaactctgttcccggttacgcactcgacggcgttcttgtctctgaaccggatcttttcctctcttcttcaattgctattcacggcgttgcttcgtctcttgatttctcacgttacggcgattttggtaccggtgatactactttagctgatagtctccgtccttggccttttcagccttctagtcgccgtcgtcatcccgatggatccaacagtgacaccaatcaaacctctgcttctgcatccacagtacatttctcaactggctcgttcttgcttccattggcgactctggctctgttctgactcaacattccggcgactttttccggcgaagtaaccgtcaagattccactaacggcgtgaaatatctcttttttgtctttacaagattttttagactcaaagtctaatttttttcaagattttgtgaaactctgttacataatgtaaagtttttcacattaagcaatagcaaattttcttgatttttgaaagaagaatttctattattatgacttttcttttctagtttacacttcactaacgctaaggttaggttatttgttcttgctatgataaataagaacaaaagattatgaataataaatgcccccaaaacaaaaaaaaaaaatcagaaagaaatttcttctctctatctatctaaaagatatgtcattgttgtttctgttgttgttgttggtctcggagttggtacagtcttttttgtttacatcaaatctactccgaaaagttttcctttggttaaacttgcggaacagtttgatgatatgaagtgatcttttgagtctgatgaagtttggttcttgtggttccagtactcaactagtcgatggtttgggtcaagagcttcaatggcctgtagagaagcgttaagttgtgtaagagttaacatcatgaatagctttttaatgaagaagaacaaggcttggatttagatttcttacctgaactatagagggtgagaggaaaccaaacatttgaagcccgttgatactctcaaactgtggtaaaataggaagaccaagacttgttgatgtatctttaactctccgcatcaccatttcccagcattgttgtgcagagacattgaagaagctctcgtctggagattcttccagagtaaccctgaacaatggacccatgagtcctgcatccaaaacctcagagatgtaattgctcattcttgttggatcaagaacattgtagaacttgacacgactcctgaatcctgttaaagttgtaaaacaaacatcaacaaccatttcagcaaatttgatcaagtaacattaacaaaagagcatttcaaagatagtaccttttgggaatatagcatacttattgcaccaaagctttccaaaaatcaagaacccgaggtttataggctcgaccgatacaccaaggttctctgaggcggttaactcgccgccactagtgctggcttcttctttaacgtcttcttgataatccatctctaagtcaatgttcagatcaaaagaaccttcctttaacttcttctcctcactgataactgaactagtctttgtctgatcttcatcactatgttcaatgcctaaaaccttggaagcccatatctttaaatcatctgattccccttccaatgctctgaccaacgagcttaactcatccattgtgtaccggagaagaataaatccatctttcacatcacatgaacaaagatcatctgcatgtttaaggcacgcgtattcttcgggagagcacttgcagccagaagccgagagatgcaaatcataaaagcatgagaaacattccctttcacagtttgaatcaaagtccttctccatcttcttcaagcttgaagaatccctaccaagagctgtaattctcccctcttccatttgtaaccgagcctgtcaatattttcaaaacaaatgaaccaaagtaagcattagaaagtgaaaactatattcagtatcatgactcaagtagtatctgtttttcgttacttgtatcgcgttggtaagtgtcccgttcttcccacagaaactcttccatctcaaatttgttgtattttcctttccctcagaagctgagagttcccaaagagccttcaccgcttcataagctgctccaagaagaagcttgtcgtgagacagagaagtcttccttgtctctttactatatagttccacagcgttctgtccatgagccaaccaatcaaccggagccacattaaccgcttctgcgcagttgaaaccgcagttgaatccagcatgatacgccctcgggaatgtcaatacatactcccctgaattctgcacgacccggtaagcctggactccctcatctttcagtattgaaggagaaaactgagtaaccaggccatgtagtagatcaggctgtcttcgaacaagtcaggtaaatgtttcctcatcgccttctcgagagcggttgcattgcttcctggaacaccataccatacttttggctccccaaagtgatgatagttaagtgaatataaatgatggtcctccacatgctgttcaagacaaagaaatatcacatcaaacatccaaacattagagaaaaaatgtttataataaaatcaaagagtgaaagtgtacttacccaacaaaatgatgaaaaacacattcccacatatagccatggaactagaactccggatatgtcacaatcttcaaaagagagtacagagccaggaagccgtggtaagttattcaagttccagccagataatgtgtactgctccatatcgctaccggtaaacttctcggctcttttataaaacccgcttccaagcaccccattctccaagtcagctccatagtaaacctccacttcatctgttggttgctcaactatccgccagtattccccttctatatcatccacagacggtgtccattttactatatctccaccagagtctttcttttcaaagtacgagtctttaaaatgcagagcatatttctcaaactcatcaagagtgaagtctgaaccagaattgaaaccaaacttctcctcagcctcgggtgatgaagtcgattcagcgggagaagaaccagatcgtctcttagacgaacccattctcgagtttcttctccgtttccgctttctactcttcggtttcttcttcatcggctcacggttctgaagcaggtctacggtttgaatccgagtaggaaactttgtctgctcccatatactcttctccttaagccggcaaggaggcttccatgtcgatggtgggatgattcgacagataccatacggctctgctagtggacgtatcttctcgatatacgcaagtggatctacaaactcctgataaccaataaagagggaaattaacgaacaagaactcaaaaacatcaacaaaagatcatggaaacaacaaagcaattagtacctctagtgatggagtgaatacgggagcgtcattgataattggcctctgtgcttcatcaggtaaccatctagcaacaacctttaacatatacaaaaaaaaaaacattatgtaagaacaaaacttgtttcaagatttatataagtttttggattctgcatcagattacatcatattaccttccgatgacgtggactactaggttgttccatgatagtgtctttgtccttatccttgtctggaggatgattcttcaaagacatatcctgtatattaaaaacacacataaatttatttttagagaagaacaacaaatatatgaatatgtgtttgattaaacagacctagaaactataatcagcgttacaaagatcaagcataaacaacaaaactagtctataattcaaagacgaagaggatctatgatcagtgattaggtaatttgccaaatcaagtaaacaaacgagatccggaaaacaaaagactctatacaaatctatgatgaataaaaaccaaacatcaatactgtttttgattcaaggttacataatcttcagtaattaaccataaacaaacaagaaaaacagtaattaatcgattgagacacgaattaaacatcgaaaaactcacctctttgatctcagattctaatggaggattttccatatgaattgaaaaatcaatactactcaaagcagattttgtaagctaaaagttttcttcgattgagagccaatgaaactgagaaaaaaaaaaaagataagaaaacgatgttatcaacaaaaacaaatatcgatatatcaaaataaagagaagttaaaaaaaaaaaaagttcctaaccctaattgaattcacaaacagaggaacaataacaagaacatcaaaaatcacagatatttaaattcatgaaaatcaatctttttttacctatcaaaggagaaaaagcttgaaagttttttggttcttttgttttggcccaattaatgctataagaattgaattcgcagttaaagttagaaatacccaaatctgggaaaatttaagaaagagatttaattgacctagtagtaacgacgaataagaaggaacacattataaaacaaaacaaaccgaacttaaccacgataaggaacttaaaaatattatttactacaaaattacaaaagaggtttaaaaaaaaaaaggaaaagtcgagaaggagattaccacaaacgaacggctgagatttcgagaagaagaagaagtgtatttgagattatctctgatgatgttatacgaatcttctttttttttctatcaaatattatataattttagataaaaaaaataaaaaccatgaaaattgaagtatgtgaatatttaaaaataagagattgagacagagaaaagacaagagagtgatttgaagtaaagaatctggagaaacgaggaagttagagaacacccgccaaagaaaacgcactctcaagagtttttaacggatcagcgtttgatcaccacaccgtaccgtacgatgatctaatatttatgcggaaaatactgaattaccctcagctttctgtttattttacggttctatgccatttgttgttcttccgtgatcgttcgtcgaacgtcgtctttggttttaggtttctctccgcgtcggaaaagtaaagagtttgaccgtttcgtttttttatccaaaacgcgtcgttttaaaggaaatggagatgaaagtttcattatttcgtccccgtaatttagtatttattattttttgtagctatacttttgagatagatcagaaagtacagagaagtcaaattgtagaataaaaataaggttcttgaatcttattagaaataaaataaatcacgacaaaaacatctccacatgagagtttgatcaactgaggaaaactaaaagaaacaaaatgtgtaaaacaaaagaaagatgcaaatttgtggtacttttaatcaagtcttgtgttgtactttcaatcgattagagacgaatcttcttgtttcctgcttcttctgtcttgtcttgttctacttctactactctctttgttgcaaccattctcacctaacaaaacacaaccaaaaagcacaatgtttcaaaaaacgtttcaagaatcaattacaagcacctcaaaaggcaaaagaattgtatataatcttacagtttcagctacagaatcatcagggtattcaactacaatgatctcaggcttttgctgcaaaaaggggtaaaagcactttattattataaagaaagtagctagtacattttaagagaaagagagagataagatttaacatttactcacattgaaagaagaactcgcagttgattcagtttcagcagttgctgcacggttcctccgctggtaaactcgaggaggaacaatccggttaacttgcggaggaacctcgttagctggacgaggaacaactcggttaacttgcggaggaacctcgttaacttgacgaggaacaacttggtaaaatgtcgaaggatcttggttaacttgaggaactccgttacgacaaggaacaaggtggtaagtttgaggaagatccttgttaacttgaggaataggaacaacttggtaacttcgcggaccatcttggttatcttgaggaggagctaccccgttaccttgaggaggaacaatccggtaaacttgcggaggacgagcttggttctctggacgaaccccataagttcttccaaactaaaccaaaaacaaacattatagttatttgaagaaatttacaaacagtatttaaatcataagagaaaatcaaagacattacagttggaatattgatatgtttgcactcagaacatttcacagttttatcacgtttttgatgaacgacgctcactggacatccgccacacacaagcattgtaaaattgtctaaagaacatttttatgaaacaaaagatgagattagacaaatcagaaccatagatccaatttttgaactaaacaaaaaaaaatttaagtttcttgatttttttcaagaacacatacttggcacaggacgtgagatagtacaacaaggacatctcgctgtttttgctgtgctgtttctaaaagataagttagctttgcagcttttacatgcaaacttatccgcgatccagtttcctatagtaataaccaaatcaaaatgttaaaaaatagttcgagaaaataaaaaaaaatctataacaaaagagatttgttctttatatattttaccgagagtaggagtaaattgaacgtgacaatttggacattcgattatttttcctccagtatcaagctcagcaaaaacaattctttcggtacgtttcgctaggtaatagttaattctttcttccagtatagctctttcatggtctttcatagctctgagagaacacgcaaacaaaaaagatttaaagatagatataataataatcttgaaacattgaagagaagatcaaaggattttttaccttgctgaggaagaagatgagaagagagttgtgatatgaaaagagataaagagtctttgttggtcttttaagtagccacgaacagttacgaaggtacgttttttttcatctcttcatttataagatttacttttaaatacatttaacatttttttgttttaaagggttttaaaatacattaagttgtatatatttatatccattttcgataatttccctaagaggatgaatagacgaatcggtgcaagagaagatgttgtcgatattaggcgattcggaaaattcatcgaagatgttgtcgatattaggcgattcggaaaattcatcgaaccgatggtagtcaagaacgacaatcatataagattagaattaattctaaagaaggaagacaatgtactttgattcattagcgaataaggctttcattgcaaaagcattgtgtatattcatttctttaccactcatggttaggattaatagacattctcgctgattgtttggtttgatatgaaattatgaataaatgtcttatacgttacatcattttattgtaactcttgatttactcattcggttttatcatagaagtcatttataaagacttgtttaaagttttatttatcaaatgcttcttacacattcagaccaaatcgagagatgtaaaatgttccaacggtacataagatcatatgaaatcccttttggtggaaaaaaaaaacgaaccaggggaatcaaaccgccattttcaaacgtttctagagtctttccagatcataagtctgttaaaagagtctaaaaaaaactgagcaaaagcttggatcatatgtacagaggaaaaatcctaagattattaagaagaaagcaaaccaaaatccaaactaaatcgaacacaaagcaataattctaatggagagggagaattcagcaaatgcagctatctagtgtagaggccattgcagtagccgttattatatcttacatcagccaagccattgggagatttcttggaagttccattgatgaaaatgtttgttggaccgttactaatcgaatgttgatgagcagaagctggattcaggactgtgtctaactcgccacacgatgctgcaatgagccctgcaataagaagagtgtgtaaaagattgtttaaaagacttgagttgagttcagataactgaacttaagaaaaggcttcacacctaaaaacagaggagaagctttcccgggtctggatttgaactcggggtggaattgagcaccgataaagaaaggatggtttggaagttcaatgatctgccatatcagtacaagattagtcaaggatttaaattggaagcaaatggatttaaactagagcatggtttaaagattaaaacagacctccatgcgtttgccagtttcatctttcgcagcgaaagaaagaccggccttctcaaggcgttcaaccatgtccggattcacctacgagaattgtgtatgcgtataagaactccacttttgtcatattcactggttagtatgaatgtgtatacaaatccatacctcgtatctgtgacgatgcctctcatctacaaagcttttgttctcgtatctataagaaccaggtagacagaatcatgctaagtaatctatagcattcatctgtaggaccaacgaagttaaatataagatgaatggttcttacagttttgcagatttgctgtctttgacattgaagatggattttcttgatcctaagcgcatagtgcctcccatatgagttttagaaccctaaacccaccaagcatgaaaatatattaaaatcaagaaagacagtaacgaaagtacattttaagtatagaaacagagaatctaagaacctcgggcatgaaaatgatgcaaggatgtttggtttcagggttaaattctgtgctgtttgcgtcttgcaagcttagaactgatcgtgcaaactcgatgacagcaatctgcattccaagacaaataccgaggaacgggattttgttttcacgtgcatactttgcagcaagaatcttcccttccactcctctatcaccaaaacctccaggtacaagaattccatctacaccctgaagaagataccaatagagatgagctaaaacacaaggcttctcatgattaaagttgtaaaatggcaaacgtttcaaacctttagcaacttccaagcagctttatacgcatctggattctgcttatacgaaacaaaacaaaaaatgactctgcattaagatctgtgaataagtaaaaacatagttgtgtaatcaaaagacagtcacagtacctctttctcagtttctttttcgagatcacaagctggaacccaatcaactacgagctttttgcgacaagccacagaagcatgtaagagagcctaaacaagttatccaaatgtgagaaccgaggcaaggaaatcattttgttatccagacactatccactgagaggtaatgagtaatatctacctttaagacagagagataagcatcagagaggcctgtatatttccccacaacagcgattctcacctgtaaaataatttgatgcgttaagaaatatatgtacaggttacggtttctaaagagtaactgagagctgagacccaccggcacatgtaaattgtcacataattcagctctggaagtccattcccctagagaaggctcattaagaatactgtttcataaacaattcaagatcagttccaatccatttcagtcgcaaatcaagcaagaaaacaaaagacaaaacaagacacaatacatacctagcaagattgagcacttttgagattgccagatgagctttctgatcctgtacaagtaaatatgttgtcttaatgatttataaaaaccaatgtaataactacaaatagttttagttgagaaaagatacctttagcaacaaaggaatacgccaaatgttgggaacatcatagagagtgaagatatactcaagctgaaacaagaaccgtaagctggtaattaaagagatttcaagtaaagaacataacaacatgagacaaaaggcagaatcttaccgggacatggcaaaactgagctagtttttctttcacattatcttcaagtggctacatgaagcaaaaggttgagacttttatatcagaacaagaatctaatacaaacgtttctgaatgaaacagatttaaagtcaagatggagatgcaagcaaacaaaggaacctttgtgctcctacaagctaagatatccggcgtcaagcccaatcctcgtagccccttgacactatgctgtgtcggcttagttttctgaaagaacacacaaaaacaaaccaagataatgtaaacatagtatcatatgctgtcacatcatggctgcttcatttcaggaaaagatttatacctgttcaccaacaacattaagcacaggcacgaggctgacatggaccagacagaaattccctgggcctgaactcaaccaccaaccaaaagatgcagtagttaatttcatcatatccacaaaatccacttttcttttcttttggattcaatggtatgaggaaaaagatacttacctacacggtaagagaattgaccaagcgcctcgataaaaggcgcggattcaatatcacctgcaaacacaaacaatctctgtttacacagaagaagcaaaaacaatagaccaaaaaaaaagaatccagtttttttttgtatacctattgttccacctaattcaataacgcaaacatcagcaggatcctcttctccatcaacaggaataaccgcaactctctcgatccaatcttgaattgcatcagtgacatgaggaacaacctaaaaatcataacaaccaaaacactttttaagacttacaagaaaccaacaccagagaaagagataagttgaagaaaggtacctgaacagtctttcccaaataatctcctttcctctctttagcaataacatgctgtgacccagacatagaagtgtataagaagatttagtaaacctaactcatcaatcaaaccaccaaattagttgagatctaattcttcttacctgataaattttcccagtagtgatgttattgtctcttgttaatttgatatctagaaacctttcgtagtttccaagatcaagatccacctttttcccaaaaaagactcaaaagttctcaaaagctgaagacttgtaagttttttcaaaaagttacgaaagaaaaaaaagtcatatttatttacctcaccaccatcgtccaagacaaaaacttcaccgtgttcaaatggagacatagttccagcatcagtgttcagataaggatctgaaagattgagtgcttcgtaagcaaataaacatcacttgagagaagagtaacatagaagtaaaagtagtaaagtaccgattttgatagaagtaactcgaagaccacaagctttaaggagaacaccaatactacttgctgttactcctttccctaatccactcacaacacctcctgttacaagcacgtacttcatcttcttcctactgatttttaaaatcgaataatatcaactaatcctgcagagatatcaccaaccaaaatcagtcaacaacaatctagaaaccagaaactgagaaagcgtgaagcttttgagaaatgcttaacagagagagaatttggatttttctagatttaacatctctttatcgcagaatcagaaacaggggatgaccaaaaagattaaaaaataaaaacttattggttcaaatcagtattcaaatagagcaaaagctgttgcattatcatttgtatcaaacccagaagacacaagagtatgaaccagagatagaaacagagagtgaaagagagacctgagagtaaaccggcggttgtattttccggcggctctggatttacaatctctgtttaaagaacaaaagagtctgtctttatttgtgggtttatcggataaggataaagggcggcgagaaaagtgtgaaaacgatggagtagagagagagagaatgaaaaaaacgaaaagagagaagaatggtttttctttcttgtttaggctcacgccattgacgacggaagcggttttataaaggggaagagagaaacacagtaaaggcaatttgcagcagagaagcgcctctctcaaaaccccaatgtaaaccctccacctattttttatttttataatattgtgttttctatatttggattgtttctgtatatttgcggatacgaccaaattttttatagttaatttaccttctataaaaccattatgaagatgtaaacaaagttattttaatcactaatgtaatcattactaaataatttattagttttatttgtgatatcatatgatagtaattgtacttagcaaatttattgtataccaatttctaatttgttttaaaatattgatttatttcgtatcataacctaattcttttgagatgttataacaaaaaaaaatgtgctaaatttaacttaatgtttaaagatacatcttaaaaaattaattatatttgatgtaataatttattggtgcttgatctttttttcaaaccaaaagacatttgaaccaatagtaaacaaaatcggtttaagagcaactccaaccattgacaccaaaacaccaaattttaacatcaaatttggtgttttggtgttcagattttttttatctccaaccataaacaccaaatctcacaccaaaaacaaaatttttattattaaatactaatacttaataatagttatttttaatagtttgataaatactaattaatttagaactgctgaattttaaatttaccttattgcatttggtttttatgtttgtttggtttaaatgttgtaattaaatgtttttaatgtttaattaagttttataatgtatttttaattttaactaatgtgatatttatttgaaaacatttgtgcacattatcattttatattaatttgattaaaaatttgatattacagaaacgaaaacattcaaaaaatattgatagtatacttgtcatttatttgaaaaccaacaatttgaatataaaacttaatcaaagatataaaaaaaataatatttttttttatgacataacaatgttcacaaacacccaaagaaaaagtataccgtctattatagtgttacgttggagaagaattatcactaaattcggtgatttggtgaccttggagattgtttgccaactattttaaatactccacatgcatatgtgcgtatataaaaaaggcgtgacaatcttcgttaatcaaggcatgatctaacaatatgcatgggataataatttaattcatgcaacctccccatgacaaagagtcacaaaaaaatgaattctcctcgcttctcatgattttatgttggttgattaaggttttgtgatttcgtatacttttgtatcacttacctttaaacaaagatccttacgattagtatactttgtacacaacaaaatgttagctaatatatacataatataattagataaatgagaataatgttgattgatttaaaggtgagattgaattacaggaaagtatagatacagtatgtctaaaagataattgttttctttttaaaataatatcgtggtattcaattaattcaagaagtcatgtatattacgcagatttaattacatgtagtaaactttatagttaaaatatgtatgagctctgtttcgcctattggatgtgaagtttgaatggttttggggatatgagttattggcctgtctttagcactctgaccactcagatggaccactataacggtattaactaatcactaatcttatctttcttttttgttgatgatgttcaagtatcttaattgtacataatttaggaaatagaaatttgtacaattaatttgttaaatataattttctttcaaagcaaagaagttcaaccggtttttggttcaattttggattgaatgtgatgattttcgaaaataatttttaagtatagaaaaccaaagattcgtctaatttcgaataattctccttggatccaattttaaacaaaattacttttataaaaagatttttgtaaagctctcggttgtgatcagtttattttactctaacttggtttgatttcgaataaaatttgtctatacataagtaaacaacacctaattattgcacccaaaaaaaaaaacctgattaaattttcttatggtttatattttgatttacttttggttaaaacgatttcgattggatgtaaatttgtttaaaccggattacataggctctggccacttttgatgtgggtgaattagttccgtatttggactttcctttaattgaaagcagaatttatttattacaacgaagttatttactctttagatttatttattttttatttttttactggatcaagatcttgtgaccacatgcgtaagagatctagcattggtcggaccggacccaccggtttgatttatgtccgcataaacgtggaaatttacaacgactttgttcgcatttttacggttcccgattggtccaaaccaggaacgtcttaactgggattaaactcatgtaataagtattgatatcccatgaaatataattgaaactaaaaatcagactagatattcaagaaatcagatttggtcattgaatctttaaatctcagtttagtctctaaagtgaatcctcgcatgtgttaatcatgatcatgatcattcgaatcgtatacgtagttaccatgtttttaactctacggtatattaattgttgtactaaacaaatgaaattccaaatccaaaatcagttcattatcattggctcattaagctcaacaatctaatcttttttttatttattttacaactcactttcattattgtttcatgtttttattgatcttctttcttagtttttttaaaacaatttttttcctaaactatttaagcttgtcaagttattataggatgagtgagataattaaaagttatgtttcaataaaaatgaaacatgaggaaaaatgttgatgtctacatttgaaaattaacacaaatcaaaatattcgctaagttgctcgattacaagctggccaatgtttcttgcgactgccaaataaatatggcctaagtaatgcttattttcgtttttttttttttttttttttttttcgtctgcttattttcgtttgtgaatcaatttttggacatgttaaattatttaactgagaatttaccaagagagctaaaaagtcgctgttaagaaggatcgatactaaaaatgatattagcttgttttcattggtaaaaatcatccttttcttttacataaatcagatgtgttctttatatttatatattttgaatagaatggataaattgttacttgttttttcttacttaaaaaaaatgtgtgtttttctccttgccaaagtcaaaaagtagattaaaagatattcttaaattaaattggaaagaataggcaaaattaattagaaaagaaaaggttaaaaaagaaaattaaaaaaagggtaataggagtaatctttaatagtttaaattttaagaaacccaccaaacttataactaccaactaacattcatacatgcatatgcacactttatgatcctatcttctactgtccaatgagtttctattaacatggactttttatccttttaatttactttatttttggtcaaattttatccttattattctgacaataattatagtaagtgtctaaatctgctgagcaaactgagtgagcaaaaataaagagcatgaatcagaaattatatcattccatgcactatttgacacaatcaaaactaaaatcctagtaaatgatcaacaaaacatgcatgaaacattagtttttttttatttctatctcgtgccaaattgttcatataatattatatacttttgattttatagtagtgctgattattaaatattgcatatacttttgagtatgcaatgagtggaagtgtggaaccagctttatttatattattttctcttccacggagttgcaataatttgtagttataacagtgagccttaattagtgattgcacctgcttaaggtagtaaaatggaaccaaaatgaataatcgagcaaacacttgtagtcacgtacaatgtatattcatttctcaagagatttttacgtcaaagtctttaattattccttataattagtacaagggacatgacactgcaacccacgagccacgaatgtgagactttctgagtggatcggtgggtctgtccttcaccaaacctatcaatgtgtcacactgtacgccacgtgttatatctcctatgtctggtcaaatgttgcatctgcgtttgtttcggagtttaggttatcctattactattattgagacagagtgacaaagtccatgctctttttacaaattttataataaactaaacaatggtcttgcgaattaattaaattcatttggatcagcgagttggtttacgtcacaccaaatttgacccgtaatccattaaaatatagtcatatggataactaagatttgcacaatcagcaatttgaagtatacaaattttgttggtagatgtgtattgaatattatgtgggatttatagcttattttcattatctataatcttttcccttaacatttaaccaattacacgtgaatattttagcatacctagctaatacactataatcatgattttatttttttacactaatcatgaatacccaagtgcaatgccattcaactagatagacagatgtttttagtgctatcattttcgaattcgaactctagatttatgattgtggattcatcatagtattattaaaaattggtcacgagtttgtaaagtataaatcaatttcaaaaacattctggttatcaaagaaaagagagatactaaaatagtttgtaatgagccaacagtcaaccaatataaatcctatccactttgaattttgggcatgtgattatgtataataatgtatactgggatatgtgactgttatatgacaaacactttatacatatagtatataaagttgtaggggcaataagtttcctaaaaataaaagttacatgaccaatgaaaaaaggagagtgacgtagtttttttcttttcttaaaagggcgaaggtgacgtggtggtgactagaagagccatgtctggtgtggcgcctagttagcgtcgtgtcggtacatcgtcagctccacatgtcaactaatcgctggtcaaacataatcaatgtgcataatttgttattttgttataacttttttcttattgaatttcatccttgtgttttattcaatatgcacctttttgtcgcaatcaattcgctttttttttgtttttatgtttatgaataatagaatgtatatgaaaggtagtctttcaagtatcttttttttgtttcatttttgaatgaaaacttatcatttcaaactcaaattaatttccgcagttgtaagaagtttaaatgtattaattaaaatgtttaacttgtataattgtaagagggtgacaatacttgtatgtgatttcttattactgagaaaaaaaactcataatatatcttcttaagttagtttagcaaaaaaaaatatcttgttaagttttatacagattgttttttcaagttttccaatcactcaaaacttgacatataagatttgtacatttcagaaaaatacttccaaatatatagtcttccatatcagtactaagattcaatcttttgtattagttcatcaaaatatatacacaaccaagtaagcacataccgaatcaaatgattttgcatattgaaacaaaacggataaatatatagtgtaactcaccaacatttctagtgtaaatatctaaatttagcccaaacgtatatttaattcacagaaactcaaacttttttaaacaaaattgtgttgatttgtataatttctaaataaaatatttgaaatttgacattttcactctttgaatattccacatatgagaaactatatacacgctttaatacgtgatgttcacttttaagtaaatagaagtaatttcaatcaaatacatgaactatagggctgaattattatatttagattcttcactctctatatatgacacgtataagggaatcaaactcgtcatttgcatctttccatgtgttacgtgtgaaagtgatttgtctgaaccaagaaagtcctgatggtatactatttgagactttaagagtagattatactttatgctatcattgagtatatttattcaataatagtagttaaaatatgtagtatactttgtaatatatttgtaatttgaaatatattacaaatagtcaaatagtgatcagtacaaaagtattatgaacgagtattgtaaacaaatattttcgagaatggtaaacttaaacaatgagtatccaatgtgacgaaaaaaaaagtaaccaatgttgaacatgcatcatctatcaaccttgccgaatgcactcaacaaaccaaaatattgatgattaagtgaatatattaaacctctccccaaaaaaaggtttttagttaaacttaaactgtttttaggtacattaatttttttattatataaaatgtagagtttggttgtatattaatataaaataacaaatcttgtttaagtgctcccgttctgcatgctaaaaaatatattgtttaaaaaaaaagatatatattgttcatcaaatattcaaatatatgtattatgtaaggtttcatgaaagtaaaaacagacaaattctcttattttaaatgtttaattttattgactaaaataatttaaatacgaatacgacattgtcgtttcaaaaggttaatcttatcatacaaaaaatgaaaattgtgtttttggaacttattaatttcctagagagaaaatataaatttaaaaacaaagtaatactagttcacttgtatgaacaaaatagtttaatcaagaaaaatatataatgcattgatgtgatgaaatataatgtggttagaatgaaaatccaaaaaaaggttgagagagagattagagaggaaccaaagtgaatgtcggaagatacaggaaggaggttggtccgttggtgtcggctactaacggttgggccacgtcatctcatttcataccctgttggccccacattttgttgacctactgacaaagtgacagttgaccgttctatattacgggactggcccccacgttttctatatctttgccgacaactaccctttctttctcctttatttccaatttattttttatttagtttctctaaaatttaacacattaaaataatagaattgttagtttgaaaaatataaaataatacatgtactgttgcgttacctataaatctatgatatccattttttttttttgataaaatagccaaatgaatattgaactcagtattttcataacaacatccaaacaaaattagttgtattagtttattagtgactaagattcggttatagaaaaagttgaatatcttaagtcaggtggctataatttaagccaaactatataaatttattaattatgtatcatgttttcttattttcaaactacagtaaatgattatctatatcagtaaatgaatataaataagttagcaaaaatctaatctaatcaagtggttggatttttttgacatgcatggagttaagagattagggttcaagttcttttattaaaaatttaataatactgtagatccttcattactgcaaatattttaaatgcgaagaatgcactactttcatttaatttcaagacttatttggattttggtattaaaaattttagttataaaaaagaaatatgaactaatctgcacattgaaaaaggacgaggatcgaacatatacaaatgcaacatataggtccaacaacatggaattaacattcgatagttttccacctattaataaagaattatttaaatattaggtgcaaaaactcttactcttaacaccaaatgtaaaatcaaaataattttctagttttacaagttacaacacatatatcacactccaattttacttccccaaaaaaacttacaacgcatacaaatttccggatttgaatataaatataattatgacatatataatagtacgattattttctttaaaaaaaaaaaaagattatagttggttttatcagcacatgtctctaggttataggctttggttaaaaagggagtttatattagtactaagtgtaaacaagtaatttgtatgcaaattattcatttttgcctgataacaattttatgcgtggtcgctgttgttaaattaattagatttgaagtaatggtttataataaaatcgagccgtgtaaaattcgcgttgatgagtcaatgcatcgtcacgtgagatctttaagtcttaaccactcactgcgttacaagatctccaaatcaaacaaaatctagtttagtttgcggtgaaaatgagataaacaaaacaaagggaccacactaatccaataaaacaaaatttttttttactgttgataaaacaggttccaaattattgttgcttcctaaacgttttgcgattagtgcataacaagtgattgatatgattagtgctgaacaaaatgtatttgtcaacaagatgaaatgataaaattatatatctttttgttacagtagttaaatcatttaatatatcgactctgtttaattagaactaaactaaaatgtgaaggtttcattggtttccatttaaacctgtgacaataatcccatgtagtatatatgcgataatgaccacctactgccacacaaatgcaatatatacatacacatgcatactcttgcaataaactattttcgccactaatcatgctgctgtattatgatggtctgtaaaccaaattatataatcatatattgtcacttttactaccctttcgtagaattattttcttttaagataatttgtccaaaaacatcacgcatgactcatgattgctacatacctgagaaaagctgagatatttattgcaaaatattaatatttggtacgactaattatctggctgaacatgagtgtacatagaatatccacgttaatgtggttcgaacctagattaataatagaatgatcagtacttgttgtatatattatatagctagccataaaacgttacagaaagagcgtatagaagatgaagtagagcatcccgtgatgggcaaactagaaattcggtggtttctccgacatataatgagacaaaataaggttcgaaattaaagttagtccatgtgatcactcggattcacgttcattatacgaatatgaatgaatctgtttcaaacatttagcacatgcatgtgacatgtgattttacttggtttgataatttacgtgttgcattttgtaacacaactcttaaaacatctgggtcaacatattagactatatagttgtgtttatatatggtctatcgtctagaattacggagctatttgtcacggcccacaagtgcaatgaaatgaaatttaattcataagtttagattatccactggagtatgtatactgtcctacaagaatctttcacttaatatacatagaagtattttatattatatagacgtatattagtcactttattgacgtttacagaatatgaaaaaatgatgggccttcgcaattgtacgtactcgacaacatgcgtggcgatgactcaccttatccatatttgatattactttttctagtactccttgtttttacatcactttctggtaatatttaattagaaatttagaaccctagactttgacacggtaaattttaataataataatatatagttgtattagaacagttaagaagtctcacgagttcataatcagttttgcttactagctaactgtataaataattatgctggaatctaacaattcaaaattaactttgcttgagagttttataccaaacacaaaagtacaatttagtctagactctagaaaagataaattcttattgcgaaaaataaaaattgcaatatatatacaatagaagttttgggagggatggtttggaagttttaactatctccatgactcgacatataaaaatgtaaatatcattgttcagctaaatgagctaccatcgattagttaaaaataacattcttttacgtcaaccaatctatggtttaggggttaaaattttcactctcaatataagaggaaaggtttaagtttttatcaaagttttccggttatagaaataacgtacgtacgactgttttctttttctgcttttttcagattttctaaaatcagtacttggtcttatatatagatcgatatgcaaatatgcaatggcgaagatacgtccctagcggctcctcttttgccaagaccatgtcacgatctatcttacaaacgttactcattttactatatctacttttttctccctaatataaatataacttcgcatatttattcatgaatatttatgctaagaaaagccatcacatgcatttatagtatgtaagcttatgtcgatgcagtaggaccatatccgtatatatgtgtgtgcgtatagatacgtgagatagttttgcttttgaggctccttcatctctcacatccgtctgcccacgatcaatttcaaaatagacaattttaaagctaaaaaataataatttctttttatatgtagatgtagctttcatatctaacctaaaaatatttgtcgtcaaagtaaaaaaacttaataagaatattatttaaagagctttaaactaatattaactataaatcgttcgtatactattgttcgttaaattacatttagagactatactagtctactttaatatcaataaaaataaaaacttcacatgcatatgttatttgtctttatcccactctggccaatttaaatttgaaaatatacgtagacttatagatcaaatatcttatcttttcattgttgaaaaaactaatgtaacattctaattagttaaatatctccacttacaaaaagaaaagagccatatcttatccaaattaatctctcaattttaaaagcacacattaaacggtcaaattccaacttttgttagattaaaatattatgaagacgtcagataatacgaaaacattgctccactaatttttgtcgtttatttccattcaaataatcatatatctggaatctaaaatataaaatatcatttaatttacgtgcttattttttttttaaaaaccttcgtcagattacaatcaacatagccaggtataatcaaaagccagagaaaaaataataatacaaatgttaaaatctgaaggaaaaaaaaaaatctagaaaacactactagtttgccactgtcaaaacaaacatacagatatttgcaacattaaatatttttgaaacgtttaagctcaaattgtatatttatgaaatgggctcagcttatactacatagtatttacataattgggcctatgggccatttaaattcataaaaaatataaagtacagaaataacgaaacggcgtcgttacacttagctgagtagctgagtaataaaattgaacaaattagtaaaattccaaaaagttatcgaagaaacgttcaagctgtgacagagaatctcggtcgtcttcgtttgtctccgacgagctctctttcttctccgattagatcccgtgagaagaactcaaaggctctagggtttctctgtgattcagttaactcctttagatatcgtaagaaagtaatcgatgatactattgcagtcacattcaaggtttcttcttcaaacgctattgacgcgagctcaaaagtaagtgcttttcaattcttaattaggtacactcttagttttacctaatctacaataagacccattttttattttggtcgatttgattttgattttgtgaagaaatctgaaacattttggaagaactgggttttgtagaatggaaccaaagttcaatactttgcttgattttgtttatgttttggttcagtcttgataaagcagtggagctagattatcaatggattgaatttgatgatgttcgttaccatgttcaggtgtgaattttataccaacatttgagtatttgacctctgagatccatatgatcttgttcaatgttctgagactatatgaattttgtttgataggtgacaatgaagaatccaaatctgttgttgctttcggtttcgttaccaaatccaccacctgaagcaatgtcctttgatggacttcctttaggagctatagaagctattaaaaccacttacgggacaggttttcaaatacttgatcctcctagagatggttttagtttaaccctcaagctcaatttctctaaagttcgtcctgatgaaggtttttaaacgagtctctttctctaattgataagatgttgttttgatttagatgttggttttgttctctaatagaaagtatctatgttttggcagagttattaacgaagctagcttccattagagaagtggtgatgggtgcaccgttaaaaatcattttcaagcatttagcttcaaggacggttgctcctgagctggataggcttgtagcaattatgcatagacctaacgagacgtttttcctcgtgcctcaggtatatatatactctataggtctttcgtatgtagccattgaagtaggttcttatgattagtaagaatctagagagtgatagagaacttaactgtgtatcacaggcggataaagtcactgtggcatttcctatgagatttaaagactccgtagacacgattctggcgacttctttccttaaggtgacaaaatgatcaaagctaaattttcaaacaggttttgatttctgtagtactgaaactttggatataatgatataggaatttgtagaggcgaggcgtgctgctgcgcttaatactgctccttcttgttcttggtctccaaccgcaccgcaggaattagagggagctcctaaagaaacactatccgctaatgccggttttgtaacttttggtatgatctttctaaaatatattctgttcgaactcaatttgcattggtagtaccaatctgaaagaaactaactttgagattatcgatatatcgcagtcatttttcctcggcatgtggaagggaaaaagctcgatcgtactgtctggaatttatcgacctttcatgcttatgttagttatcacgtcaaggttcatattctttatcgaactttcatgttttctactttcatattctctaaataccagaacttagtctctctatcttagtatggatttgtaaaactgagtttttgttcgtttgttgttatatcacagttctcagagggatttatgcacaccaggatgcggcgtcgcgtggaatctatgattcaggtaaaacaccaaactcattacattcgacttggatatgcgttctttagttaacaaaatcttgttgtctcaggctctggatcaagctaagccattggagaaaacaagatcgatgaacaacaagtcatttaaacggctagtaagttgcgaaacaatttgtttttcgacagactttttctttgtttgtttgcattgtttttgagctttgtttcctcttcctcacagggactcaacgaggtcaatcacaccaactcgaagtagttggatttctcacgaagcaattttgtaaaaacttgtgattagctgagacatgtattttttttactggattaagtctctgtgatatttattttagtacaattctttcagatatttctatacatctgatcttgctaaatatttgaacaaatgtataatgtgaaaattgtaagaaactcaccttgatatggactgtgtctggtcttgatctaaacatggtgttttcaacagaaaataaagtttttgttttgttttataattgtttttacaaaaatgaagaagatgaatctttattgttcttcagattctcagatagtcaaattaaatgaagtaatattcgtaccaacaaatagtcgtaaaagttgattttcatataaaaacaaacgttcaatttatccttatacacagatgtatcaaagatttgtagtgatctagtaaggtataagaagaagattcaaaggtcgcacgagtaaattaacgattccttcgtagtatacttttgaggcccataaattatgactgggcatatattgttaggtttcattgtatcaaaaaatgaaataaaaagcaattaactggcttcgcccgggttcgaaccggagaccttcagtgtgttagactgacgtgataaccaactacaccacgaaacctttttgtcttcttgatgttggtttaacatattctatcttccttactgatcaccttcacattttcgcaaaccattgtataatctctcattagctctaaggactagaatattgtttcgagaatggataaagaagctggaatagtatttgatataaatgatgttttatgtcttgcgttaaagaaattttgtctgattattttcggatatgaagttgtatttcaccaaaatccttttaatactagaccataatatcgatttgataacatacgatttatatactacggtagattcagattatacaatatagcatacaaactgtgataattttgcatcataccgattaccgtactacgttacgttgtcgttttggtgtttgtattataacagattcatttttctagataattatggtttgagttttattattacttttttgataatgattagctgggtatcgaatatcgattaccaagattaggttttggttttgcgtaaatagtactcctccttttggcttggtaaaaaaaacataaaatttaaatgtgagtttgtggtaatccatataaagcgtgagaactattttaaaattttaatgaaatcacaacaaggacactagatttattttcgcaaatttctcgtatttatcttattattggttttattcagataagagagattagaactaaaaaattctacaaacatggaaccaaactacataaataaaataatataaaagaataatgaactaattatttttaaattattgaaattgtctctatttttttttctatttttttaatggtttctaagaaaattagaaatctctaatttttcttctatataaataaaaatagagataagttaaagtaaaatgaaagcaaaaataaagtatagagatggcttggaaatgctcttagaaagatgaaagtagagtagcatgatgctcaggtagcgggcgtgtgagacacatgtgttttctgctcctttccaaaaacagattagggttttagaaacatatcgacattttgccttactcgtatttttggcatttttgcatttcttgctagtgtcatgaggaaacttcctttattttatgattcaacgatatcgtttttagcggtaaatgacagagtgtttaagttatttgcagttcgagatcttgctcgacgtgtctaaattctcatctatatcgatttctatttctagatagcctctcttcctcgtactagctcgaggacatctagcatatttgagagattcatttatgtttgtcactgaggttccttgattcaacgtctggttgctacatctttaatcggttctagttgcgattaaaaacaacatcgatttttgcatggtgcttccaaaccttggtctcccactttttcgtattttagattcagaaggagcgatggttttctagtttcttttgtatcctattgctcgtgtgatagttctctttggttgttgtagcggtttctattgggtctttggttagttctaatagcatatgacttaaaaggagaaatttctatcgatgagtctcttttagcagcttgaagcttgtagaagaagatagttttagacgaatgttgccagatgatacgggatctcgactagtagtgtcggagtgtctgagatcacaatgttctcaattttggatgattcacttgtttacagtttgatagtgtcgattgcttgctgaaagtatgtaagttatgacgatataagttttcgaacgttatccttacaccccggatgctcgtggcaacttgaagctaataggcttaattaaattaaagtgttggaaaagaaatgggcttaagagatggcctagctcacgttggagctccggtggttgtcgggtctggtcttgaaaggaggaaacaagtcactatgttcttcacgtccctaaagaataggtcctcttcgcttcctcaactccttgagaatatgagtcgttgaagtatcaagtcacccactacctcctatatttctatttgacttggttttgattttgtgaagaagcaaattaaaacctaagtatctcaactctatataagaaggttaggcttctaagtatttgtggatccactagcagattaacacttgaacgttcaaacatctttcaaaagcaaaacatctccatcaatctctctctgtcttaaagtaagtctcgagagtatcgtagaaacttgttcgttagagttgtgtttcgagtgctgcgaaatcagtttatagaggttgtatcctgggatccttgaatcacacataaaccgtcacactacgggtgaatcttcggtttaatttttgtggtgggtttacatggtaaaactgttaattctttcttcagtggcgtcgggtttggtaactcctcggaggtggtaagttttttctgcgattcgacttccgttatgatcattggcttgaattcatggtctcatcggagattatcatcgcaaaagatatcagcgctacgttttctaaggtatttaggtctggccttagatcacggctgctcgtggcaacaatattaatatttcgattttgagagccaatatcaccattgtgtgcttatgttgttggtttctttgtttggttataatttttattttattttattttgtttgtttttataaatttcggttttttcgttttttggtattatctctttcttttcatacttttttttttaataatattatgaaatgtaagatgaaaaataacaaaattaaattaaaacattaaattatatttaaaaagtgggagagagaaagttaaactgaatttgaaaacaattaatggcacaatgttctgtgcttatgttattaacttttttttcttttccaaaacccttttgtacttccccacatatttctaccaattacacttgttaactttgttttttttttctacttcataattttgttgttgttcagagtcagattgcttcttccaatatccatatctaagttatctacattaattaaatgataaacttttaaactaacttcaagatttgaaacagatttgttattatcaaatagtgaaatagatttgcaatattgactatgtatgtttaaaacaatattaattaatatattaaagtttttttgtctttaaacctattagaggtattttataccatatttaaaatttcatccttttcaacaattatatatattttatgatatattatctaataaaattcaaataataatactccttgtacaaaagccataacactccccattgctcatgcgatggatctctcctctgttgatggtccaacgattttcatagctttttttttttttaataatattttttctcaaaatgggctttttaaggctgatggagtaaaagagatacatgaatacaaaaaagagaggtccaaaatgggaaccctagaaaacaaactctgaagaagacagtacaccggaaacgcatccatcaccttccagatccgatgctaacaaggatgaatttattgcggacaagactcgaagacaaacctttgggaggagctagcaaatcccaccgtaaattgtcgccgagagacttatccgaaccaaaaacaaacctttcgggaaagggaggaccaccacaaccgagacccagaacctcttctccccaacaagcaagaagagagacatcaaaactaacctttaattccaccgatgaacctttgaaccactccaagagcaaccacaccttcagatccgacaaagaggaagccaaatacggcggaataaaatggatgttggctcaaacaaaccatctactctcgagatctggccaaagatcacccgcaattagccatttaggatccggccaaagatccactgctaacccctttgcaaagtagcgaacccaccaatccatggttcaacttccgccgctcgccggagctacaattcacaaaccaccgaaccgtgagaaacaaaatctaatccactggagtccataaaccagcagagcacatgaaccgtttctctggctgtcgtgaaggagagctgccgtctagcatcgagccatggacctaaccacgcctcacaccaccggagaagagagatgctcaccaccacttaactctacagcccatcaactatctttgaagatcttcaatcggaaaagaaaaagcaaaaaaagtagatttaacatctagttttcaagagagagaagagaggttttttttcgggaacgattggcccttttcaagtggaatacgattttcatagctatgtcaagtgtgggtggttagttctatctcttcgtaaatttttcttcggctttgttttgctcatcgtttgcttccgtggcaaggtggtcatactttcatttccatgtttttattgccgtcttctcattgcttggtgtacaataaaagttcaagctgcgagcgtgtgtttcagcttctggcttgaaaccgtgaatttttattctttaggtgtttgtgtttgtcatctctagtgtgttgttctattttatctcggattgcgcaaagctttttacatcttagttggtggctagtggttgtggatttgcattagtagattttttagtgaagctactgtttaatttatgttgcaagtttatagtggttaagttgttgatgttttttttggtggctccataaatggttagtggtcctcaaatatgttaaacgtttttgcgatttgatttttgttgttctcgatggtttgaatttcatggtttagtctgagattgtcatcgaagaagatgtagacgtgctttttatgaggtattaagggttggccttgtatcaaaatacctcgtggcaatgatgattggaaagttttatttggaatttgagttgtctgaattttgattgaatgtgaatttttgtttttctatatatgttcatagattttggttcatgtgtaatttgtaaatttgaaatgtgaatttctgattatctaaagagtgacaagttcttcctaagaaatttttctctctagcacggtgcccaaagcagctgccgccgtctcgctccgtttcaagacaagcatcctccaccgctgctcctccgtttttctctccgtctgacctctatcgttgcttccattttcgcgggtccgacaaggctctgcgtagaaccgtttctctccttccgtcgtgtatatttgtgctttccctcgaggtttttccgaggatgtattttgtgtttgtatccgactaattatagaatgaagaaatgtgtatttggttgacaaaaaaaaatgtgtatttttgtaaaaaaaaattactaattatattgaacttaacatattatcaaaactaaaagttattatatatatatatatatatatgttaaaataaattaacaaaattaaatatgaacattgaaagtagtgtgagaaagtgaaaaaaaatcaaactaaaattaaaaacaattaatggcacaatgttctgtgcttctgtttaactccccttccaaaatgcttttgtacttccccactcttctcccttattagatttctcagcttgttttttctttttaacatatttgtttttgttcaaagtcaactatttccaatattcatattcagtaaaatatctagtaggttatatattttaaaactaactccttgatttgataaaaaagatttgttattatccaatagtaaaacagatttgtaatttatccaataattaaagtaaataaaaaaagaaattaattggtgacatgatcgtaacagaaatattcttttaacagttttttgacatccaattatttagcttactgtgaatgcttttaaatattcgtcaatcatcatatatgttatagaagattatttagcttttggtaccaaagattcgtgttatatggtcgaacaaatgactatcacatatatattactcagttttaaaactatgactcaaaagaaaagatttcaaagcaaattaatatgaatattcttaaaaatgctaacaatgataagaaaaatccgttaaaaattgagaaatctttttcagtttcccttttttgaatcaaacttattttgacaggcttaagaaaaaacaaccccgtttagacatacacagtttaaagacgagatatcaatattttctctcttagacttttattagatcattttcattttccaaattaaggagttttctcttattattaatttgaacgctagacagtagatctagtttttctaggccacaaaatatctgtactctatttctcaaactaggggtctgcaaaaaaatattttgataaaattgttataaatggatacaattaaatgtgatcagcttttttaattttgttatgactggaaaaaattagagtatcttggatttagaagaaaaaaatcaagacacaaaatagtccttcttttaatattttccactaagccaactaaaatttgtttcctcatttttcttgatatgttttttttttgttttttttttacggcaaccactcatttttcttgttacataggtgaaaattaaaaataaactcaaaatttacctgaaatattgttttaaaaaccagtcgaaacacttgatctccaaaatatggtatcaacgatggattattgaaaatcttacgtaacggtttcaattatttctctacatatttagttttgtagtatacaatgcatgaaaatatcataacataaatttgagtatatctgtttttaaaataaataaaaattgagtatatattgagatattaacaattaataatttcgtgaactttaggcctaatcctcataaaccgtattttaagcaactttgtcactaagtaaactgcaaagaatcagaagcgggtattcagaaacgaaagtgtttggaaacgagaaagcaaaaactttgttagaatttagttcgtaaacactatttgattatctaaggttgcaaccccaatgtttttgtgtaaaagtttctttcacctttttttttcatatgctttagtgcgtaagatctcaatatgtgaaagtaaatcatgtgcatcaacagtaaaactcttctccaatcgtctaaaattttgtttgaggtaaaccgcgaaccatcaatcggagttactctttttgtctgttatgtacttttagccatttctttcaaattgtttttggtattcgttctgtcttatgcatttagaattattattttccttcacatatgtataatcttgtttgctttggtaataaaaatacatgcgattttagtttgtctgaagggtcactaggcgaacttcttcgaaagtatatcaaatgggatgactttggtagaggtaatcagaagagaaggctcaataatttcggagaatgtaaggtgttcttttcgagttatcgtctattgtgttgtcgctcgtcttcaaagtctaacgtgcgcaaatttacattgatgattagtcagaaagtgaagcaatagttgagctctaaatgcacaagatgagaagaatatattataactactacgttgattccaatcatcactggacatttttcgcataatgtctcttcatcgtcttttgttatattattttggtaatcggtgtgcgatactacacgaatttgaaagcttcactagcgctcctatttttttacctttgaatttagtatatgtcagggatggtcgaatttggtggatgcatgaagatcatgaaatcgaaactgacgaggatgaaactctagagctagttatgatttaggtatttgggagcagaagacacgagatctgtgtgatcaacaatgaggctggcctccaactgtctccaattttgtttaaactagatcttgagctattaatcgaatttgttctttccgcctctcacgaagtttaagccgtttatcttgatatgttttctgggattcgcttttgtcatcattcgcgtttcgaattcctatttttcttgccatttgtaatatcttgtattcttttatgagttttgtttcttttcctctgtaagaaaataattttatacaaagatagatcttctggctggagatgcgctccttattgttagtcgtttatcagtgtttatgttgtaattattatgtgtcttgttttaacgattggaatttgggtgattttagattgtttaacgggttattgaacgaactttcttgatttatttttaactgaaatataagtttggcgaaagtaattagaggtgaaaactaatcaattccaaagaatgtggggtgatcacttcgaattattgttaatttgtgtcctcacacatctttaaagttttttgtgcaaaaattcactttgatgatttaactggaaaaaataaaaacaattttatgatagtttcttcattatttaaaaattttcctcatcaaatataggtacatcttgtagttcatggttattttttcctttgtttgtaagcttttcaaatcaatattaatgaaatgaaaaaacaaaattattgttatttgataagaaatttaactaattttaaatgaaaaaaatttaacaaaaactaaataaaaacattgaaattaatgtgaaaaagtgagagagagaaactcaaattgaatttgaaaacattcaatgcaaaatgttctgggcttctgttattaagttttttttttttttgaaaatcaaaactctatttccaaaacccttttgtactctcccacattttttcaccaattacatttgtcagcttgcttctttcaatatccatatctacagtacttatatatgataaaaaaaaataaaactaacttatagattttaaatagatttgtaattatccaatagttaaagaatatatacaaaagaatcaataggtgacatgatcataacagtaaaatctctttaacaactttgacctccgattatttagcttcctgttattgcttttatagttatgtaggtttatcatgtctgttttagaaatcatgaagattatttagttgacttgttgttaccaaagattcatgtttatgctcgaaataatagaacaactatttcatgaaaattctcaaaaatatgaactatcataacaaaaatccctaagaaactgagaaatatttttcagtttcaaaacactatttttatacgtataacactaaaaaaggcgagctatatggtaaatctaatttatttttattctcttaaacagcttactatttcgtaagatttgaaccttttattacatcttatttcattttatattaaggagttttctctttatttttgtatttacacactaaacagtctacatctagttttcctagatcattcatcgctgccacaaaatctctgcactctatttctgaaactaggggtctacgcgaaaatattttgataagattgtttgttataaatggatacaattaaatgtgaccaattagattatacaatggaaatagaagaaaaagacaagagaaatattatcctttggttactcttcttttctatgtttataactaaaatttttgtatcctctcatttttcttgataggtgaaaattaatacaaacccaaagtaaaattcaacttagctgaaaaagtattattatattgttcaaaacaccagtcgaagcattagacttcctgtctacaaacatagttacatgaaatacacaccactatagagtagtaaataaaatcttattaattattaatcaagaggtaacggttaaaataaatttattaaaatatttatgtcattcactatatatttacattaatgtgtgtgtgtgtttatgcgtggagacttaacgttacacacattttttttttttttcttacacacattaaatttttttttttagtggtcaactggaaaaatgtgttttgtatttagtaaatctctttccttcttttgaaaatacttttgaagaatagagtatgtattttccaatagtgaagtaattcaaaattatcaaaaccattaagtttatggtgaaaaatattttgtaacccaaaaaaatgaattgtactgaaatttaaatttagattagatggtttggttcgagcttgtgatctttaatttcatatgattattagttttaagttagtgaacgctattttttttgttcgtctggttagaactatgtatgtgtaaataaatgtttattaatttaattaagttcttggcccaaaacctatgagaattaattagttgataaattacatgtgtcaaataggttatagttagtttctaaaatatttagtcaaagattttttttttgacatctatcaaataggttataaattatatgtgttttaattttattggttaaagtaaatgatcatataagttatattattgaataaatatatactaaatattactagtgttggttaaaaactatggaaaattttattgttatagaaatatttttgatggataaacattgtttatctattaaatatataaaagggaaagtttcttctatataaactcatgatgataagattttgagcaaaattaccaattttgttttcttcttttgtcaatacaaaggcttataacattaattgcttttattttgtggtaaagagatatcaacagattttagataataaattcatatttcttaatgaaaacattgttattgagggaaatttttttatcattgtatagaagattccctctctagaagaatattcatatgaaatgagatgctggatacccaactaaatatttgtattttttagaaattttgttagtaacgactgaatgtagtgcatcacattaattgaaaatgaatttatttgactatcaatataataataaatgtgttagtatctttgatttcgataaaatccacaatatatacatgagtgatcagtgtgtattgtgttgttggagactgaaccatcaacgctttttcgacacttcttcttcttcctcctttctctcttcatgcaaaatcacagttacaagaaataaacaaaagattataaatcaaaacataaagagacaaaaatgagtgatggtcgagttaacgcagatcctcaacaagaagagaacatggttaaaccaccggttaagagatctctcactctcctcatcgtgacttacttttttctcttcttcggctctatcgcttcgagccttctcgcgaagtactatttcgtctacggtggctcgagccggtgggtctccacgtgggttcaatctgctggcttccctctcctcctcatcctaatctacttccctcactacgttctcaaaaccaccactcgccgtcctttcacgcgcttcacgctccgccatctcatcttctccgtgttgatcgggcttgttctcggtttcaacaacttcctcttctcatggggaacctcgtaccttccggtgtccacgtcatcgcttctcctctcgacacaactcgtcttcactctcattttgtctaggatcatagtgaaacagaagatcactttctcaaacctcaactgcgttgtcctgttgacgttaagctctgttttgttggctcttgattcgagtaaagataaaccgtccggtttaaccaaaaccaagtatttcatcgggtatgtatccacgatcggagccggtttactcttcgctctttacctccccgtgacggagaagctataccgtaccgtttattgttacgcgatggtcatggaggtgcaactggtgatggaattcgcagcgacggttttcgcgacaatcggtatggcttgcgaaggcgggtttaaggaaatggttaaggaagcgaaccatgttttcaccaaaggaccaacattttattggacgtttgcgatactagcaaatgtggtgacgtggcagctctctttcgcagccacgtcagggatggtttacttgacgtcaggtatcaccggaggtatctgcatgacggcgttgctcgcgatgaatgtgataggaggtgtggtggcttacggtgacgtgtttggtggagtgaagattgtgtcgacggtgctatgtatttggggattctcatcttacacatacgggatgtatatgaagatgaagaaggaggagaaggagaagggagaatattccggcgtaaagacgacggaagacagcggagagatggaggtggaaatgggaaatgttaaagatgacgtggcggcggcggatgatagggcttgaagatatctgtgtgattgagacggccgttatgattattattaggaaggaagccaacaaaaaaaaaaaaagtagtagtatctttttgtgttctttctttttctcaccttatgtttttttagtaatgcatttgcttttgtttttcttgtttttttaggttgttttgtttttccttttctggttatttttatgaattatcctcttatcatggccacaactaatgatgttgtacactttttaagtgtggattttccaatgtcggttgataagtatgtatttttctgttatctatgggcttttgattggttttattagatatatggtctgttattttcccagtctccagtgacattgatacgaaaattatacaccctgtgatgacaaacaacaacaccgacgatatattgagaataaggcgacgataagtagtgttgattgtatcggatgctgaaaataagagtaactgtgacaatttatttttttatccggtgtgactcttggagtggtttcggtttttttatttttatttttattgttgataagaataggccaaaaaaaaaaaaaaagtaggcccaaaggaataggtccagtgtagttatttagtgaacaaaaaaaatattaactttcacctatacaaaaatgtgaatttttttttttgttggaaacactttttacaaaaagatgtgatattatttgatctaagaatatccagaatgtggtttacaaatgtataccacctgtttaatgttttgaccatgttaatttcctatagcttgcttcaaatccaactctcgattatacttacagttcagagaacaacaaaactaatcctctgttttacaacacatgactacattgttagtgttggtggcaatgccaaagctctaggagataattttttcaattttttgttcttggtaatgaaagtttttgagagagcatgtatttatttcatttataaggatttaatagattgtgttttattagtgtttgactttttatcataatataaaatttgacgggcgctggtagcctggtacatgtccttggcgccgtcgagttgagttgcactctggtagaatcttattccaaattacttcatgacattctccaagacagaatgatctcctctctttaagaaatttacgattatactgaagtatgatgaattttacaaatgatatactattatacaaaacatataacaatatatatacctgttacacttacagccaataacatataaaagaacaaaaaaggaaaaaagttgtcgtttatgggaaacaacataccaaacaaagaaaatgaaagtgctcacgatctctaagattccaattagacaaatattaatgatgatcatgatagttaattagagtgttaataaaatgagtgaggaaataaagaagagacacgcttaatggtgatgatgcagcttggcattaactcggtgttatttacgaacattgtctccttaatgctcctttagtttttgtatttttctttgagcactttaaaatgaaaaagatggtttttcttattatccttttttcttatggcttctggctcttcacttatattttaaactctagtaaaaatttcagagcccacaaaatccaaaatttttgttgcttttgattcaaccacaaattatatcgaaattgtgatccagtgtagggtaatgtatgtttccatgacgtgttttaaacaccacgctacaatgttaacatatcagtaattaatttccttaatttataaatctcatagttcctcataaatgaaaatgataaaatcgtttaaagattggttaattcagtccataagaaccatcaaagtgtattataagtgaatctacaatatctctatatgtactaaagaaattagaaaaaacgaggaagcagaattcatatgctatgaaacaatattgatagattgcatgtatatacttgtattcaattgtaaataataagtaagcagttcttcgtataggtacgcataaagcatgaatactcgtcgatctaatatttgtcaatcttaaagctgattaaattaattatctagatttttataaggttttgtaatatagatctcttttgatcgatggaatattttcaaaaagagatgagaatacagtgaatggacttttggggtgaataaaaaactgagggcatgattaacgaaagtgcgaatgtaatgaatgactaatgaataacgccattaagcaaccctaaaaatgatagagattggtcaaatatatatatagactaaaattaaaaaaatgcatgttgatatatatgtatatgaaaggggccttgcttcgttataggtttggagattagaaagagattaaattccaaagattatagatgacagatttgagctgtaatagggaggttcacacgtctattatcataccaatatacatcaaaactctgacagagttggtacctaagactgtgcctaagaacctacactagacacagagataaatgctatggtctgttgcttttaaaatattaattacgtttccaaggtttggggtttgggatatatactaatatctagagtagcataatatatagatttcgcattccttgatatgtagtttatcaatcatataatcttttagaaatcatgtttttcattgaataattcaagtttttgattgataaaattacaaaaccgtagaatcttggaatcatcttaacaaaacagaaaaagtagtataggtgtatgatgaaactattaaaagaggaaacaaaaaatgtaattaatacttgcaaagtgacaaaatttcttttagattgttcattaattttacggaattctttgtatatcaaaatcattttttttttaaggataaattttatggactgatcggaacagtttcggtagaaatgtaacaaagtgttacagagtagactatagatcaataatcctttatttcgtttttgtttagagtgattagccaaacaattatcatccataaaagaagggcacgcaaaagacgacttcggttatccataatcccattagaatataaaaatacaattaaggtgttataattgtgtctaaacaaattagccctataagagtccattaagcaaatagctaaactaaaataaaagatataattgtacttagataatcgacgtataaagatacatgtatccgtaggaccgtagcaaactatcttcgacctctaaagcaaagtgtgccgccttctttcttccttacataaaaaatttcaacttaaaaaatgtaatcaaaagtggacattcgtaatgttcatcacgactactagagatacacatgagattaatcattataaatttagaataataacataaacaactaaacccacaaatatatgcttctaatgatgaaatgattatgtggaagacgtataaaggttttcacttttcaccaactaaactcttcactaatcccccccaacccgcaccccacatatattgtctaatatttattatactattgtcatcagctatataagattgagaaaactagacatgagttataattcctttgaagtaaaattccatgagagcatactgaaactagctgatcgaattgttgatatattaataaggccccataaatattccaagtcttaatttatccaaatatcatttgataaatttagcttgttaggataaattatgtcatggaggtgtacatagtgtcatagtttacgtctagttttttggcatcagaagataactgctttattactatagtcaacacctaatccaaattcattacgttctatactaaaaagtaaacaagcaagactaaaatctttctgtatgataaaatcaatgggctttaaattcttttaatgggccataagcccataaataaattcgtgtttctttttttcctcgactgttcttcagatttcaatttctcttctctgtttcttcttcttcttcaattttcagatttgatagctctcaaaatcgttaaactacagaaacgaaaaaggaaattgcggcgatctaaggtatgcaatttgattagaacccaccacttcaattttttttacaccctattcaaagccaatttgattgaaactaattaaaagatgctatggatcgtgaaggttaaatccatggctgatgcacatttgaagcaaagaggctatatctcggcagttgcagctggactcaatgcagctcttgcagcaatctctgctaagttcttcacatctcttgtaagatgtgttgtttcttctttctaatcaatcactagtgtttttttagtttgatcagttacttaaaaagttttaatctttgacaggtgattaagtatggattagttgtaatctgcaatgtggttatgtgggcatgttatgtaaacagtttaagagctttgtcctctctacaagctactgtcacaaactttgctgctaattttctatcttctggtttagctggtctctttctttttcaagaatcgttatcgtttcgtgtaagttctgtttcttgaaaagtgatgatcaaagtctttagacattgacgattgttttgatgaaatgtgatatttggctttgtgagttgaatgagttttggctaatacatttttaaaacatcttggcagtggtttgcgggagctttatcgattactaccggagttcttatcctcagtaagtcgagtgtcgataagaaggtaagctcggattaatggagaatcgaatatgatagcttctgttttggagaaggctgcttttggttgaaaggaattagagatgttaagttgttctgagttttgagttttagaggttaagggaaacattatgttttaagtatgccaatttggttcaattctcttgcagctagagtctctaattatcttgacatttctcagtttttgacaaactattttagcagcgtgtaaaaaccgactaagtgaactgtgtatgtttatagaagaactgtttctatagttcgtcataaatagtcgagagaaagtaaaaaacgaagcaaacaaaaggaaatgaatagtaacactagctagaatttggatgaaactagtaagaaaataagatccagtgcacctttgggagctttgaatacagaggctgttctggtgatagatcgtaaatacctaagccaaagctggtggagttacccactactttcgttttaagaccaatcccacaccatcattcgaggtaggtttgtatatcgtagtaaatgttgcatcaatctacggaagaagaacaattcatctattatgccttaccatcatgcgattggaacctttcattcttatactccaacaaaaaaagagaaattattggttcacgtgaaactatttgccatcacttagttaaaatctatatcatatgcatttgtggtggaattcattatccttactattttcatgctccacacaaaattaaactagcttgtcaataaaaaaagatcaaaacattgattcatatgaagcgctatttaccatctaataaacttataactgaaatttatcatgtgattaatttgttccggaatttattattcaataccattttcaggctatacaacaaagtcatgcaagatattatactatactactagttacttagtttatgagggtaatcaaaacacatggttcacatgaaaatatgaattcagaataaagaattcaatactatttagctactagtccgagagttgatacatataggattctatcatttgaactttaaattgaggatttgccttttgtccattaccatgaatccggatccatatcacaaattgatgattaaactgaattactcgacccgacatacttccacttgggttcttggtcggcaaatatcatcaccatcgtgtgaaatgcttctagtccccacgctagagagtagagacttcaacacgaaatgcatcatttgccaacccccgaattcgccgtagtatctctacaacaaatcgttcatgcacaaccgtcctttttctgttgccgctggctttcccaatagtggatatgcggttcatcaaatcttttggatctgttcatgtgtcggagtgtttgtgtgttcatcttacatctagttaatgtattgtcctctttacttgatgcataaactttatcatgatgcttcttcttcttgcgtaatttataagtttatgcacttatatcaatcaaataaaaagtatctactcagaagaaaactaatcaacgtaaagtaaaccgttaataatttatttatatttagctaaatttagatttcatgataaatacgtggattccaagcaacccgacatgttaataaatatgaaagtaaaggactatatatatatatatggggatcaattaaatttggaacgttgattgctaccattttcttcgccagttgaatgatgtacataagtgtaacgcccgtgaaccagaaaatcggttaggatttatgtttaaatcgttcggtttaattggttagattaatggaaaccctagagtgtgtctataaaagaaggaaactcgaaattagagctttggttagccactttttgttttgtaaagaagaataagagagagaaggaaaaagaccaaaatcgttagagtttgggaggaaacagtttcgacatatcaaatcattttcgaaggtaatgaaatttggtaaagttattcccaagtctttcatcgtcattctccattttacagaagtggattttgatttaaactcgttgagttattcacagttttgtaagacacgttttctcagatgcaagttaaaactagcggggattataactgagatcgtggtcttgtctggtttccgatcggcacgagattttgtggaaggcttgatgacgtctaaggctagcgtttcaccggatagttaacggttagtttttattttagggttttgtctttgagactgtttgtctttgatttttatgtccagtttgcttcaagattgtttttggttgtgtgacttgttgtaggatgtttctggactgtttcagacgcaaggagagtttctcctggttataattgttgttagaatcagcttgttaaggtgagtgcgtgaacataagcttatctaagcgattggtttgtatgactagttttatgtaatgatatatagatgtggtgaatgtgtttttgggtgaacataacaaaaataacaaaccagtcatttaacagttcacccaaaaacacattcaccacacctacatatcatcacacaaaacaagtcatacaaaccaatcgctcagataagcccatggtcacacactcatcttaacaagctgattctaacaacaattataaccagcatagactctccttgcgtctgaacagtccagaaacatcctacaacaagtcacacaaccaaaaacaatcttgaagtaaactggacataaaaatcaaaaacaaacagtctcgaagatgaaactctaaaataaaaaccgactgttaactatcaaatccctccggtgaaaagctagccttagacgtcaaaaagctttccacaaaatctagtgccaatcagaaaccagacaagaccacgatctcagttacaattcccgctggtcctaactcgcgtctgaaaaaacgtgttttacgaaactgcaaataactcaacgagtttaaatccaaattcacttttgtaaaatggagaatgacgatgaaagacgtggaaataactatactaaatttcgttacctttgaaaacgatttgatatgttaaaactgtttcctaccaaactctaacgattctgtcctttttcttctctttaagtggctaaccaaagccctaattccttcttttataggcatattttagggtttctattaactcaaccgattaaaccagacaatttaaatataaatcctaaccgattttatggttcacgggcgaggttaagttgttttattttttttattatgtgtttgtctttgtctagtttgttttcatgggctataattttctgcaaaaaatgtcgatttttgttttatgtaacttatgttgaagaggggaaaattccaaataagtacttcagtgtggagtaaaagctaaaatatctactaaatcttatttaagaatccaacaaaatttggtccaggccatatacttgcggtctctatgatcccatcatacctagctactccaagcctctaccataaaatcattatttatatttctgctgttctatagtttgtttgttttttctttttttctttaagcatatttaattttttgttagtaaaatgttctatagtttgttgatcgcaagacaaaaacttgtgccatatctgttgtattatgtaattaaggatactgttaagcctcaatgtccagggtctggggtatttggacatctcttggactccaagcgaggaagggaaagagatccactactatatttatatgttttacttaccatatcttggatccacgagggtaagagcagcaaaggaggacattttcctctctgctctcttcttcctttttttttgtttttgtttttgtaaatatgtgtgtggtaatcttatttctggttaaagtgtgttgtctcctgaaactctcaacgccaaatataactaaattattgtttgtattatttagttccatgttagtttttctactgtgaacatggaatttttgttaaacatttgttgatttggacgtttgtggaacgtttcaaagaaccgcttgtcaacatttgcacaattgcattctcttattggttaacacagtttccgggattctagaacgccaaaaaagcacagaaggtttaatacttattgttttgtctaaggagaaggaaaatgcgcaatactttcttaaaccttttgtaggtttatgaagtgtttgatttttcagataaaatgagaatcaagttcgatgtaccatgttcacatgtgactttgtactatttcgaatgtttcttggcaagtaatttcgaatccttttcgtaagtagaactaattccacatgtcacaaaagtgttgacttacctatagaaaaggcagaggaacacatacacacacacaaacgcttactaaactcaaaagtcagaatgataaggtcacaaactacgtgcaaaccatttcatcggtccccatctaacatcctaaaattgaaaaatcaaaccttatattttttccttgaattctcattttatttgaatatattttcgatctatagacacacattaatcatgatagtaaccacatgtcaaaatcttaggacaaagatagaaccgacatgtaagtcactacttttgccatgaacgtgcttaccattttcttttatattcctactacttatatctctatcctctccatattttttacccgtaaaattataaacccattttcaaaatctgatcttttttttttcgttgacaaatctagttatgcctcctccggcaatgcttgcgtttgacgatggtttagcccggaaatctaacgataatgagtggcaaggtttcagagtttttccaggagaaaatactaaccctaaccctaatataaatttcttggttaagaaggcaattctgcagaacgagaaatcaatcactcctcttttctcccgttcgtcggcaagagatgatagcttcagaattgtgttgccgccggcgttgcctcctcctagagactccaccgttccgcttcctatgcttccggagccgatgagagtccggaagaagcttagccaccaagaatcagtcatatttatgagcaaatcgcgtttcgcagagaaaatcctctacaaggaagaagatttcaaatgtaacgccttctgcttgtctctacctggcttcggaaagaacaagctgattagatcttcttcgaaacgccaaaattctatggagaagaagatgatcagagcttcttccttcacgggatcaactgtttctgtacgcgcctcgctagagaaattcgaatgcggttcttgggcatcgacgacagctcttattcaagataacggtcggttgtttttcgattttccggttgagatgacgaagtgcaacagccgcggtggaaatggaggaagagatgtgcaagaaccggtgacctctggtttcttattcgatagagaaacagagactttggctctgagaagcgttttaaagacgaggagtactcgtgatcaccggagatcagctgagtcttcaccgcaacgtcgtgttaggttctcgacttcgtcttcatcggcttcagtttcgtgccctacttcgcctcgaacttgtatcactccacgtttgcgtaaggctagagatgacttcaacaccttcttgaccgcacaaaacgcttgaataaggaaaacaaaaacagaacacagagttttatttataatatgtatgtatgaaatgagtgtaatgtatctacggatgatgtgtaaatattatggagagaaagagagtgttgagtctttgagaaatcaaaatcgataaagggtttatgattctaaaacaactcaaaaagtataatttttagtgtttgcttagaagctctatctccaatttttgagggtttgtttggctttgttgaatctttatgaaataaatttgaccaagagtagatgattatgagagtattttataatctatgtgcttcacttttgcatcgaagatctgttttcagactttaatctacaatttttagagtgtactcaatgaggtatcaaaatcaatgaaatgatggttactagagtaattgcaaaaattcatgtatgtttccaagctctgtttgtgacttgccttttcaggttttaaggtttatttttaggctattttccgttaatttttttggttggtttaggagatcaaaaacttcataaaactggacaaagtgttggtaacataacctaaaaactgtataaagagagcataatacgatattcagacccaaaacgccaaataacgcaaactcgataaggaaaagagggtttaatgggttagtgaattcttcagcgttttcaaaacggttgatttcagtttcttgtatcgtagatgacacgaacaacgtcaacaatctgagctctgcaaatcggacatttccctccactccaatgtagttcgttggcacattttaggcacatgcacatatgtccacacctgtacaaaaccgcctcgacctgtgtttcgtcgcagacgcagcattttcgtttcattgggttttcttggtgagccttgtgttgcaagctcgcgttagcatctaaacacgttttgacagaatctcgtagtactgacatttcttgctgaagctgttggatctgtgatctcataccgcttatcagctccatttcctgaaaacgtttatatgcggctcaatgagtttaccactagtgcggttgcgagtttctatagtataacaagaaatcgataaacactcacaggtgactgaggattctgaacaaccaaggcaggagtggaagtaacatcagtgtcttgagaactccatgatcctgcaggagacgatgcagatatatgtgaagacgacgattggctcaagtcatctctatcatcttgctcttcacctcctcttaatggctcttctttgatttcttcatcaatttcaaaatttacttcctcctcttcttcttgttgcaattcccattttttggagtgcttatccgagtgtgtctgtacacgggacatcatgagattatcgatcttctctcgcaacccgctgtcgaggaaatctgtcaccgttcttctgtattaagcagggaaattcattttcttagtcagttattaaccattaagaaacatgagcttgtcaattttgatggttacttaccgctcaaggagtctgcatatgtcatctttctcagacctagtgttcattacttccaggtaccgtgacttcctcaattcctcccagtaactccgaggcctagctatttcactaagccagtcgtcgttatattctccataataagactgctcatctgcatactcttcttgttctccccatctattcaaataggatgtttcttgttgatcaaggcactggtccatctcattactctcatgaactagaccttctgtttctcgagtttcttgcatatactttcccacattgttctcgtcttgattctgtctcaaccgcgattctcgagataaatattcactcgggctagtattttcttcttctttcttttcagacttgccatcgttgcaagtttcttctacttctcttgtttcttgcagctgaaggcaattcttttgtgaatcaactgttccacttacagattcttcttccttacataacgttgcttcctctatcttgcggttacggggtctcaaccgctctgcgaaaaaagcttcgagagtaacaccaccatcctttaacctcgtgcttgtggtagtagttccttctgtttcttctacggatttgttgttcatctcagtggatcgttgatgattcttcctcttatctgttgcagccgcagagtttactacgttcgcatgaaatttctccctgcgttgccaatcaaagattgaaaatctgaagaaagtaaaccctaagaactaaactcaaaacataaaacagagaatctgaaaaaaccttaaatgcagaacagcagagcctgattcaattcggtttaatccggttgtttttgcgttagaccggtttctatcttgaatcacaagacagcgattgaggttccttaaccttagcattgactggttaaataatgtaattagaaaaaccatttagtggattatgaataaagtcacaaatatgttagttatttttatcaaaatagtgaaaatataatttacctggagacgaccacgttgagtaaacctagaaactgcgttgcgttcaaaaagcgaatccaattcacggtggcgatcacgttccatttgcataagaaaatcggtaaacgcttgtcgtcctcgtatcttcggagagaaactaaccaccggaaaattacttttctccgatgacgacgaagtgcaataaggcctcggcgttctgataatctcgagtccaccgccaccgccgctgccattatctccagcggttcgtttcttgtcttcgttgctaagcctccgaattaggtcagcgactcgtccccatttactttctccggaatcagaaaccaaaccatgtgacctagattcaatctccaccgttcgatcagcaatttcagaatctccatcgattgatgaagattctgaaagaccggaatcttgaacactaactcctgaatcgctccgactactactactcgccgtagattgactgctactcggcgagtttccaccgttggatcggtttagcctcgcctcccatatctgaaccaaagaagaagccacaagattgtcgtttctcttcgattctaacggagattcaagaacacgattgttcttgttattgtgagtttcgatccaagaatcaactaaattctcatcggagacatgagatttcaaaacctctttcaccggagatttcagattcttttgaaaaacgccagcgttttggttacgatctcttaagattaaaccgaatctctgaggagaagacaccatttttttacgatctaagaatcgaacaaacgaacataaaatcaaataatcattagagtttttgaatcgatcgaaagaagttagaggacaactctgttttctctgtctctctacaagaagaagagaaaatggatttgtgttagtgaagagacagatttttctctctgtttttttttcctgttaaagaaacagaacaacaacaaacaaacggtggagatacgatgatgatgaagaagcaaaacagaaccaaacagtatttgtgcttatctatttagtaagaggacttataaatgttaagagtcctaaaatggctctgttttgtcccttaaactggggaacgtgtctgtaaaacaaggcaataaagaatgaggtgtaagaatacagagaaagaaaagccttatgtggccaaaagtgataaattgttatagaaaaataaaaaagctacttataattttggacaaaattgaatttgaaagatattgtataacacatgtcattatactggtaaaagcatttaattgtgtaatgcatgaaaaaattaacattggattgttatactaattaaagggtgattaaattatttaataattaaggctcctaaatatgctagagtcaaaaaggagccgttgaggaatttagccgttgtcgagtgggaaccatgcactttctggattttatgccacatcataaatcaaattgaagaactaaagataacaaacaattttaaattgtataactgacaggaacaaaaacttttaagcaaagtaaaaataatttaattagagaaaattagatgttcaacccaagtttcatgtagtgtgcgattttattgtagtgtggtcaataggcccaggcatagtggtcaatgtcgtgcttgggttagtcgaatagagagagaacttaggacgagttgtgatttgtgactcttataaaacgatttaagaaaaaatagtctctatacaaaataacgataattgaaaccaataataaggttcacaaccgatcattttcggatcccgatgagttaacgattagtcaacgatagagtaaaacgaccgattaatcgagacttagtgtctatgatattggcacatacgacatatatttcgtatatatatttcaggtaactgggtatcgtttatattagttgcggcatatgtgataatgtattcttccacacttcgtatagctagctgacaatcttttttcttaaagtttaagtattaggaagtattatccggtagataaagaagatggacgattgaaaaagcgattgatacgatttttcttctgtgatttttccgaccggccggcgttggttccgacttcgattgtactcttttctcctttataattctagcaaatattagtttacatacatatatttcagttattaacaatgagttctagagaatcaactgcttttggttggcctcttttcacactgttggcgattttcatgacccaaaaattgagttttctacaattatttgtaagaaatataaattataaaaactagaaaaatatatgaaaaagtttaaggttttgactagtgagaatttgttgtatagttcaaaaaaactcaaaatttgaacgtttgaaaacttgttgagatgcatcaattttcaataaacgtagcctatggtgaattgtttttttttttttgtcaacatgtctctaatggacctatttttccgtgctaaaaaatgtgcagaggtaatatcgctatttttgttagaggatctgagcaaattcattattaatgattgtgcaaaaaatttgttaatttcgatatatcacattttgctttacggattactcgaaaacatactttgatgtcatcatccagtgtatatatacgtatgttaattgtagacaacaaaataaaataataatagtctcacataaccgaccaaaaaacaaacaaaattaaatcaatggaagttgttgacaaataaattttacaattaatctaatccaaataagtcaaaaccctgatttcagtaatgtaaagatcattatatcattttttctcttgtaaaaaggttttttaaaattatactattaatatatatcatttgatcaaaaaaaaattatatatcataaacattatatacgacatgcaggcaagtcactcgaatattcaaatcttaaagttgtgcctcccacgtaaaagcatcacattagtttccaaacccaattgtatatataaattactacacaacacacctctcatcaaacaaattcatcaaagccaatcaaattgagagagatatcaagaaagcaaaataatgaagttggccgtggtctcagtcgttgtcatactcggagttctcgtggcttggccggtatcggctggccgaaaagacttacctggagcgggaggatacggaggcgatgacgatgatgatacaaagtcattgttccctttggacaacctattatcgttgaattattatgataggatttgtccagattttgagaaaatcgttgttacgaaagtgagggaatggactaagagtgactcttcccttggtcccgccctcctccgccttatcttccacgattgtggcgtcacggtattgcaattaatcgttcaattatatatagccaatgttttgattcatatatgatttacattgttctaaaaatgggtttcactattactctattagagattagaattgttcttccgtctatctagaccatacttggaacattgatagtatatagatataagtttcttaatattgaagacggacttgcgcactttattctgtgtataaacgcatctgagtgttttgcgcatatctaatatagttatgcattttaaaagataacaacttgacatttttgtacatgaattaacacaactttcagggatgtgatgcgtctgttcttctagactacgaagggacagagagaagatctccggctagcaaaacactaagaggcttcgagctaattgacgatatcaagtccgagatggagaaatcatgccccggcaaagtatcctgcgccgacatcctaacatcagccagccgtgccgccaccgtccaacttggtggtccttactggcccaacgtctacggtcgtcgtgactccaaacactcttacgctagagacgtagagaaagtcccttcaggccgtcgtgatgttaccgcccttctcgaaacgtttcagtcatacggtctcaacgtcctcgacctagttgtcctttccggggcccacaccatcggaaaagcgtcctgtggcaccatccagtcgaggctttacaactacaacgcaaccagtggttcagatccttcgattgacgcaaaatacgctgattacttgcaacgcaggtgtcgctgggcctctgagaccgtcgatctcgaccctgtaactccagcagtgttcgataatcagtactacattaatcttcagaagcatatgggagttttgtcgactgatcaggagcttgttaaggacccaaggactgctccgcttgtaaagactttcgcagagcaatcacctcagatattcagacagcagtttgctgtgtccatggctaagctggtcaacgttggagttctcactggtgaagatcgtgtcggagagatcaggaaggtttgcagcaaatctaactccagagcttactaaattataatcatcatccctcatgagaaggatcttttgtttcttgaaataatttcttgtttggtttttgagctcttttctattgcaattttgtaatttgttgtatgaacaagaacaaaaactgtgaattattttcgttgcaacttcgatttacatgagttctacacttaccgtcactatttgatcaagacaatacttaatatcagtccaacatgatcaatttatgtcaaagggttcatgatgttaatggtaataaccctaaacgttaactctaaatcaagttgtgatgatagcttttggtgcaagaaaaatgaaagatgggagacacaattcagacgcgatcacgtttttagggtttctatagtactgaaactcatggaaaaaacacagtacaaaagatgctatattctaagacattgaagaaccccaaaattaagagagaacataaattatgcaagtagaaaacaaacccagtagaagaaagccaagaccagttttagtttcgtttgcctcgaaggacacccttactacgacgattcttcatccccagcttaaacttcttcttcaacttcttcccaataggttttagcgacttgtttttcttctcatcatccatttcctcatctacaagcaaacaacaatagtatcccaaaacagaacaaacccttaataccaaaactttcaaagatatacttgtagatgcacacaaaattcaatataaagaaaccaaacaaagcttttagagcgatacgtttctcttagagtaacaaccttcccaagagtaatgaactaacaagctccttcaaagatttcaactaaaatgaatgattcagttaaatttcagattctaaagctt

SEQ ID NO: 67 - DNA, 102397 bp, Arabidopsis thaliana
gaattcttcagcgttttcaaaacggttgatttcagtttcttgtatcgtagatgacacgaacaacgtcaacaatctgagctctgcaaatcggacatttccctccactccaatgtagttcgttggcacattttaggcacatgcacatatgtccacacctgtacaaaaccgcctcgacctgtgtttcgtcgcagacgcagcattttcgtttcattgggttttcttggtgagccttgtgttgcaagctcgcgttagcatctaaacacgttttgacagaatctcgtagtactgacatttcttgctgaagctgttggatctgtgatctcataccgcttatcagctccatttcctgaaaacgtttatatgcggctcaatgagtttaccactagtgcggttgcgagtttctatagtataacaagaaatcgataaacactcacaggtgactgaggattctgaacaaccaaggcaggagtggaagtaacatcagtgtcttgagaactccatgatcctgcaggagacgatgcagatatatgtgaagacgacgattggctcaagtcatctctatcatcttgctcttcacctcctcttaatggctcttctttgatttcttcatcaatttcaaaatttacttcctcctcttcttcttgttgcaattcccattttttggagtgcttatccgagtgtgtctgtacacgggacatcatgagattatcgatcttctctcgcaacccgctgtcgaggaaatctgtcaccgttcttctgtattaagcagggaaattcattttcttagtcagttattaaccattaagaaacatgagcttgtcaattttgatggttacttaccgctcaaggagtctgcatatgtcatctttctcagacctagtgttcattacttccaggtaccgtgacttcctcaattcctcccagtaactccgaggcctagctatttcactaagccagtcgtcgttatattctccataataagactgctcatctgcatactcttcttgttctccccatctattcaaataggatgtttcttgttgatcaaggcactggtccatctcattactctcatgaactagaccttctgtttctcgagtttcttgcatatactttcccacattgttctcgtcttgattctgtctcaaccgcgattctcgagataaatattcactcgggctagtattttcttcttctttcttttcagacttgccatcgttgcaagtttcttctacttctcttgtttcttgcagctgaaggcaattcttttgtgaatcaactgttccacttacagattcttcttccttacataacgttgcttcctctatcttgcggttacggggtctcaaccgctctgcgaaaaaagcttcgagagtaacaccaccatcctttaacctcgtgcttgtggtagtagttccttctgtttcttctacggatttgttgttcatctcagtggatcgttgatgattcttcctcttatctgttgcagccgcagagtttactacgttcgcatgaaatttctccctgcgttgccaatcaaagattgaaaatctgaagaaagtaaaccctaagaactaaactcaaaacataaaacagagaatctgaaaaaaccttaaatgcagaacagcagagcctgattcaattcggtttaatccggttgtttttgcgttagaccggtttctatcttgaatcacaagacagcgattgaggttccttaaccttagcattgactggttaaataatgtaattagaaaaaccatttagtggattatgaataaagtcacaaatatgttagttatttttatcaaaatagtgaaaatataatttacctggagacgaccacgttgagtaaacctagaaactgcgttgcgttcaaaaagcgaatccaattcacggtggcgatcacgttccatttgcataagaaaatcggtaaacgcttgtcgtcctcgtatcttcggagagaaactaaccaccggaaaattacttttctccgatgacgacgaagtgcaataaggcctcggcgttctgataatctcgagtccaccgccaccgccgctgccattatctccagcggttcgtttcttgtcttcgttgctaagcctccgaattaggtcagcgactcgtccccatttactttctccggaatcagaaaccaaaccatgtgacctagattcaatctccaccgttcgatcagcaatttcagaatctccatcgattgatgaagattctgaaagaccggaatcttgaacactaactcctgaatcgctccgactactactactcgccgtagattgactgctactcggcgagtttccaccgttggatcggtttagcctcgcctcccatatctgaaccaaagaagaagccacaagattgtcgtttctcttcgattctaacggagattcaagaacacgattgttcttgttattgtgagtttcgatccaagaatcaactaaattctcatcggagacatgagatttcaaaacctctttcaccggagatttcagattcttttgaaaaacgccagcgttttggttacgatctcttaagattaaaccgaatctctgaggagaagacaccatttttttacgatctaagaatcgaacaaacgaacataaaatcaaataatcattagagtttttgaatcgatcgaaagaagttagaggacaactctgttttctctgtctctctacaagaagaagagaaaatggatttgtgttagtgaagagacagatttttctctctgtttttttttcctgttaaagaaacagaacaacaacaaacaaacggtggagatacgatgatgatgaagaagcaaaacagaaccaaacagtatttgtgcttatctatttagtaagaggacttataaatgttaagagtcctaaaatggctctgttttgtcccttaaactggggaacgtgtctgtaaaacaaggcaataaagaatgaggtgtaagaatacagagaaagaaaagccttatgtggccaaaagtgataaattgttatagaaaaataaaaaagctacttataattttggacaaaattgaatttgaaagatattgtataacacatgtcattatactggtaaaagcatttaattgtgtaatgcatgaaaaaattaacattggattgttatactaattaaagggtgattaaattatttaataattaaggctcctaaatatgctagagtcaaaaaggagccgttgaggaatttagccgttgtcgagtgggaaccatgcactttctggattttatgccacatcataaatcaaattgaagaactaaagataacaaacaattttaaattgtataactgacaggaacaaaaacttttaagcaaagtaaaaataatttaattagagaaaattagatgttcaacccaagtttcatgtagtgtgcgattttattgtagtgtggtcaataggcccaggcatagtggtcaatgtcgtgcttgggttagtcgaatagagagagaacttaggacgagttgtgatttgtgactcttataaaacgatttaagaaaaaatagtctctatacaaaataacgataattgaaaccaataataaggttcacaaccgatcattttcggatcccgatgagttaacgattagtcaacgatagagtaaaacgaccgattaatcgagacttagtgtctatgatattggcacatacgacatatatttcgtatatatatttcaggtaactgggtatcgtttatattagttgcggcatatgtgataatgtattcttccacacttcgtatagctagctgacaatcttttttcttaaagtttaagtattaggaagtattatccggtagataaagaagatggacgattgaaaaagcgattgatacgatttttcttctgtgatttttccgaccggccggcgttggttccgacttcgattgtactcttttctcctttataattctagcaaatattagtttacatacatatatttcagttattaacaatgagttctagagaatcaactgcttttggttggcctcttttcacactgttggcgattttcatgacccaaaaattgagttttctacaattatttgtaagaaatataaattataaaaactagaaaaatatatgaaaaagtttaaggttttgactagtgagaatttgttgtatagttcaaaaaaactcaaaatttgaacgtttgaaaacttgttgagatgcatcaattttcaataaacgtagcctatggtgaattgtttttttttttttgtcaacatgtctctaatggacctatttttccgtgctaaaaaatgtgcagaggtaatatcgctatttttgttagaggatctgagcaaattcattattaatgattgtgcaaaaaatttgttaatttcgatatatcacattttgctttacggattactcgaaaacatactttgatgtcatcatccagtgtatatatacgtatgttaattgtagacaacaaaataaaataataatagtctcacataaccgaccaaaaaacaaacaaaattaaatcaatggaagttgttgacaaataaattttacaattaatctaatccaaataagtcaaaaccctgatttcagtaatgtaaagatcattatatcattttttctcttgtaaaaaggttttttaaaattatactattaatatatatcatttgatcaaaaaaaaattatatatcataaacattatatacgacatgcaggcaagtcactcgaatattcaaatcttaaagttgtgcctcccacgtaaaagcatcacattagtttccaaacccaattgtatatataaattactacacaacacacctctcatcaaacaaattcatcaaagccaatcaaattgagagagatatcaagaaagcaaaataatgaagttggccgtggtctcagtcgttgtcatactcggagttctcgtggcttggccggtatcggctggccgaaaagacttacctggagcgggaggatacggaggcgatgacgatgatgatacaaagtcattgttccctttggacaacctattatcgttgaattattatgataggatttgtccagattttgagaaaatcgttgttacgaaagtgagggaatggactaagagtgactcttcccttggtcccgccctcctccgccttatcttccacgattgtggcgtcacggtattgcaattaatcgttcaattatatatagccaatgttttgattcatatatgatttacattgttctaaaaatgggtttcactattactctattagagattagaattgttcttccgtctatctagaccatacttggaacattgatagtatatagatataagtttcttaatattgaagacggacttgcgcactttattctgtgtataaacgcatctgagtgttttgcgcatatctaatatagttatgcattttaaaagataacaacttgacatttttgtacatgaattaacacaactttcagggatgtgatgcgtctgttcttctagactacgaagggacagagagaagatctccggctagcaaaacactaagaggcttcgagctaattgacgatatcaagtccgagatggagaaatcatgccccggcaaagtatcctgcgccgacatcctaacatcagccagccgtgccgccaccgtccaacttggtggtccttactggcccaacgtctacggtcgtcgtgactccaaacactcttacgctagagacgtagagaaagtcccttcaggccgtcgtgatgttaccgcccttctcgaaacgtttcagtcatacggtctcaacgtcctcgacctagttgtcctttccggggcccacaccatcggaaaagcgtcctgtggcaccatccagtcgaggctttacaactacaacgcaaccagtggttcagatccttcgattgacgcaaaatacgctgattacttgcaacgcaggtgtcgctgggcctctgagaccgtcgatctcgaccctgtaactccagcagtgttcgataatcagtactacattaatcttcagaagcatatgggagttttgtcgactgatcaggagcttgttaaggacccaaggactgctccgcttgtaaagactttcgcagagcaatcacctcagatattcagacagcagtttgctgtgtccatggctaagctggtcaacgttggagttctcactggtgaagatcgtgtcggagagatcaggaaggtttgcagcaaatctaactccagagcttactaaattataatcatcatccctcatgagaaggatcttttgtttcttgaaataatttcttgtttggtttttgagctcttttctattgcaattttgtaatttgttgtatgaacaagaacaaaaactgtgaattattttcgttgcaacttcgatttacatgagttctacacttaccgtcactatttgatcaagacaatacttaatatcagtccaacatgatcaatttatgtcaaagggttcatgatgttaatggtaataaccctaaacgttaactctaaatcaagttgtgatgatagcttttggtgcaagaaaaatgaaagatgggagacacaattcagacgcgatcacgtttttagggtttctatagtactgaaactcatggaaaaaacacagtacaaaagatgctatattctaagacattgaagaaccccaaaattaagagagaacataaattatgcaagtagaaaacaaacccagtagaagaaagccaagaccagttttagtttcgtttgcctcgaaggacacccttactacgacgattcttcatccccagcttaaacttcttcttcaacttcttcccaataggttttagcgacttgtttttcttctcatcatccatttcctcatctacaagcaaacaacaatagtatcccaaaacagaacaaacccttaataccaaaactttcaaagatatacttgtagatgcacacaaaattcaatataaagaaaccaaacaaagcttttagagcgatacgtttctcttagagtaacaaccttcccaagagtaatgaactaacaagctccttcaaagatttcaactaaaatgaatgattcagttaaatttcagattctaaagcttagcttaaattcgattcttcaagcgttaccttatctaaaaccaaatcgtacaaaatcaaagaggcaaatttagaggaggcataccactatcgttggcgattgtagtggaggcagatgcagactcagaggaaggcgtcgcaacttccataaacggagaaactggggcttgacgaactggtaacttcggagcagcgagtgcggcttcaatagcggcggatttggcgtcttctctcgttagagtgaatgattccttctccactatttctcttcttattgctctcaatctcttcaccctcttgcatctcattgatttcgccattgttgtgcttggggagatttgaaatcagggttttgaggcaaaaggggttttaatttctgcgtcggacttcttttataaagtctaaacctaattgaggaacaaaggaattgctccggttctgtttggttacgagtttaaatgtatcctatccaagtttagagcctattcggaaaattattggcccaatttaggcccaaataaatagagaagaacgcttcgaatggaaaacccgataatacccttcttcgtctgcgtgcagatcacactgtttgatttctgaggagaatccattgtttccatttgaagaaaactctaactttctcgttgaagctttgagctctctacctctttatctccgggttagttttgatttggtgtggatcggtagtggaattttgctcttcgtcttgctatttcgtatgcgttgttgtttctcgattagcgaatcagatctttgttcttttgttagatttgataaatttcgatagattttaggtttggattgattgtgttattgaacttgaatgcttctggttgaatcatagatctagttttggctttgctttgttatgcattgtcgtgattgaaattcgaaaaagcaatggaagtgattacgaattgagattatgactttagaatcgatattaggatctaagaagattctgtggaaattgaaattgaaattttgaagaagattctgtggaatctaagaagtaaatgttgataatactgtttggtttcaagagttaagagtttagaagttggagatgtgtattgactgtggttggtttggtttgagataaagatgtgattgttttggtttgatggcagagatgtataataacatgggacctcaaccggggatgccaagacctccaggaaaccctgagcctggtccatttggtaatcctttcactggagctggctcgggttttatccgtggtggtttgggagcgtatggggagagaattttaggatcgagctctgagtatgttcagagcaatgtaagtgaactctttatgattccatatcacacgtaatatctggttttcatggttttgaacttgttgttatcgcaatggaatagataagccggtacttctctgatccgcaatactatttccaagtgaatgatcaatatgtgaggaataaactgaaggttgttctgtttcctttcctacaccgggtaagctagtcttctcttttcttcttctgtttgggactttctcttattatcagccatttaattgtactattgtgggttctgcttcaaaccctcagggacactggaccagaatatctgaaccagttggtggtaggctctcatacaagcctccaatatatgatatcaatgctccagacttgtacattccctttatggcatttggtacctacgttgttcttgctggtctttcattgggacttaatggaaagtaagtgttgtgcttcgtctccctccctatgattccctctaaatagttttctgtcttaggtcttgaatgattgttgtggacagagtgattattaatccatttcaaacctgattggtctctaggtttacaccggaagctttgaattggctgtttgtgaaaggattggttggttggtttttgcaagtaatgctcctgaaagtaacacttctatcacttggtagtggagaggcaccattactagatattgtggcatacggagggtatgcttttgctggtctgtgtcttgcgggctttgccaaaataatgtggggatactcgtactacgcgttgatgccatggacttgtctatgcactgggattttcttggtgaagacgatgaaacgtgttctgtttgctgaagtaagaagttacgattcgagcaaacatcactaccttcttctgtttttagccttggtccagttcccacttttgatatggcttggtaacattagtgttaattggcttctttgaaatgaaaaagacgtttttgtgaattcttattggtatttgtagcgtaatttgaacgttcttggcatttggcaatgtatgtttgttgtctattctattcatttgcatgacgtgaagaaaaagttattttgaacatcattgtattagtctcttgctactttttgttaccattttatctccatttgtagaaagtagaaactccaattcgataaaataaaatatacacatttctatcttcctgttgtatatgaaaaaaagctggcatgagtctccaaccaatgagacaatttaaattatggattgacatgtaatcattaatcaaaatcattgttcactgaatataataattttctctcatcccacaagtagaagatataaatatttagtactaactataattcattctaatcattttacacttagagacatagtctctcagctaaataaaaattgcatgtttgtaaccatttccctgaacttatattaaaataaacacatcatgatctattaaaaaaacacatcatattcttggtctgccttaaatatattggtaataaatagtggtaaagttaacaattaggttggataattcattaaactaatcaatattgattaagcaactattcatgtctcctagtaattgtcacatcgtcgtttggatgattctaagtttctaacttaacccaaatgctacttcaatagactttgcattttaaaaagtcaatgaagtaagcatagtcttgatctttgttatcattataaattcaaaagtatttacatatgatgtgtccggataaaaattgaaacttgtggacttaaacttaagccacccatacctttttaacgttttgccacttgattaatcttcaagattagagctttgaataaaaatgataggatctcacgattgccttacattctaagaaaacgttaatacttttttttttttttctcgtaaatcattttaaaattgagagaagagaaaatgaaagaaagagaagtttgttgaatcagtagttgcagagacatggttagttccgctgactctgtcaagtcatctctttctctcccgtttactttacgctcacatctctttttctccacaaggacaaaaaacagagtcattcattttttctctcaaactctgtttaagaaaaatcgaaaaaaatcattactttccgatttgctttctcactttctcatgcaacaaacgtaaaacccacaaaagaaattcgaagcacaagttttgaaactctgtttttttattgatcagaaacaatgtctttgattcataaaggagccaccttggctctgtttctagcgttgactatggtggtcaacggagttttcgggagattcatcgttgagaagagtagcgtgacgattctaaaccctttggcaatgcggtctaagcacgacgcagccattgctaacttcggtgttcctaactacggtggttacatgatcggctccgtcgtttacgccggtcaaggagcttatggatgtgactcttttgacaaaactttcaaacccaaattccctcgtcctaccattttgatcatcgatcgtggaggtaactgtttcattcaaattgttccaaattgcaagtttttggttagaaatagaaagttttgtcatttacatgaaagttttgttgtataatatagcaaaagatttctcttttatgacttagttttacatctttcatccaaattcttttgcaagttatataatcaaccaaatttatggttaagagatagaaagttttgtcatttacataggagacttgtcttaacctttaaagctctctcttttaagtcttagtttacatctttcaatctccttttgatccaaatattacttcaaatttggtaatgttccaactttctggtataccagacttgtctcaatcttaatttagtttgttgaagaacttaaaagctttctctttttaagttcattgagattgagacaagtctttctatttgatttgttccatatttctgtgtagatgtagaaagttctgttatttacatatgtgacagaaatggtaaatatttggttttgattcattgttttgttttgcattagagtgttactttgcattaaaggtatggaacggtcaacaatccggtgtagcagcagttttagtagctgataacgtcgatgagccattgataacaatggattcacctgaggaatccaaagaagctgatgactttatagagaaactcaacattccatcggctttaatagacttttctttcgccaatactctcaagcaagctcttaagaaaggtgaggaagtagtcctgaagatagactggagtgagtcattacctcatccggatgagagagttgagtatgagctatggactaacacgaacgatgagtgtggtgcacggtgtgatgagcagatgaatttcgtaaaaaacttcaaaggacatgcgcagattcttgaaaaaggaggatactctttgttcacacctcattacattacatggttttgtcctaaagattatgtttctagcaatcaatgtaagtctcagtgtataaaccaagggaggtattgtgctcctgaccctgaacaagactttggtgatggatacgatggtaaagacattgtcttcgagaacttgagacagttgtgtgttcataaagtagctaaagagaataaccggtcttgggtttggtgggactatgtgactgattttcacattagatgttcaatgaaggagaagaagtatagcaaagaatgtgcagagagagttgttgaatctctaggtaagggacatcacaataatttttagtaccctttcttcacattcagcgtcttgagttttctcttattctcaggtttgccacttgacaagatcaagaaatgtattggtgatcctgatgctaatgtggagaatgaagttttgaaagctgagcaagcacttcaggtcttggctctcttcttaaatgcgtctatattttaccgtctttttaaaccgattcactgagattttttttctttgttacttataggtaggacaaggtgaccgcggagatgtcacaatcttgccaacattgatcgtcaacaatgctcaataccgcggtttgtttcattccttctcattgtaaatcagttaccgaaaagttaggattcttaagttctttacctgattttgttgctcaggtaaacttgagagaaatgcagtacttaaggctatatgttctggattcaaggaaagaaccgaacccgggatctgtctaagtggaggttatagaaattcccttgtaagcttatattcatgtgtggtaatagaatgtactaaagaagtcttgttttgtttacactgttgaaacagatattgaaacaaatgaatgtctcgaagcaaatggagggtgttgggaggacaagaagtccaatgtaacagcttgcaaggtacttagaaccgatgaacttaagggactacatttttatagatatttggttagttttatacctaaaaatggattctatcaggacacatttagaggaagagtctgtgaatgccctgttgtgaatggtgtacagtataaaggagatggatatacatcatgtgaacgtacgttcttcaacttctacattgatatcttgtagaaacacttcattataaacattttgtgttctgacttgaatgttataacagcttatggccctgcaagatgctcgattaaccaaggaggttgctggtctgaaaccaaaaagggcttaactttctcggcttgctcggttagttactctactgtgttatggccttttcagtaataatgccataatgtttgaaacttacaaattttctccaattgttgagttcagaacttggagacatcgggatgtcgctgccctccagggtttaaaggagatggtcttaaatgtgaaggtgaaaacttttattttctctagaattcaaaatctctcatcatgttttcttaaactgattcatctacgacatatagacattgatgagtgtaaggagcaatcagcttgtcaatgtgatggatgcaactgtaagaacaaatggggaggctttgaatgcaaatgctctggaaatcgtctctacatgaaagaacaagacacttgtattggtcagtaaagatctaaaacttttcagattctttttgaaacaatccaagaatcatattctcatttctttgtttttcgtttctcgcagagagaagcggatcaagaatcggatggttccctacatttgtgattctagctgcagttgcaagcatatgtgtaggtggttacgtattctacaagtatcgtctcagggtatgtttctccaaacattttttttcttctctttacttaatcttcaaactcattcatcatcatgaatctattatctatctaatgatcattattttgtgtcaaaacgaaaatgcagtcttatatggattcagaaatcatggcgattatgtctcagtacatgccattagagagccaaaacacaaccgatccaatgactggtgaatctcaacaccaacagctgagattaacttctgcagcctaattttataaatcttgaaaagatgaaatttttcttaaagagagctaaagatgaaaaaatttctttgtttaatcttgaaaaatacttctttttgggtcatttttattgactcttttcattcttgtagataagatatatgcattaagatttaaaaaggaaattgtattgaaagtggtaaatcaaacagctctttggtcatctcatacagagaatgaattggttggggaaatgtaacagtaaggatatttttatcataaacaaagtttgaggctttaatagaaaaacataagaaatttggggacataaatgaaaatatactaattgtaagattaagttcttcgggagaagtcaacgttagagaaaaagaagagatggagaatactttgtcgccgttgttgtcaccgtcgccggcaagtgaagtcgctgcgagagtatcgtctttgttcgtttatccgatcaaatcatgtcgaggaatttctctgtctcaggcagctctcactcccaccggtatcaacaaaaactagtttcgagaaaaatttctcattttttggtttcgaattcgatttttccttcttgggtttcatattagagctgtttcttcatctgggtttaagtcttcttacgatattttcgattagcccgttgtttaagggttcatcatcattcagtgagactccttgttggtgggtctaagttgtctttagtgtgactctgagtctctgaaagttattaagtggaaagattgatttttgtgctgtcctcaatgattctctaaaagtgtataagacttggaatgtgaatgattaagtgtgaagtaatccaaaacagtttaatgaagttgtcattgtgagagctgatgtgattattttggtgtgatttgtttggggaaaattagaaaagctaagttttttttggggtttggttgcttaggatttcgatgggatcgaaactggttgattgtgaattctaaaggaagaggattgactcagagagtggaaccaaagctttctttgattgaagtagaaatgcctaagcatgcgtttggagaggactgggagcctgagaagagctctaacatgggtcagattgtttttatgtcttcttattcagctggctttttgttttaatgaagttggtctttttctcatcttttggctgtgtttgcagtggttagagctcctggtatggatgcccttaaggtctccctagctaaacccgacaaaatagcagacggtgtctcagtttgggagtggtctggctccgcactagatgaaggagaagaagcatctcagtggtttacaaactttgttgggaagccttgtcgacttgttcgttttaattcaggtctcataaacttttttcctgtcttaatcagttaagcttgactcctttgaaagattttggcggtgcatatttcatcacaagtcacatgttatattgcagcctatgagactaggcctgtggatccaaattatgctccaggtcacattgcgatgttctcggatatgtatccattcttgcttatatcacaggtcagaggatcaaattcgatttctttctttcggttctgcgttaaacagtctcgtgctatttccagggttcgcttgattccctgaataagcttctcaaggagcctgtaccgatcaaccgatttagacccaagtatgcttcagaaagccttcactgtttttattgctttgtaacaacacttgataactctcactgggaaatgttacagcatctttgttgatggatgtgaaccatttgctgaagacttatggacagagatccttataaacggtttcacctttcacggtgtgaaattatgctctcgctgcaaggtatatcaaaaccttgtcatagttcaaaactccatgaagaatcttcttcatttttggttttgttcttttaaggataagtttttttaatccgtccatgatcaggtacctacgattagtcaagaaactggtattggaggtcaagagccaattgagactttgaggactttcaggtcagacaaagttttacagccaaagagtaaaccacacggaaaggtaaagaaagaccgtggtccggtttatcgtcataacaaatgaatacgagggttttgaatggtagatttaaatatgatgcagatatactttgggcagaacatggtttggaaagacggattcggcgatggaattggaaaaacaattgaaattggtgattccgttgttgtccttcgaaaactctcatctcctgctgaagcagcaacttgaaagagacttgcagcttgttatatatataattgtgaatcttccacaagaactgtgaccacttttaccagaacaccccaaatccacgtttgacccccaattgaagcaaccacatcaaatatattgattttaaatctgaaaagacatacgatttaaaaatatgaaagcttgattaatcaaaaaagtctatgaaggacatatgattcagctatccacagacctctccctaactgtcttcttcatgatattcatattcatctccatagccatcttcataaccatttcatctccatagccatctccatctgcatatcaatcttcatattcacctctatctccatagccatcttcatcttcatctccaatgtgatgctcgatatgagagtgaaccctaactctgcaatcggtctcaaaagcttcaccgttagctccaacaccttggagagtgtttttttcgcgatcatatgaattactagctttgaaaaccatcctactttatataataagatgactttatatagattgattaagattgtaaaggaaaacatttattcattgtttaaacattgttaagattctcccatatttattatcatcatctctaatttgatggcttgttggattgattatacccgtccctgtccagtcccggcgcttcaggtgttgcaaaccggttatttcccaatgaataccagtaaacatctatgccatcagtaagtagtaggctgggcagcctctcttgtaatggttttagtatcagtttttattgcagttttcaactcagtgggagaacccttttcaatgtgttcagtctatgaaactgttgtgtctaatttggttgtatcaaagccaagacttgtgcagtttcactcactagatttgctgtgtttgtaacaattcccggcacagcggttttggcttttaaatttatggcttcagaatcagctacaatggcgggttggtagagcagagttagatggagaggcattgactgtatatgttgaagaggcagcaacaattaatcaaacgctggttcaactagtttttctgaatataataagtctttacttttaatccgagtttctcttaaagtgtttacttttatttttgggagtccaaataaataaaatgcttgcacagagaaagcaagtaacgtttgttatctcatagaagggaacaatggttaattatggatcttgatgtgtgtgactctgaataaaaaataaaatagacagaaatcttaaaacatattttcttatagaacttcattaaattttcaatggtttacaaagagagaatacaacttgcatcaaatagtgaaactttttatcttacttgggaagcaaccatagaacctatgtatcatcatcatcatcatctaaaagacacagagcattgaatttgttggggctctcaagcttacaaagatcttgttgcgggtaattaaaaacggtcttcctgagagaattttgattttgcagcatatgttgtcttcataatattaaactcaagatcctctacatggtctacaaaggcgtaaattctgtgtacggcatacaatccccggtgtagtcctttgacttcaacagttaagagagtatttttgtcggggttaaagtataaaacataaaatggcttaagtgtttgagtcttcttcaccaaaacaatttcacctgaagcagtcaccccaacaacggagagattatatttaacctgatcgactttattatcatccctcaaagtgtagacatatgtcgaccattcttcttttccgacatcctctagaacccacacacttaactttaggggaaaaccaccatcatcaacatactcttgattaatcatgcctaatttacccttatagtttaccaatttagtagaagagcagtatgtgttaagacgtagaaacacaaaattctcagacctaacatcaaagcaaactagcacatttttatccattgcataattaattttagctaggtaatacaaaatcccattgatgcaaattgttccattactatgaggaagatagcgtaagggagattggatcttcctccacccaactgtttcagctcctaatgtaagaatatgatgatccgtttgatgtttatcaaaatcgaatatcgggattaataccttgaattgcttgtcaatcggatcaaaccctaaaaatttaccgtaaggcacgctcttgaaatccagtaaaggtggtaagatcacatacccatactgccctgtgctagggttacatatcacacccaagtgatcgtcacccttctttcggatcgtcatattagggaaatagatcaaactagaagcataactacaaccgtgttgtgggcgtttgtcttcaaagaatttcagatggagattagcggctactacaagagacgacttcccaagataatttttaggttgaggcaacgagaagaatttccactccccttcttgttcgacagcgattaagagatgtggacgagatgaagacctggtgaggaacaactcggtgaagtatgactgacgaatcatggattcccatagcttcgacacgcagcgacacctcgcgattgactttgaaggcaatctcgagagtatatcaagaatgagatcaataggaatggaatctgtgttttcttcactattcatgatcgtccttgtgtttgcgagaaatcgcaaattggtgaatctctggattatggaaaatatctctgttcaaagacacaatcctaaaacttgtcattacaatccctaattcttatttataaacccaaaccgacatttaattttgtttaattatcaaatctaaactcaaattcttatttataaacatacactgatatttaatcttctttaattaaaaatatacagatttgatttccttatttgttttctaattttaattttgatttattcttaaatatagtgttaaatggcatattattgtattttgattagttattaaagaggggtgaatgaacaagaatttttctaaaaaaatgcttgtgttaaacttgattttttgggtgaataaactaagggatgttattcgtttatgattttaaaagagttttagtgatttaaattatcatgtataatctgttgttattcaatcaagatttatttaaaatatgttaaagttttgtgttattcatttaagatttgtaaaaagtaatctaaaatcttcataaattttgggttattagattcatacttttataaagtcattacaagttttgtgttattcaattaaaacaaaagaatctttgagtgttaatgattgttaatgatttaaattattatgttattggttcatgacttcttacatttttcttcacaaaatgaagtcatgaaaagtcatggaaagtattatcaaaatagagagattgtttgagattctttacaagattataaaaaactaatcaacaagattataaaaaactctctaacaatcatttaaaatctttcatttctacttttaaggatttaattgaagccagcttaatagttgaccactgagctcaaactagttaactcaaagttagtcggcgaaagaaaaaaaaaactattttaaaacacataatttcttgcagcctctaatcgaagtatttacttttatttttggaagccccaaattacatgcagagagaaagaaagaagagtttgttatctaatctcattgcagagaacaaatgacgtgtcacggaccaaaaaatcttaatatttaaaaattcaagcgcaaaagtttatatttctcagtgagagatctacatcatgttaaatttatttttttggagaagagatctgtcttaatgtgcctcgaaccccgcacctacaccgggaaaatttaccactgggccaacaactcacatatctctcttgataaaaatttcatttttatttacttgatatgtgtgtgcttttttttccgacagtaccaaaggtctttactacttctaaatcctcaattagactattactgactttagatgaaaatgaaaattgacaggatcttcataaaagcataatttctaaagaaattctttgacataacttaatgtttacagatagagagtacaaatacaatttgcatcaattagagagctttttcagctgagtaaggtaagcaatcaggttttaaatctagtaaatttcaatcatcttctaaaagacagaaagcatcaaattaatttgttaatgctctcaaacctactacgaaatgatcttgttccaagtgagcaagggtcctcacttgatgatgatgtgctctgttctggtgggcttaaagatggtgcaacatatgttgtcttcataccatcaaacctaagatcctctacatggtctacaaagtaattaatgaactgtatgatcgtcaaaccattcttcctcttctctaacaccttggatttcaacacttcggagagtgttcctatcgggattaaattagaaaacataaaacggtttctatgcataattcttcgccaaaacaatttcacctgaagcagttgccccaacaacggaaagattgttgttaaagactttattctcatcagccctcacagtgtaggcatatttcttctattcccctttctcgacatcctctagaacctgcatacgtaacccaaggagatatccagcatcataatccttctccaaatcaaccaaacctaatttacccttatagtttatcaatttatagtttatcacactggaagatacattagagttaacagctaagtaatacagaatcccattaatgcatatcgaccttttccaacgaggttcataggtaaagggacatatgatctctctccacctcacattttcagttcctaatgtcaaaatatgataaaccaattcatttccgactctacagttgaagactagaaccttgaattgcttgccaatcggatcaaatcctaaaaggggaccgaagttttggtacgttgttctgaggtcaggtggtaagatcgcatattgtctcgtgctagggttacatatcgcacgcacttcatcgtcccactcctttgagatctggataatagggaaatatatcaaactagaagcataactacaactgtttgggcttatgtctttggagaatttcatatgaaaatcggcggctactacaagagacgacttccctagtgattctgaggctaaggagaggagaagaagctccactccccttcttgtacaatcccaatcaagagacgtggattagaggatgaccaggtgtggaacaactgggggaaatcttgacgacgaataatggactccctcactcccatagcttctacacgcaacgaaacctaaggattgattttgcaggcaatctcgagagtatgtcaggaacagggccggctcaaactttttgaagaccttgtgctgatttataaaaattggctttagttaatactgtttttaattacagagatttttggaccctaaaatcttaagtaaaattggaaaaaaattgacagagactctgtacttaaaattcctcaatggttgctaaaacttttgcatttgttctatggctatattatattcagttaccagtataattaaactgaaaggcataagaaacctaaagaagctctcgaaagaggaacgaaggctacagtgatactaagatgaatagtcaagtgataaaaatcgccatgtaacagagagcaaccatcttcaaaatttgcgtctctgcttcttcttcttttggttttatttgacgtatacactgcaagaaacataatattgctgaagtttattatatacggaaaaatctcgtaaagttcaaggtcggcgctaacctataaagcccgagaaacatgggctttaaccatctaaatatacgtgagtttctcactttctctgatgattatgctaaccttaccggtattttattttatagattagtgttttctcttgtacagttgtaatttttatctcaagtaacataatcaacacgtcaatgaggagtatctgcttggcgtagcagcaagaagaatgacttgaacgtgaacggaatgctcgaagacatgcattcttcacaggatcggctcatcaaactcattgacaagaatgttcgcaaccgtctcagctcaatcacacaccaaggggattgtcgatacgaagacggcttacggctcacattttttatccacattatatctcggcattagtgagaagagtttgaaacgaaggctagttcaagtaagagactggcacaatgtatttctacttcttcttctgggtttttctctgacttcactgcaagaaaaacttttggtgctgaagttgcttttctcttctggtccagagccaccaaaatcttctttgcagcctaaaaaccgcttaccaaaatctattttctgtttcttgaaatttgaatcaaaatctacttttaatctgagttcttgtacactttcgctaattaattaagcgtctctaataatgtcattgcagaggtatatatgaatcttgagatgtcacattcaaaaaagctcacgaatttctcctattaagaaaaaaaactcatttgtattcacttgattgctctttcacttatttattctgactttgattaagttattgtatcgaatcttgatgtgtcacgggaaaatagaaataagcgcatgcacgtctcatatgttcacgaatatctctatttcaaatccaacttcaagttatttgcttcattgcaacatatgtgtgctccttcacctggcacgatagactctatgatataatagttagactctatgatataaactagaacaaaatggtaagccaatatagtgcaaattaaagctcacataaatgaggctttatgttataaatattatgaagaaaacttcagcatggctctgattatagaagaaaaaacataatttctgaagaataaattcgcatcaaatagaaagatatttcatctgacttggggggagcaaaagaggcaatcagattttgtcacctaaaagacacaaggcattaaattaacgcctcactatctgattgcaggtgagcaacggtactcccttaatgatctttaagtacgcttctgttctgctgggattctagctggtgtctctttcaattcttaaaactaaactgaagatcctctacatggtctacaaaggcgcaaactgtatgaaagttgaggcatttgtggtcttctccaacaccttggatttcaacacttaggagagtgttccttccgggattaaagtagaacacataaaacggtttgcatgcatttgttttcaccaaaacaatatcacctgtagcagtcatcccaaccacggaaacatacttaacgactatattctcagccatcaaagtgtagacatatgtcgaccattcctgtttctcaaaatcctctagaaccgtcatacgtaactgaaggggaaatacacgttcataggcatgcgtcaaattaatcacacctactttacccttatagtttatcaatgtagtagaggctggatatgaccagtatcggttcagatctaagaatgggttcagctttacatggcgatttctatcacttcatttggtgtttttcgccatgtaaccatcttcaaaatatgcgtctctgcttcttcttcttttggttttatctgacgtacactgcaagaaacataatattgctgaagtttctttcctcagtttcgctacagagccaccaataatcttctttgcagccaagaaacgtcttaccaaagccattttgtgttttcttttatagttaacctgtgtttctcatatgcttggtttaggagcaggaagagtgatttgaagttctgatctggaatgtcagaactcagaagtaataatgagaaaagtatatatcttcaggacgatccaaattctttcctctgctttatggaaaagagtttggaaaaaaaaattcatgtatttgttttttctgaaaaacacccttttaaagtcttttcattgtcatggatattgttcctattctttttattgtttagatatattatatgcaattttgaagtttagattttggaactaacaataattttgtagaaacatgtcaaagaaaacaagaatactatagatcttaaaagaattttttaacattgactacgaagaaaacaaagagttttatgaaaacgcaatgtagataaaacatttatttgctcaactccaaagtaatgtgtaacacaattaggacatgctaatcaggacgaacatgctaaacagagtgatggagctcacacattgacacaaaacttgtaaaatgacaagtcacactgtcagccgaaatagctagactcttatggtataaagcttattcagccaacttcgacgttgttgtgctttaggctatttcgtagtgataaatgggcctgacttgagttgctttgcatcgttaacattaagatcctcgacatggtctgtaatagtgtaaactctacaatgattctccaatccttggatttcaactctttggagagtttctctttcgggattgaagtagaagacataaaacgatttagatgcaaacttctccgacaaaacaatttcacatgtagcagtcatcccaacggcaagagaaatattgtagaacatgacttcatactcaagaaaagtgcagtcgtatttcgaccattcatgtttctcgacatcctcaagaacccacatactcaactcaaaggtacgacttccattagcgttaccatgtttccaatcaatcccacctaattttcccttataatttatcaaatgataaaagcaatctacgtcaatgaacgtgaatttttcaaatctaacatcaaagcaaactatcacaaaagacctttggttaaccaagggttcatcaatttggatagctaagtaatataaaaccccattgatgcatatcccttcacaaaaaggatcatgagttaaggggcaatggatctttctccacctcattcttctagttcccaaggtcagaattttatgatcatcaggaccagatggataagccatgaacaataccttgaattgcttgtcaatcggatcaaaccctaaatagctatacgactttacataccttctcagtttaagaccatatactttcccgtgatagggttacatatcgcacgcactacatcttcatcattcactgagatcctcatatcagagagatagatcaagccagaagcatagctacaaatttctcggcttataacttcagagaacttagtatgaaaatcggcagctactacaagagacgacttttcatatgaattccgaggctgagtcgacgagaagaagaggccctcaccgttggctcgtttgaccccaaataagagacgtggacgagctgaggacttagtcagaaacaactcggtgaaatcttgacggctgaggatggacctccgtagcttcgacacgcaactacaccttgcaactgattttgctggcagtctcaagagtatctcgtaaacgagatcatcattcggaaacgaattcatcattaccagtatgtgaaaactcctaaacagttcgacctaagtagatgctgttaggggaggtgggtttttaaattaaacctagttaagcccaagaagcatacgggttttttaccatcaacatttatattaactttttactttttattcagttttgatcgaaaacgtgatggacttaatattaccagaaagaaggtcatgaagaagacctatgaattggtttcttgaaaatgttttagagaaaataaattaaagaatcagaagtgtccaattctttcgcatcatgattttgatgtgtttgtttagttttaagtaaagcataaatgtttcattgttagttagtgaagtggattgttcatcaaatcttaagagaaaatgaagtacaaacttctaatcaatctccatgtttcactgatatcttcattcatctattcatatatgactctcgttagtacttaataagtgttcttttagaacatacaaaaatctggaattcgaatttcgttacttaaccacctaagctgaaatgttttattgtaattttacacaaaggcatatataattctcccacgaacttagagcatatataagaataactaaattgaacaaaacaaaaaaaaaaacagtattactacatgagcttttaaataagatttcaattttctacacgaagaatttagatcccgttaaaaccatcaatgtttatttattttctcagtgttgatttgttttcaaaaaaaataatagtattacgtgactgacttgatattgatgtgtttctgttttcatcaagattttgatgtgttttgttttagtttaagtaaaacatatatatcttttcattgttggtattgaagcggctagtggatatatgtggttcatcagatctcaacataaaaaatgaactttattgtttaaccatcaactctaacaattcaatcattgaccaaaactgaggcaaaggtttcttttctttttttccgaaaaagggttgagtgaggcaatggtttcttgacagtcaagttactggatttacaaaacactaacgcaaaacaagataagattttgtcatgatcaggttcctttcctcgtatgcataatcttactctcttgttgatgaacagacacgagaaatgttgagagctcatcagtttacctttgtgctatttgttaagaaaaagagttgaaacaaaaatttctatggatatttcaggagttgaaatacaagttgacattgacgttgaagccacatataaattccaacttgttgggggtcggttcgggcccagattgtaaagggctaaaccgagcccatttcctaacagaatgagaaacccagagtgagtcaaagctagattcaacgaacagaaggaatgaggaagagaatgacatgtgtacggtgaaagagaataaagagggtaaaagtgtaaagcaacagaggaaaagccctagaaagaatgttctataaatacagaaatagaaagaatgaaaggatatgcgcaatttccgctgacggagaaaggacaaagaaaggacgcaagtacaacattcgaactcgcttcgtcttcattatctcgcctcgtcttcactccacttcgtctttacattctcatctaatcgctggcttgttaacctcgacggattcttcatttattcctagagacaacttcgtacttgtgtgattcttacatcaacacaactccttcttcacatccttagattattcttctcaccgtttttgtcactgtcccattaaccttttggctgtagtttaagtggttagagctcctggtaacacagacttcgttgggaagcctcgtcgacttgttcgttttgactccatttaaaggattgtcgcagtgccgtagatctcacgtgtttgctattacattgcagcctttgtgactagacctgtggatccaaatcatgctccagatcactttgtgatttctcagttcagtttgtttcctttgggttctgctctatatagtctcataatgttgtacaaaagttctcttgattccctgaataaacttctcaaggagcctttaccagtcaaccgatttagaccaagtaagttccaatgaaagtcgtagttagtctcttcaaagctattattgctttcaaacaacaatttataaattctgttactgggaaatgtgatcattattagtggacattgagataaattaaccaagaaaaaaaatcgaatcagacagatttagagccaaagaggaaaccaaagggaaggatgatgtaatcataaccaatgaattattcgactattgattaggcgttctgatcttatatatgtgacaattttagctaaaccaatagagtcatagagctaaaaatacaaaataaataagacaagaatacaaaatagttaggccaatagagtgatggagcctgttagctaggaattcatacttgttctgatgcttgttcttcaaagacttggagagatcactagatgtatgccagcattgttatggttacgatatttcagtcttgttgtaaagggattgagttgagttgcagcattgcatcgttaacactaagatcctctacataatctacaaaggcgttgcaagctatgcgatcaggattagctccaagaccttggatttcaacactttggacttcgagagagttcctttccggattgaagtagaaaacataaaacggattagacgcaaatttcatgaacaaaacaatgtcaccggtagcagtcatcccagcaacggaaagattctgcttaaccttaaccttaacatatgtcgaccattcatctttctcaacatcctctagaactcgcatacgtaacttaacgggaaatccaacacgataagcatacttcaacttaaccccacataatttccccttatagtttatcaatccattaaattcagaacgacattttgtgtcaacgagcttaaatttctcatatctaacatcaaaacaaactatcacataatttccatcagaattcatagctgagtaatacaaaactccattgatacaaatccttgtccacaaaggctcatgggtaaaaggacattggattgtcctccatttcaattccccagttctcaatgtcagaatataatgatctacatccttggaagctgtataaccagaagccatgaacaataccttgaattccttatcaactggatcaaaccctaaatagctatacataccaaatactctaggttcaggtaagataacatactttcctgtgagaggatcacacaacacaggcttttcatcttcatcctcctttgggatacgcatacatttaaaataaatcaaaccagaggcataggtaaaataaatggatccacttatgcctgcagagaacttcttcatatgaatatcggcggattctacaacaagagacgaattctgaggctgaggcagcgagagaaagctccactcgctccactcaccgtcttgtacaacaaataagatacgaggacgagccttggaccttgttagaaacaattcgatgaaatatttacggcgaaagatggctctccattgcttcgacacacaatgacaccttgctactgattttgctgtcgatctcgagactatctcgatgatgagatcaatagggatcgaattcttcatgttttccgtcgtattttggtgatcggacggatgatgatgatattagaggtgatattgggcctttaaatcatataaatttatattaactttcttcttagggggtgttattggtttatgatttcaaagaattttagtgaagtataatatagaagtatgttaaagttttgtattattcatttaagatttgttaacttaaaagtaatctaaaatcttaaaatttggggttattggattcatatttttataaagtcgtaaaagttttgtgttattcaattaaagcaaaaaaatctctgattgttaatgatttaaattattatgttattggttcataactttccacactttttcacaaaatcaaatcatagagagtcatgaaaaatattatcaaaatatagagattgtttgaaaaactttataagattataaaaaactaatcaacaagattataaaaaactctctaacaatagtttataatctttcatttatttactttgtaggattttaatgaagtcatcgaaactctttgtaaattagtaaccaataacactcgtgtaatcggaaaaataatgtaagcatccaaaagcatatggatgggctcatgaagttaactaatgtttttcgtaagttgatacttttgatgacattttccccgtaatatgattatttgctggcgggcagtagaaaagctaagttgtttttggggtttggttgctaaggatttcaatgggatcgaaactggttaattgaaaattcgaaaggaagaggattgactcaaagagctctaacttggggtcagattgttgttaggtgtttttctgtctccttcttgaactgactttttatgtcttcttcttgaactgactttttatgtcttcttcttgaactgacttttcatttgtgaatatagttttggctgtttttgtcactgtttccattaatcttttggctgcgttttcagtggttagagctcatggtatggttaatcttattgcgcttttccattttaaaggactgtctgcggtgctaactgctgaagagctcacgtacgtgtttgctgctatattgcaacctctgacactagacctgtggatccaaactattgctttagatcagtttgctatgttctaagccatgaaagaaaacgaggatcatcttggatttctttcttccgattctgctctaaatagtcaccataacatatccatgaaagtcctagcggtagtctcataaaagatttgttatggcagcatatttgtcattgaaagtgaaccagtttacctaagagttatggagagaaagatccttacttaagagttatgctaaacattgccaggtatatcaaaagctagtcctatttcaaaactacatgaaacttttttttttatccatggataagctttttaatttggccatgatcaagaaaaaattgggattggagcttaagagccgattgagacttttgacaaagatttacaaactattaggcatattcacgaatgtctccacagttgatgaaaatagcttagccaacagagtgatagagaatgttagctaatgattcatacttgttatgctgcttgtttttcacagacggcgcagacttgcataggtcacgagatgtatgccggcgttgttgtggctttgacttgttgataacgatacttcggccctgtagtacaccgattaaccttttacttcacaactcgattactctttatttttgtttcgttatttactcgataagaaatgaattatctaacccaacacaaccgaatgagatagttaaaaagaaggaaaaacaaacaaaataaaatagctaagctaacagagtgattgagcttgtttgctaagaattcataattgtccagttgcttgttcttcacagacttggagaggtcatgagatgtatcttggccttgttgttgtaaagggcttgacttgagttgcagcactgcatcgctaacactaaaatcttctacatagtcaacaaaggcatggcaagctatgtgatcacgattagctccaagaccttggatttcaacactttggacttggagagtgttcctatccggattgaagttgaaaacataaaacggattagttgcatcttccatcgataaaacaatgtcaccggttgcagtcatcccagaaacagaaagattccggttaaccttaacgacttcactctccgtccacaaagagtagacatgtttcgaccattccggtttctcgacatcctctaaaacccacatactcaacttaacaggaaatccaccaacatgcctagcatactccaaattaatcccacataatttccccttatagtttatcaactgatcgtaccgatgttttgtggctatgaaattgaatttctcagacctaacatcaaagcaagctatgagatgagaccttccattagaatcagaatagtaagcagagtaatacaaaaccccattaatgcatatcctctcccaaaaaggctcatgtgtaaaaggacattggatcttcctccacttcaattctccagttcccaatgtcaaaatataatgatcttcatccttcgaagctataaaatcacaagtatccatgaacaataccttgaattccttatcaatcggatcaaaccctaaatagctatacgaaccacctactctaagttcaggtaagatcacatactggccagtgagagggtcacacaacacacgctttgcatcctcatcttcctttgggatgaacattttttaaaaatagatcaaaccagaggcataggtgcactgatgtctgcttttccctgaagaaaacttggtatgaaaatcggcggcagctactacaagagacgaactctcgtgacgattctgaggctgaggcgttgagagaaagctccactcaccgtcttgttgtacaccgattaagagacgtggacgagcgttggatcttgttagaaagagttcggtgaaaacttgatggcgaaggatggatctccatcgcttcgaaacgcaacgacacctggcaactgattttgctggtaatctcgagagtatttcgtaaatgagatcaatcggaatcgaattcttcatttttgccgtcgtattttggtgatcggaaatgtgaaatctctcctaaattttcttactacctaattagatgaatgatgatattaaagatggtgtatttgcacctatttaagtccaataagtaaaacatggttttagtatgggcctttaaccatctaaaattatatttactttatgggttttagtgtttgatcgaaaaaataattttcaatggcaacaaaaaaaaacatggtttggaagatagattgttatgatgttaataatgatttgctaatcaaatttcaaccgaaaatggctttttaatttttcaagcttcactattatattcgttcatgtatttatgtgacttcattgttttaaacattaattcagctatttgatcattgagcaactgaggtaatggatatatatacaaaagactatctagcatgtatgtaacttgcgaataacgtcacctaataatgattcagattcatataataaaatacagttaaacctctataaattaatactcgataaattaataacctctataaattaataaatttttccggagttaggactagggtaaaaagtgacacaaatcgataaattaataagataataactttttcgaaagtcctatgtaaatatatggtctcatcaatatcataaattaataattgtataaatatatcaattatatatatacattatatgtaagatttttttttgaaatataattctaatatttttttgcttaaatttgtatttattcttatttaaattttagttctagtattttattttatcaaaaacttttggtgtttttttctaaacatgatattattttttatttgtaattgatttttgaaaaatattttctataatgaaaaaatcctatagaaaattttgaaaagttactaaattagaaaaatctctctataaattaatatttatcgataaattaaaacttctctaaatgaataaaattgtgcagtcccaacattattaatttatagagattttactgtaatatagagatttactttttactactaaaactacaaaattttaaaaatcaaatttgatgtttttgaaattaatctacaagtacaacaaagagacaacaaaatctaactatttatttgattataaagaatacttaaatgaaaatcatataatttaaatataagattaaatatccataaaatatagacaacattttgtaaaaataaaatttctccacatgttaaatcacagtagcattcattttgctaacataaaattatcacatagacacagattttaccttttaacacaataagaaagcatttctaaaaatcaacggctactagatttgcctatctcagagacttgacatcttataaagatgtatggtgtgtccaagttaagagatcatgaattcatgaacaatatatagttaaatatggggagattcgtcgatatattgttcatatattgtgcagagagcgcaattgttacatgctactaacgctaaagaaaccttagttctacttctcttctgcatctagctggttgaaattcgttcgtactctccttttgcatcgtttggtgatcttgaagagctctgatttcatacccaaatatgttatctagtttcgtttcagtgattatacctgatttctcttcagtgttttcttttatgaattcttgtaaggtttctttgtgtttgtattccatggaaatcataactgaagaattggcttgtttgagtcaatctagtttagacgtcgacaaaaaaaaaaactacaaatttaattataataattaaatttgatgtttttgaaattaatttgcaaatacaataaacatgcaacaaaatctaactatttatttgattataaaaaatactaaaatggaaaatcatataattaaaatataagattatatatccgtaaaatatagacaacattttgtaaaaataaaatttccccacatgttaaatcacagtagtattcattttgctaacataaaattatcacatagacacagattttaccttttaacacaataagaaagcatttctaaaaaacaacgactactagatttgcctacctcagagacttgacatcttacaaagacgtatgatgcgtccaggttaagagatcatgcattcatgaacaatatatagttaaatatgtggagattcgtctatatattgttcatgtataggtttatgagaaactaggttttcatgtacttaaatttgattttaaacttattttattattgtaaattattcttagagagcacatataactcttgcaggttcaagcttcatgttcatgttatggatgtgattacaccttatggtttcttcaatcccaggattggattctttgacaaagttgaccaagacgatggaaatgtatataagtataaattttttaatatattcaacgaaaaaaggaaatttctgttcgtccaaaaaagaaaggaaacagagagattaatatgtaaataatagataattacggattaggttgtaattacttttaacctagtctcctcattgtatgactctatatatacttgtaatctcttcacaataatatcaagcttcctattctacaattaacactttttgttgtagactctgtttcagatgctaaataaagatcaataggtttaacctaacactttttaacctaaaaataatgattccgattcatataaaactgtcactgaatctataaactgatttagaccgaagtgtgttccaaggaaagtcctcagtggtaaatgtgacgacatcatctttgttaatggatttgaaccatttgctcaagacttaaggacagataaattgtagagaatatcaccttttacttcaaaactcgatgactcttatattttgtttcgttatttaaggacccacgattcatcaaggaaatatttcggatcagacagatttggagccaaaggggaaccacaaggaaatatattgtaaatttgtaatcataagaaatgaattatctaacccaacccaaccgaatgatatagctaaaaagaaggaaaaacaaacaaaataaaatagctaagctaacagagtgattgagcctgtctgctaagaattcatacttgttcttcacagacggagcagacttggagaggtcatgagatgtatcttggccttgtcgtggttttggcctcttggtaacgatattttggccttgttgttgtaaagggcttgacttgagttgtcgcactgcatcgttaacactaagatcctctacatagtcagcaaaggcgtaataagacatgcaagcacgattagctccaagaccctcgacttcaacacttgggacttgcagagttttcctttctggattgaagtagaaaacataaaacggctgagatgcatattttgtcgacaaaacaatgtcaccggtagcagtcatcccagaaacagaaagattatggttaaccttaacgacttgactctccgtccacaacgagtagacatgtttcgaccattccggtttctcgacatcctctaaaacccacatactcaacttaacggtagatccaccatcatgactagcatactccaaaataatcccacataatttccccttatagtttatcaatccattaaatctagaacggcattctgcgtcaacgagcttgaaataacatcaaaacaaactatcacataatttccatcagaattcatagctgagtaatacaaaactccattgatacaaatcctttcccacacaggctcatgggtaaaagcacatcggatcctcctccatttcaattccccagttcccaatgtcagaatataatgatctagatccttccaagctatattattacgagtagtcatgaacaataccttgaattccttatcaactggatcaaaccctaaatagctatacgaatcacctactctaagttcaggtaagatcacatactttcctgtgagagggtcacataaaacatgctttgcatcctcatcctcctttcggatgcacataccatcaaaataaatcaaaccagaggcataactacaagaataattgcttatgcctttagaaaacttcatatggaaatcggcaggagacaacttattctcacatggattctgagactgaggcgttgagtaaaacctccactcaccgtcttgttgtacaccaattaagagacgtggacgagccttggaccttgctagaaacaactcggtgaaaacttgatggcgaaggatggatctccattgcttttacacacaacgacacctcgcaactgatattgctggtaatctcgagagtatctcgtaaatgagatcattcgggatccaattcttcattttaaccggcgtattttggtgatcggacggcgaagatctgtgaaaatctattcgacctaactagatgatgacattagaggtggtggatttgaaacctaattaaccatcctaatttatatgggctttagtgttgatagaaaattgttgtccaaaaaaaaaaaagtgttgatcgtaaaaaaataatatttcaatgacaagataaaatttctgttgacaaaaataaaaaataaaaaaatggcaagataaatttggtccgatgaggtttaaaaaaaaaaaagaaattgatggcttcatatttgataattattttcttagtgttgataaaaaaaaatatatatatatcacagttcacacatatcataatgattgatgaacaaacactaaaaagaatatttttgaaaaggctttagaccatctccaatggttgtttttattttatttttataaaatagaaaaaaaaatagagatttctactttcactacaataattctttaaaaatagagatctttatttgttagaagagaaaatagaggcaaaaaaatagagataaaaatagaaatgggttggagtaaaatagaggtagaaatagagtatagagacaaagatagagatgagttggagatgttcttagagaaaatacaattaaagaatgaaagtgtacaattcttttgcatcaggatttgatgtgttttgttaatgggtaagattgggctttattgattctgtccaatctgagaaacagaacgatcagcccactacaatcttcaggaagcccaatctcggaaacaattactccggcccgtaatgacgaccgccttgtcaatgtaagggtattctcgacaaatcacctcgggatatcctattatacggacgactaaatagtagaatggcaagtttggcgaagggcaactttttggacccatcaacggagaaagaacaagcaatcaactcgtcttcaagatcagctcgtcttcaagatcagctcgtcttcaagataagctcgtctaccaacaatcaactcctactcaagatcagatcgatttaaagcacttagctcgttcctcaacgtcgagcttgtagtccgtctacctcagctaaagctcgtgatcaagtgactgattcttcatcttccctagagactctattcgtacttgtttgattcgtgtatcaacatgtttgttagtttaagtgaaacataaatctttcattattggcactcatgaagtgtctagtggtaatgattgctcatcaaatctcaacagaaaaaatggtttcttaatcttcaaatattcctatgactccattgttcaaacatcaattcaactattcaatcagtgagcaactgatgaggtaatggtttcttaacaatcaagttattgaatatacaaaaaaaaacacttacaccaaacaatataacacttttcatgatcaaagcaagtccctttcctcgtaactaaaatcctcactctcttgtcgttacattttaaacaaaattcttggttcaatacgtttacaatgtaggacacacttaaacggaggaaagtcagtttagttttcttctctgcttattcttggtttagaaatctctctaggtctaatcttttacgagaactattgtgatgaatagataccagaaagaagctcatgaaatttaatatttaaccaaaaaaaaaaaaaaaaaaatcatgaagaaaactaaactgacttgttagtttttcagtaggtttagagaaactatcaaaagaagcaaaattttcaattctgtggtacaattatttttttagtttaagcgaagcataaatctttcattgttgttacgtaattggcgaatggtatgattgttcaaggcattgctcaacagatctcaatagaaagaaacctctaatcctcaatcttcactgatatctttatattatatttaaacatcaacagaattcaaaaggcctttctgccccttgtttttttgaaaacgcaatgtaggatataacattagtttgctctcacaatttggacatgataattaaccagaaaataaatataatattgtaaacgacaattaagtcacataactaacactttttaaccaaattataaacatttctatgtatatatgtggagttgaattacaagctgacattgaagttgaagccatagatatagattccaactctttcacaacctcatgtcattatcttgtcactgtttttttttgtcactttgtgatgttctcagtcatattcaatttctttctttcggttctactctaaatagtctcataacgttttccttcggttctcttgattccttgaataagcttctcaagatactactaataaaccaatatagctagacccaagtatgttccaaggaaattcctagttagactcttgaaaaatatttgtattgctttgaaacaacaattcacaaactctagatgtcactgcgaaatgtgatgacagcatctttgttagtggatgtgaaccatttttcaagacttacggatagagagataattaaagaaaatatcaccttttatggcgtaaaattatgatctcgtttgcaagatatattaaaagcttgtcctacttcaaaactccatgaatcttgtcttttgtttcgttatctaaggatcagtgtttcaaatttttccatgaacaagaacccacgattaatcaagaaaatagctaggtctgccgaatgatataacaaaaaaaaaagcaaaaaacaaaaataaaataaaatagcaaagccaacagagtgatatagcatgttagcaaatgattcaatgacggttgtgatggttgttcttcacagacggagcagacttgcagaggtgacgaaatgtatgccggcgttgttgttgttttggcctcttggtaacgatatttcagcaattcagccattttgtaaagagcttgacttgagttgcattgcatcgttaacactaagatcctctacatagtctacaaaggcataaactctgcgattaaggtaatcttcaaaaccttggattttaacaccttaaagtgtttttcttttcgggattgaagtagaaaacataaaacggtttggatgtagatatatatgactccgaaaaaacaatttcacctatagcattcatcccaccaacgcaaatattgtagttacactgctgaaattcaatggtctccggcaaagagtaaacatgtctcgaccattcgtgtttctcgacatcctctagaacccacatacgtaactcaacgggatatacaccaccatgattatacgccaaatcaatcccacctaatttacctttgtagtttatcaattttgtagatgaaaaaaggaagcttgatgcattgataaaattgaatttctcagacctaaaatcaaaagaaactatcagaagatatccatgagctgaactagccagagtaatacaaaaccccattgatgcatatctctttccaaaaaggttcatggggtaacggacattttatcttcctccatctcaatttttcagttacggatagagagataattagtcaagaacaactcggtgaaatcttgactgcaaagtatagacgcccattgtttcgacacgcaacgactcctatcgattgactttgtagacaatctcaataatatctcgagaaagagatcattagaaatggaatcaaaagtttttccactatccatgatcggacggaaaaagatatttgaggatacaaatcgcagagacagctctcactagtgttgataacctaattagatgattttagttaatcttagggaggaggtaaacctaaggcccaagacgcatgggcttttaacaatccaaatatatattatacttaaaaatagttcaatggcaattacatggtttggaactttggaaaatggattccattatgtggggaaaacaagtgaagttggtgattttgtcgttgtcctttgaaaactctacgctcctggtgaagcagcaacttgaaaaagtcataagcactctagtcatggagtatgcaaatttctccatctcttgttctcatctttcacaagagaattaagaactagtaacacttttattaggatgaacagtcagacagatacttgacttaaattttcttttgattcttgcaaggcttctctgtgtttatcttcttaagaatgtcattgtgaaagctttgttttaaggtctcattcatgatttctcttttgtttttacttttaatggttcgtttttggcttgtgtgcatgtttctttctcataaactagtttcgaaagattagttctctgtttggtaacgatttacttttactttttcttattaaatgagagagactgtttatgtatgtttgataccgatttaaggggttttgaatttttttatttctcttctatgcaggacatgtctcaagatctatcagtgaccctctttctatctatagtaaaacctctataaattaataatgttgggaccgacaaattctactaatttataaaagtattaatttatcgataaattaatttattgatttataaagaaatattttttgtttcatttgaaaatttcatgttcaaagtctacgatattgcgatacctttagaaccacttacccgtaagaaagtaattatcgcgtctaaaattctctacaatttatcaatttctagttttatacattttttgtacatataatattatgttaggcattttatttcactactccttcataaaattataatatgcttgaaatgatgcaataagatatcgtattcagattgtatatatacaactttatcctttatatacaacagaaaataaaaaatactaattaatatgagtaattaacgtgtgaatgttcataataagtatataaaaaatcattgtcatatatgttccactatatacatacccatataaacatgcttatcataagtagtcaggggcggatctatgttgagactaggtagggcacgtgccctatactaattgttaaaacagttttaattgatcattacttattgatatctcttggctcatttggcatagagtaccccaggttaagttcctgagcgacatgttcgagcctctttaatcactttattttgctcaattttttttgtccacgtcctcttttagtctctttctagttcctacatgttttaattctcctttattattaactgcagttcttttattgattttattgttttctttatataaaattatgttccttcaattatatttatctttgtaattcaagtttaactttaacatattttatgtcattaatttagtattaataccaatgatttagagtataaactttaaactgtgtgatattgttagatgctgtaaactttaagtaatattttattaataatttacattttctattatgagttgtaactatgctatttcaaaattaaatatttctaatatatgtacttaagtatatttagattatttcattaaaattagtgtcttttttagatttcaaatttaaatattttaagggtggaaattatattcacgtaatattttattattaaagtataagtttaatattgtaaattttaatatgtgccccatacaaattttgtttctagatccgccactgtaagtagtcatatgatcttttgattgatatattgttattaaacaaaatttattgtagtaaattacaaaatttattgtattgttatttgaaatctgaaatttgattgtgtattatgcaatgtaatatcttttttatattatttgaaccagtgatattttctactaaaagtatcattatccatacattgattgatattaaacatatatataagttctataaataaattagttattattttcattattttaagaaaaaaaattggaatcttctcattaaatttaagtaatattttatttttagaatcttctaaatatgtataatttatttaatttaattgatattatatgttttggaaataattcgtttataaatgtattggtaatatctgattataaaaaataaaggtagcttatatattaaaatctttgttacatataatttttatgtttttatataaaaaatgaaagtagttatctaatgttatggtaaaggattctaaagttatctctctattcatgatccttgtatttgttgatcggacggagagactccactttatagagtttggggctatggcatttatcggtttgggttactcagtttggtttcggtttaaaagcatgaaaccgatcagcattctttgtcatatctcgggtcgtacacaaatcacaattgacaatctaatgatggatgtttgtaagagtcgtgtcttgagtgaaatttgggatccagtttcaactatgtagtcattttttcttcactaattcatacatttccgccaataagatagatgtgatggttaacctttcaagcttatagagagttcgctagtagtctcttcttttttttgggttcagttatgaatcatcaaaatcagtttctcgtaattaaagactcaaaaaccaacagaaatgttttactagatatgttacaatggatacaaaacgccaagacatctcccgactgactttgtaggcaatctcgagaagaagtcgagaaagagatcaattgggatggaatctagagttttttctttctctattcatgatcgttgtatttgtcaatcgaacggagagactccaatattatagagttcgaaacctagggcataaattggtttggtttggtttggtttatctgtttgatgttggtttaaaggcataaaaccggctcgtacattcctaattcaacatttcttttctattttgcttattctttcttggcgtattaccactctgccagagatttttgtgtcaaaacattatctttgtgacaaactgatatcttcgtaattcatattcatatgactttactgtttaaacatcaattatactaattcatattcagtcattatattgactcaattgaggcaatggtttcttaacgaccaagttattagatacacaaagacttacgccaacaatataacatttgtcactatcaaagcaagtctttttcctagtgtataaaatctcagtcttcctgtcgttacatataaagttaaacaagaaaaaagaaggtttttcttagttcagttttggagggaaagggcacatgacataatataaaacggaggaaagcttcatgatgttacaaaaatggtacgtggtcgagctctttaacataagaacattgattaattcaatttccgatgattcattttttttttttccattctacttcctatatttgacctttttctcttaaatcttgaatttgagcaaatgacagcttttgtagctactgtttcattcaatctgattatctcatatatgctctacttgtgtctatgtatgtttccttgtccctccgaattcaatcaccatttctaaattttcccccggtgtttaaaaatataaaaggaaattcccacaattttataaaaaaaaaacatttagctctcattcccaatttcaatttcgaaaggttttcatatatttcacatacacaacaaattttcaaactgagatatgacctagtagaaaaatcccaacctcgttagtcgttaccttagtcagcaacgataaataaaacgaacaaacccactcccttaacatcgatttattaataaaaactaaacatatatatgtgagtttgataaataaataaaaacgaatttgattgcgtacgtttctttattttatgtatgtctatagttttgaaaaaataattaacgcaatacactcattcacttgtgtcatcgtaaaccctcaaaattttggatttcttccaaattcctaaccattccaaatgttggatctctttaattattaattaggacaggttctacctcataaattttcgcattttatagttttcggataattcgtcgaggaattatttaacatagatctttccttcgctggcaaattagctcacatttagagttatatcccagtatttaagtgggaagatggttacttatcgttcaaggatgttaccggagagattacaaatgtattcgtttttcacttacgccatataacgtttcaaggatacgcggggataagtgagattatttccaacaaatgaatttggaggatgttatatacttatatttaccattttatttgtataactacaaaaaaaaaatcatttgtaagtcaactctcaatttcatcaaaaatatagtccactatatttatcctcaaattctttatatacctttatttatattgtatacattgctagattcatctactaaagtaaaagtaagggccagttgagttactactgatctaggtgaaaagttaaaataagtgtcaaaaggtgaaaaacaaaataaggtttgcttgaagagtgaagataacccaaactaccaagttcgaaaaagtttttaacttttttccataagtggcggtttcgtgaaggttaatatttacttttgagttctagaatatgatagctacaacttttttaccccctcatttccatagattttagagctaagatagaatttgatgaacagacaatacattaacatacacgtacgtacgtacatataaacgtatgcatgcatatatgactattgactatatatgtatgagaaagaaaatgtgtgcagtaatctaaaatcacataactgaccatagttttagtttttatttataaaatcatttgtatgttccttgattgaataagttaatagctttagtaacaaactttaaactgaaaatttacccaaaaaaagaactcagaaaaagatgttctagagaacaaggagcatattgtaataatcctcgagataaagtccctaaatatatatctaattatactaaatcaacagtcactttttcaataactgatacattctcctttcgacatgtgacataagtctcattttttgatgttttactttttttagatcaattttcatttgttattggaaaaaaaataagtttccacaaaaagaaaaagatattctcctacatcttagcaactcttctttttcacgttttaagaattctctgttttaattgccccacttctacaattgaacaacacctcccccaaaaaaaaactatcgctcatctccacggttttaatttttttctgcaactatgatatccaattttcctcgaccatacataattataatctttgctgatataccaaaattttagaatttttttattaaatacagtttacagcgatgaagacattaattttggcatttgtattttgcgggagaatacaaacaacaaggtcagtcatctacttcacatgcattcaaatttatattcttttatgttagacaatgttataagcctttgtttcttaattcgtaatatggtgttattttccaaatctataatttggcttattagtttgcagttgaacaagctagggcatgtatagatgtgtctttatagttattagcgtatacaaagaacaaattggacgatagatgtgtctttcaataatttcttattttttccttacaatgtttttttttgtctttctgtatttgatgttttcttcataataattgcattttctatccctctcgaaaattagtacctcaatcaaattgatctcaagtcaagttctggacacaactaccttttatctttttgaatttaatgttaaattatattcaaaataaaaataaacgtttttctttgaatttaactctatttgttttcttttggaaagttgatgagtgattgtcggtaactatactaaaaatggttttgcatttttctataggtgtggtatgccttggtacgtggaggaaacaagttagacacataagcacatatgtactagacgcaaataatgtcacaaaaacggtttaaaatatctggttttcagtttgcatgtcgtacttataaccgaacgtgtgtaaagttctcatgtcatataccagttctgttaaactaatgaaatatgttcagaggtttaaccactataactattagacccgatttcaattaatcaagaaatatccaaactttttaatatatgcattatgctttacaaaattgtttgatcttctaatgatgtaaagacatttacaaaatataattatttaattgattctaactaatttgtccgcgcataacgctggccgtaaactagttcttcttacaaattacaatatcaatttccactttgggccggaaatttatatccataactctactacgtaccaattaacacatgtgtgtaaataaaactacataatggcatgaatggagtttcgaatcagttaatgtgggcgacaaaataaaatcagattatgttttattattaagtttagaaagagatgcttcattaaaagtttatgctttaatgttaaatcagactatttattatgggtacgacttgtaagcgtaattcaaagttaaacaaaacctagttgggaaatgggaagatagatgatttgataaaaacaagacactgtttggtttcagagacttcctttagcatcaaaacacaaacaaaagcgaagcctcttgagttactgcaaatagagaatattattacccttttgcgacttgtcagcttcagatattctcacttgtattattattttcacggtaaacaatgccttaaataagaaaccctgattggacttttgatctgactctactcttcactctttcttcttctttattttcagtcatgatgtctctctaaccctaatctcaaaaaatccaaactccttttatttatttctaaaccttgattatagctagcaatgattaatataagaattttttttctggataaagaattaattagaaattgagttgtaaatgttttgtgatgtctaaaattcttttgtttgcaaattagatgtaaattgatatatttgagatttgtatgaaagctagttttattttccctaaacaagaagttcattatcttggacttggaggttttagagtttgaaagagtttacaatttataagaaaaaataatcactatatatatatatatagtgtatataatgaattgtttcacattaaattgcaacaacatcaaataagggtaacatactaacatatagtttgtttgtttactctttaaaaaaaggggataaactaagagctatttctgctataatttaggaacaaactggatcacatgacaaaaatgcatcataattcatattaaattttgtgtatatctatttctcatgtttagaaataacattcttgtgtgttatacatgttatcagtttttcttcctagatggaagttttattgttggagtcttttaaaaccatactcactatgttcctctttatttgatgttttggattttagatagaaattaataaaaaatatgttttctatttttataaaattatttttttgttagtttagtaattttatttttctttttttattattagtcacaagcaaaaataataacaatatttttataaaacattaattttggtcgaacaagtaaaaataactcaaaacatcaaataattagaaactaaaaaagtagatattgtcaaattttgtgttgagttcgaataagataatgtggtctcctccaacaaaattatttagaataaatgcacttctatgacattagagaaccaactaatttatttagaataaaacacacatatatattaacatataaagtaattctaattggcttgatataatatataagtaaaaaaatgatcttaataatctctagttttcttgggttgatctccacgagtacaatttgactgaccattatagaagttgagaagcgtgcatgtaataaaagttgtatattacaaattagagaggaaaaagaaagaaagaaaaaagatttgaagatgtgatcaagtgtgaaaagtattggagtagtctccaaattaataatttcgatgctgggcattgacaagataactctgaagctctcaactttaagaccatcacttcctctgccaccattttcacgtttacccaaacacacacatatacaaacaaaattttgttagtcaataattatcaccaaactggggttataacaaggcttttggatacttgtgcttgttgatgttctaggttcgtatgataacaaagtacatccgttatatatattcgaaacacactttaatattaaaaatatatatccaattttcttgtgaaatttagattatttggaattaaacctatttctcttgtcttggccacttgaccggtttagttttttagacgtattttattatttctgtttagaaaataacaacatatatcaactgattttttacttccaatctctttttgtcagcacacaaatagaaaaacgtctgtaagctaagctatcaactaaaacattaacatatataatcttttacgttgatagaaaataaacataaatttctgagttattttttttttggttggtgtgtcactacttacttactactatacctttttaacaataaagaaacactatttctttttctattcaatataatatatgttttctatttgtataaatccattacctttgtttgttttataccaaatgttctttatatataagtatatgccaccttactctattgaagtcaagaacatatcaaaaacccatgcaagaagctcacagagaaagaccaaacacttttgtctctttcttcaaaacttttacatatgatctttgcctcttttcctacaatgggttttgcataactttcaccaaaaccctcctcaaaagcccttcacatattcccaacacaagaaaataaactctaaatccactttcaccaaatcttttcatttttcagctaaaatggattcaactgtgttcatcaataacccatctttaaccttacctttctcttacacatttaccagtagcagcaacagtagcacaacaacgagcaccaccacagactcaagctccggtcaatggatggacggtcggatttggagcaagctaccacctcctcttcttgaccgcgtcattgcttttcttccacctccggcgtttttccggacacgttgcgtctgcaagagattctacagtctacttttctccaacaccttcctcgagacatatctacaactacttcctctccgacacaactgtttcctcttcttcaaacacaaaaccctaaagagttacatttacaagagaggaggaacaaacgatgatgattccaataaagctgaaggctttttgtttgatcctaatgagatccgatggtaccgtctctcttttgcttatatcccttcagggttttatccttcaggatcatcaggagggttagtgagttgggtctccgaagaagctggtcttaaaaccattctcttgtgtaaccctcttgtcggatccgtgagtcagttgccaccaatatcaaggccaaggcttttcccttcgataggtctctcggtaacaccaacctctattgatgttactgtcgctggagatgatctcatatctccttacgctgtgaaaaacctctcatcggagagtttccatgtcgacgccggcggattcttttccctctgggcgatgacttcttctttgccacggctttgtagcttggaatctggtaagatggtttacgtgcaaggcaagttttactgtatgaactatagcccttttagcgttttgtcctatgaagttactggaaaccggtggatcaagattcaagctccgatgaggagatttctcagatctccaagcttgttagagagcaaagggaggcttattcttgtagcagctgttgagaaaagcaagttgaacgttcccaaaagcctacgactttggagtttgcaacaagataacgccacatgggtcgagatcgaacggatgcctcagccgctctacacacagtttgcagcagaagaaggtggaaaaggattcgagtgtgtcggaaatcaagagtttgtaatgattgtgttaagaggaacctcgttgcagttgctgtttgatatagtgagaaaaagctggctgtgggtcccaccgtgtccttactccggcagtggtggcggtagctcaggtggcggttcagacggagaggtcttgcagggttttgcttatgacccggtgcttactacaccggtggttagtcttcttgatcagttaacacttccatttcctggagtctgttagtttttagactttaagataaagagactacttgtggtttccacttctgacgttaagactgcttgttgttttctcaaaattctgtttcttttatcttattactgtctgtatgtagtaagtttatatttctaatgtcaaatgtctaatctttgacaacatgtcaacaacatatacagacagatttctaattgcgtacaatccaatcctaaatccatcaaactcaaaaacataacccttgggagaatggtttcacttgagcttaacctggagaatgagatgaactttgcggttcattattctcctgagttcttcattggcctcaattcctatcctcctgcaaaattagcatcaacataagatcatccttgagtcattgattagtcaaaagaatgaattatgaacgatcttgtatgctcttacccgatcttgcaaccgcccttgcctacaagaatcttgcgttggctaagtttaggagtgatgagatgctgttcaattctaagagacccgtcacgcagctctttccagtccactagacggtgctccagaccatatggtatttcctacaatttgtttcaatcaatcctgtaatttgtcatcttggaatagacggaaactgatacaaaatgttatactagtagaggttgtattattacctgatggacatggtctagtaatctctccctaacaacttcaagagaaatgttcttcaagacttcttcactcatcgtgaatgcatcttcttcccatggttttttaacagcctgatccattaagtattgggaaagatctttcactcctgatcccttaagtcccgatatcatgaagtatctagaaaaccaaacagggaaaaagcacatttcaatcaattcgaagacttccccggtaattgtttttaaactgagtctggtatatatatatccacctttcatatgccggaagatcttggaactcctcagcaacctttaatagatcctttttcttctcaaccagatcaactttgttcatacataaaacgcgcttttgtttcggattttcttcttctcccatgtatttgatcaagcgtaccactcttgaatcgggactagataaatcaaagagaaaacagaattcacaaactacaaaataagtctaagagaactctatttctacttgtaattaatgaaaaaccacagtcatgatgccttcttcaaaagaaagaaatagatgtgtcttcccatcggtttacggttctcaagcttatggataatctcggagagatgaacaagatatgaaagatatcgaaacagagaagctagaaataataatcccaccctaagataccccacttgatgatgatgctcataaccatactactctcagttccgagataacttatgtaaagctaacaaagtacaaaaactagtaaacgactaacctcatgagatgcctatggacatcaaacataacaatgaggacatcaaacaggtcaacagaagtccaagcattttgcacacgagccttgatgtctttgtaaccatatccgcttttcttcagcatcagacccggagtatcgaagaaacactgcaaggttcacaaatatcaaaaattcaatctacgaatggctgatctccacaactaaccataacgagtagtttacatatgcaacagatatataagagaaaacttacgacttgtgtatctccttttgtcaatactcctaacacttcatgtgtcgtcgtgttagtcttccgtgaagcagcagcaacctttgttccaacctacacttggacataacgaaacactaagcataactctcatcaagatgcaataaacaaagatacacaatcacttcaaaaattgcaactttaggactaatcaagagtcatagcagcactacataaacatatacacaatgtctcaattgattctcagagaccaaatcacaggaatgtgaaattaaggaaatgagccaaccatgaaattagtcagcgaagattttcctgcattaggtggaccgatgatgccgacattaagcgacttctgatcttcttctctaacttcaccttcaccaagttcttcatctggtgactctaacgcagcctctaagagagccttagcgagaatccttgacctatcaacactatcctcatcatcttcagaactctcttcttctgcaactttcactttacctttctctgtcaagtttccaaagaaggctttgtttactctttctctgtaccctttatcccaagttgcttccttgggcttcttcacggaatctacattggaatcgtcgattgggtattgactactatcgaaaacagagtcgctgcttgatccgtcttcattgatggaagtgggttcgtctagattcggctgcgctgagtaaaatcggcggagaaagttttgtgcttgatggggattacgaggtgttgtcttcgtcgtcgttcgtgagatggaaattagtatacgtagagatctaaaagctttcatttttgtaacaatggcgaagtagcgatctcggagaagtacagatttgaacgaaatgtaacagaagaggcttccgagggttttagaggttttgatgttttggggaagtggtgacaaagtaactcaatattacagataggcccctcactttttgacaaatccaacgtagtccctaactttgtattcgatataattactactagcaaagtagcaatacaacaaaaattcatactaatcgtatcaattggagtttgaatatacagttaatggaaggaatattagtcaattttgttttggcaaaatattgaacaacatggtgcaaacattttgggtgaatctgtataatataatactttgatcaattcagaagaaaaggagacaaagttcttcctccaagtctccaacgaccaaaaaaaaaaaggactaaacttctgagaaaaaacatctctgagatccctaaacaatgtaatggtaaactaactcacctggctaaagaatacaacagatggaaagttaataacttaaaatcagatcataaattcagtatctgaacaaaagtgagtgaagacttgttgttgtaacaaagccttcatccatatcgccttttctttgacgctggtttggtttggtgccaaattctaaaacgccatccgcccagcaagcctactctctgagattcgtctgtctatcgctgcatttatcgagttcatctgcaaaccaaaagaaacaaacttggtgttgagttaagaagttggatgctttattttgaaagagttaagtgcgtattgttttggttccccaaggcagtgagattgtgcaaaggtaccaaactttgcagagttaagaatataaaaagagctgacctgggtttgaaaccaaacctgtagagtatgatcttgtggaaccaatcaccacatttttaatacaatacaatagacaggaaatataatgaaaaacaaacagatacaaacgctatgtttctcactacctactattgcaagctacaaatgatacctttcgaacattgattcaaaatgctcaagtttcttgcctaagtccttcttatcatattctaagggaagaaattataaactgaataatacggtggtacctcttagcacagaaacaataggatctggaacagaaatgtataaataaagcctaccgaatgggttagacttgcaaaagcaaactcttcttaactttaaaaagggtaaatcagaacttacctggctggtttcatcgtgcactttgtattttggtaaggacattcttctttcctcctgcagatacagacacattgcgtcagattggaaaaccaaatggttcattactcgaaacttttccaattgtaaccattccaacatgatgcataagaaattaggaataaactaaccatagacatcgcttcatcatcccatacaagatagacctcattaggctgattgctaggagctttgtttgcaattacaggaggtggaccaattgaaggaccgctagtgtttgggccagaggcataagaatgagcattagtcccacctacggcaacaaaacatgaaaaagatattacaatttgatacaaaacagctaaaccaaatgtaagtcaatgattctacgaacttgggattgaacctggaatagaattgttaggcggataagcatctgctgatcctaaagcatctgcatgagatggttgctgagccccaccaacaggcagaggagcagaaaatggtggagcttgagaaggaatgctgttattcacaacagggaacagaggttgaggaactggcattgcaggtgatgatgtaggaattccaggaggagttactccagtgactggtgatggttgtatggcaggagctgaggttggagttggagtcatccccatattttgaacaggaaaaagtggttgtggtcgataccctaaatgggcagctggaggtacagaaagagctggattttgaggataccattgttgcggacgaggaggtggcatttgccatacaggagcaggatgacgcataggaggacccggataatacctgctaacacgaaatattttatcatggtcaatagccatacatattacaatatctaagatcatgaactatttcaaaaaactgtttactacaggtgttattgtggtcttgaagaggagcaaaagaatggttctaggacaaagttctatcctgaaaaatcacgagaacaagctagggaaactaagaaccttatgggtcatagttggttaagtgcaacaatatcttagataacgatctatttcaaaaaatgtttactacgggtgttatagtggtcttatagaagaacaaaagtagaaaagttctaggacagagacaaactaaagaaaccaagaaccttttgcatcaagagaactaaaagaaaaaaagttccccatcatttagcatggatcggatttttaaaaacagagacaacatctaagaattcaacaagtaacggccatagagagagtatagtataattagtacatacattggtcgtgcaggtacagcaccaggtacttgttgaggcggatataccattccatatggtctaggaactacaccaccaagaggggcagaaggaatctcaacttttgcaactttggctggaggctcatcctctgcagaaaacatgacttcagttcaaaaggtaccatatgaaacaagcaaacataacaataatatataataactttgataaggcaaaaagccgcatgcaaaatcaaaacgaattcatgaccactagatgcaatagatctacaacacttgatgaagagacatacaaatttatcgccttacttctctaaatcaattgctcataatctaaacagtactctcactatctcaaatgcataccttcttctccataatgagcagtcaagacatggggtggaattccttgcattccatatatttcaatatcagttgaatctcgaccgtctttagcattaggaactctggtgtgaaaattgtagataatttcaaagttagtagtgtcatggaatcaaattccaaattcaacaggcaaacacattgaacagtaccacaaattccaagaaaaacctatcaagcaaaagcaaaagcaaaagactgtttctttacaaaaattgcaatcagaaattagggtttatgaccagacatatacaaattaaccaaacccattcaagagataatccaaaaaaacgattcaaattccagcaaacatacacaatcaaccgattcaaaccacaacacaacagtcacaattagcgcaatctaacagaaatcaaacgacaatcacacacaacaagagcaaaaaaaaaatcagaacttgaacaaagatcatagaggcaacaaccctaatattccaaatcaacctaacacaacaaaaagagccatagggaaagggtaaaaagaaaaggcacatactttgtaacattctctttatgaacctgaagaacatgaatcaccatgccactagctgtagaaagcttcttatgacagacatgacacttaaagtgcttagctttctgatgctgcacaagaatcttctcatcatcaaactctctatcgcagtaataacaccacaccttctctgtagctctcttcttcttcttacccatcactaaatctttctcctatttgttgatttcaagatttgatctcaaaattgaaatctccaatctctcaaaagtctcgttctttgtctccttcctccgctcgctagggtttctaattggtacaaagcgttttctcgatttcttctacgatcttcagattctctgttttttatttatttttactttatctaatggttactatcttgtatttataagaaaaggtactttcttgtgtaatatttcgtaaagaacccataactcttgtttaattatatatttttccaaaatgcttagtaagttatataatgatactattagtattggttatgttatccgttaggatggtcaagtggtctaagagcaacctcattagacaactttttatagatgtttttagtataaataaataataaaattaaagacatttcacttttgttgtgtttaaagtgtctctacagaaacacaaatctcaaactaaaaacattcataatttttttattattattatttatagttttatatttaaagacatctacatataagtgaccaatgtggatgctctaaggccttagactcaagttttggtcctcgtaagagggtgtgggttcaaaccccacttctgacataattttttattctttcaagagttaattttctttgtccaatgaaatctcaaattaacttaatctcaaattaacttaaaataaactgtgagaaaacagaagaagattaaccaacaaagtaagtaatctctcttacaaagaaactttgaccagaaaaaaggaatccatgtaacagataagaagaagagactataagagctaagaattacataactattagaaaagattataaatagagaaaaaaacagaagaagattaaccaaaaaagtaactagtctctattacaaagaaactttgaccaggaaaaaaaaagaagagcaattcctataacaaataagaagaagagacgataagagctaagaattagataactattagaaaagattataaatagaggatagctattcattatttcttaagtacatgaaacacttgcaacaacaaaaaagttaaagatatgggtgctaaatggaattcaatgattataatggtgtttgtggtgacaatggttatagcaatggaaaatgtcaatggagagacgaaagctcaatgccatgaagattgcattctaggttgtgccaccacaggaagaattccgatcacgtgccttcagaattgttaccgtcgatgtcccggcaaacctcgtcgtacattaggtaaccatttttcagaaggtaaaaacaaacaaacaatctaacaattttggaaatatgtcaaagaaaatctattttaatgattattgagatttttactaactatataaaatatattcccctttgtataaataaatttgaagtaagtttgactagtgtaataataataatagattaacaatggaatgttcaaatgattgaacggtatgctaatgtttcgaaaatgtggtgaaaaataaaatagcaacataacgttttgaaatagtaaaattttgagatatatttcggtaataaagtgttttaaatcttagaaacatcattgtcactgtttaggtatacatatagtcctgaaaatattattttttaaattaaactcaagagattatttggaaaaactaaaggttaaaataatcgatggttctaatttgtatagtggaagcgcagaaatagaagagacgatgagtcatgaatcagtgttggactcttgggacttttaaactagctcttcttctacttttgtatcctccttatgtaatatgatcattgtaaatttgtaacgctattaaataaaataaaataaaatttgtcccatgttataaatttctcttgactgtaaacacgtctctgtttaacagtttaagactcctcttagattcgaatctcatatttcataattttggaagtgacatgtagcggcttattgattttcttgattcatattttttattttagttatttcaaagtgtgataccttgtggataaagcaaaatccatatgaccatatttacatgagacaaaagtgaaaccatctatgttcagcttcaagagaaaaacactttgtttcaatttatacatttaaaataaaactgccactactacgtttctcctattgaagcaaaattggctctcacttgttttgccgtttctctgtgcttaaatccgaagcttttacatttttctacaacttgtgcaatgtttgtttaattgtacattttagctaatggttactctcttgtgtttataagaaaaggtactttcttgtgtaatatttcgtaaagaacccaaaactcttgcttaattgtatatttttccaaaatgtttagtaagttacataatcatattattccacttctggtcctcgttaggatggccgagtagtctaagactatctacaatgattacctatttataacacccactttttcacttttaacactccacattattttctctctcttccacatcattattcaacacctacataatttttaatcttacaatagttttgtttaataaaattacaacaccttaccccaccatttttatttcatattttaacctatacattatttttgggtctaaaaatggttttttctgtatttaaatcaaatgaaaatagtctctgtttatagagaatgaaaatttataaaattttatataaattatatatatataaatatatataaatattatgaaataattgaagttatataattaagatgaaacaaaaatattagaaatcaaagcaaccaatcaaaatataacacttgtcacacttatcttctcccttctactttcacggatgttaaaatttatcaacactaaatttgccacatcagctacttttcaattacaaaataccattatagtggaatttgttttttcaccagttgtaaaatggtttacaacaaaccattgtaactagtctaaggcgctagagtcaagttctggtcctcgtaagagggcgtgggttcaaaccccacttctgacataattaacttaaaatagacatactgtgtgaaaaaacagaagaagattaaccaacaaaataactaatctctattacaaagaaactttgaccagaaaaaggaatccctataacacataagaagaaagacgataagagttaggaattacttaattattagaaaatattataaatagagaaaaaaacagaagaagagtaaccaaaaaaagtaactagtctctattacaaagaaactttgaccagaaaaaaaagaagagcaattcctataacaaataagaagaagagacgataagagctaagaattagataactattagaaaagattataaatagaggatagctattcattatttcttaagtacatgaaacacttgcaacaacaaaaaagttaaagatatgggtgctaaatggaattcaatgatcataatggtgtttgtggtgacaatggtaatagcaatggaaaatgtcaatggagagacgagagctcaatgccatgaagattgcattacagattgtgccaccacaggaataattccgatcaagtgccttcagaattgttaccgtcgatgtcccggcaaacctcgtcgtacattaggtcaccatttttcagaaggtaaaaaaaaaataaaaatctaacaattttggaaatatgtcaaagaaaatctattttaatgattattgagaattttactaactatataaaatatattcccctttgtatcaataaatttgaagtaagtttgactagtgtaataataataatagattaacaatggagtgttcaaatgattaaacggtatgctaatgttcgaaaatgtggtgaaaaataaaatagcaacataacgttttgaaagagtgaaattttgagatatatttcggtaataaagtgttttaaatcttagaaacatcattgtcactgtttaggtatacatatagtcttgaaaatattatttttcaaattaaactcaagagattatttggaaaaactaaaggttaaaataatcgatggttctgatttgtatagtggaagcgcagacatagaagagacgatgaagtcatgaatcagtgttggactcttgggagttttaaactagctcttcttctacttctgtatcctccttatgtaatatgatcattgtaagtttgtaacgctattaaataaaataaaataaaatttgtcccatgttataaatttctcttgactgtaaacacgtctctgtttaacagtttaagactcctcttagattcgaatctcatattttataattttggaagtgacatgtagcggcttattgattttcttgattcatatttttgactttagttatttcaaagtgtgataccttgtggataaagcaaaatccatatatatgaccatatttacatgagacaaaagtgaaccagctatgtttcagcttcaagagaaaaacactttgtttcaatttatacatttaagataaaactgccactactacgtttctcctattgaagcaaaattggctctcacttgttttgccgtttctatgtgcttaaatccgaagcttttacatttttctacaacttgtgcaatgtttgttttgattaaaggttaaacacatgaactatagatggtttgatttcaaccactcgatgcaaaccagatttggaggctcttgtcatagcgtagatcatcagttgctctgattgaggaaagatggcttgcttatcaatcaattttattagaagagcggctggttcggcctctctctctccatgccttctgccatttcgttcgcaccagattgtgtataatgtagcttggaaaacataacgagcaataaagctctcgatcgacttgatcatgccattgactggagacggagataattagtgcaatagtgcttgccagttcgttgagtatcttgttttgtagatgttgctgcatctaaagggagacatcctaagtttaattcgacacctctatattaaacttatgatgtcgcaagaaggacttagttagtttaacattaaaccaaaaaaaaaaaagaaggacttagtttaactatttcacactataatttttaaagaaattttcacagaagtggctaaaaaaaaaattgctctcctgatttggcaaagtgagatgtggttttcaccatttgtcttttaaatggtttttagaccaaaatacccttaatgggatcaaccaaaccccacagcagttggtttcggtttagtttctatggtttagttttaagaaaaaaagaaaaaaaaaatgaaacgaagaaaccaaagaagaagaaaaagaggaagagaaagagatggagagatttgaaagagaagtagaaagaagttcaaacttcattattcacttcttcatatttcgacatctctccattgaactccaaaattgaggaagaaatttcttgttttcagagatgaacaaaatgcaaaaacaaatcacagattcaaacaatttagctttttaaactaaagatactctaggtttacaagatttatatataaatagtaattaaaacgtataaaaatgagattttgagaaaacagctaaagatggccgcaaaattaggtttgcagaaaaggatacacaggttgaagatgactgaaaaattacaattatacccttcattaaatttcttctgtgtacgtatattcaatttacagtgtacgtacacaaagttatttagtcgaacgtatatggtacgatttctaataagtcaagctattttattacgtattcttatatctcaataatctccatacatacataatagttaaatagatatagatggtgaaataatatttgttcctcatattgaaaattatgtacgtatatgtgtaatgtacgtatatttttgttggtaaattaatgtatgtacatgtgtaataatatacgtacatctttgtttgtaaattaaattattaagaaaattttattgatacaatattaaaccaatattggcagtgggcgagatatattctaagacgttcatacgatgtgattttgaaatattcttaattcttgacgacttgagcagtcaaatgtcatggacaagtatcatcaacgcataccatcaccaatcttgtaggatatgacctaggttgcttgtagcaaaaagattgtttgattgcgagataagacattgtttgttgtatgacttttctgttcttaaaaacactctccaatttatagtgtacgtacattggtacaaaccatgttgacacatagttcttggagtcacagctggtgtacggtcacccgggtgagaaatgttatctccgccaggtacacgctgacttgtgtacgtacactctgccaacagaagactgaattcccttggatgttgaacagtcagctgtgtgagaatgatgttctcctcaacattccctattccatattcttctacaatttcatcgttccacttgttgtaatcataatcttcgccactactttcactaccatcaatagtaggatcgatggtacttccctcatagatccatcgtcaccctgataatcatcatacccatcaccatcttcgttgtccccccccccatcttcatcctcatctgttttatcgtcttcaatgtcgtcttcctaatctacggcctcattattttcatcaacatttaaaacactatcacacacacggtcactttcagcatcgtcaccatgagtcctagagacattattcctgagtgtcttgacagttgtaatgatagagacaaacaagttgagagaaggatacccaccacgaataaaaaaaattgtatcccaccctcacttgactgtcaatgtagacaggagggcgtttagtatctatcatcactaacatctctctcggtatccagtaactaattatgggattgatctctatggacttcaaacatctctctcggtatccagtaactaattatgggattgatctctatggacttcaaactgaaagtctcgcttactgtacatacaaattccgtgtacgtcatgttttccttaacacgtacacagcgaccaaacatgtcttcctctggttcaaatttccatttttcttctttgcatttccactcaccgaccatagtaaatacgagattatccattacccaactgcatcataaattcaggagaaacccaataaatgcaactgaaaacatgattatatcgacaaaaacaaatagaatttcgttatacgcacttataaacataaatatctacacatttaccattttcaactaacaaaattagaaataaaaaaattctggatatttttataaaaaacaaaattgatttcgaacacaatgaagatcatagtgtattataacaaaaaaaatctttaaaacttcattacttacacgataatgcttgtcttggccccaaacttcgtaaataaacaagatcaacacatcttcaacatcaatgtacgttagcaattaatgtttgtttctgggttcatctttaactcaacaattattatcaataattttataatattataacatataatgatgattttgcattaattgtgacaagaatcacgtctaaactttttgggccattaaatgttgacgtcatttagtttttaaaggaaaaaatctcccttctaactgtacagccgcactcctcaaagtgaaacaaaaatatctccaactaaaccggaacagtgtacctaactaaacctgactaactaaaccgtacattcaatagtttctcaactgtagcagcaaaggtaaaatggtcaaattttagctgaaaagacaaaacgtaaaaaccacatttgattttgccaacccctgaaaataaaacatggtcaaagggtgtgacatgcaaattaccctaatttttaatgcagactttatcatttacacagttgacttgtatatatttttggaaattttgtgagagtcagaaaatgaccagcagttctttttctttctttataattgctggtcgggtttctttaaataaattttaaaaaaaaaaagactttctttaccaaagaaagtaagcgcatgaaatataagcaaattattttttctgaacaacttgagatccacagcgcaattcgacacatgctctaaaattatcgcattaatatggtttgtattttataagaaagcttcttaaaaatatattcttagaatagtgttatttaatggtaattcaatttggtcataaagaaactaataaatcttaaaatgttttggaaatagaaagtcttcgtcatatagcaaaccctttaacaaaaatgtactcatataatagtagtcaatcgaaacagacgataacgtgtatacaaatacgtgaccataattgtttagatatattgaaactgtcagacaattttgaaaagtcgtattaacaattacgttgttaatgtagtttggtgttgatcttgcgtatataaaggaaagcttgacgaaagtaattgcatcagagaaaaagaattaaaacacccgagacatcacaacaaagaagtagtcgaaacctaattaatccatcaatggcgatgtcgggaacatacatgacggacgtgcctctgaatggatcggccgagaaacactacaagttgtggagtagcgagacccatcgcatccctgacactatcggccacctcatccaaggtgtcatcctccacgagggcgattgggactctcacggctccatcaagacatggaagtacaatcttggttcgtatttctactcattatctcatatatgtataactattccatttattcctaaaacattattttctaaacctttttgttctacaaaaactgattttctaaatgtctttaattaattctatgttaataatttgtaaacataaaaaaattctcattgaaaatattttaatttatgaatggttattggtccataattatataatattttttattgagagtaaataatgtatttaaaataagtaaacactaatcagtgtttctttttctttttgtgtaaaaagtcctaaataatatcaatcggttaggaagagagtacatgtgctgcattcatgagtatccacatatcaatcactagtcagtgcgctgcattcatggtatccacattacaaatgatttgttttaatatggaaaaagtagggtttatttagtatagtaagaaatgaatgtgtttggtcatcattcattatatatgaagatgggaaggaggaagagtttaaggagagaacagagatagacgaagagaagatggcggtgacgatgactgcgctcgatggtcaagtcatggaggagcttaaggtgtatatcccaaatctacaattcatccccgagtcccaaaatgcttgtgtctgcaaagttagtgtgaagtgggagaaacgcaccgaagactcagaacccgccaagttttataagtttctcgagaagatgattgctgattcggatgaccacattctccataaccaggaatgatggatcgatatgcttaatcatcatcacattctccgtttattatatacgtttattgtttgtttgtaatttgtgttcatctcgtacctgatattactacttcttaatttatatatataacaataacatcctggtgttgtatgtccaacgtttatttctatacgtatcgtttatttttattctatttttttggaaggtatggcaaagagattttcaattgctctcagcatagctgtcacttgttttgctatttggaggagacatttaatctattgtctaaaagacttagggacaacatatggtaatgataatctccttacaaaagcatagcactctctacataatcgaaaaaaggtaccattacagaaatctgagggaaaagagttcctaaatcaaacgcaacagttctaaacctaagcctatttgtcttgagatcataatagacaacatgagtcataccgaatcttacatcgcaatcgtaaggtgcgaatataatctcacccgtgtgaatattgcctgtaatgagaaatgcatcgtcgtcgtcttgtccaaataaatgcatagaatgacaaatagagaaacgtatcttcgaccatttctcagcatcttccataacccacaattcaaatgtatgaagtgaagtttcaaaggctaaagctactttcccatggtattttatcaaagatggagaatgccccgggcggtaacattgtatgctactctcgtttaatcttgaaacgagatccaacttttcggtcctcacatcgaatctcattaagcaccattccaacatatccccgcccgtaaaagcgccataatacaaaaccccatccatgcacacactgttagttttgggacggtgatgaatgttacattcaatcatcctccacgattgttcaactttttgtactcctcctaatgtgaacacttgatgttcagaagacggaacattcaagtaatcattcattctttccgacatgcacagtactttatattggccatagactggatcgtatccgaaaaagctttggatgatcttgcttcttgatttcactttgggtaagtaaatggacttacctgttctagggttagttataagttgttgctgaccatatccaaagcatatcaagccactcacgtaatgaatatcgcagctacgccgattcgggatttggcagttggtgcgagagagagaagaaagaactcatttccccgctgagaaagttgatgaagacaagtagaagaaccatttgtggtgtcctttatctttatctaagctattgagagcatagagcagatgtggctgaattgacgagaacaagaacgggaacgatctgatgaaatatggacttcggatgatttctgaccataacttggacacaaggagaaacctcgatacatctttcaaaggcaatctcttcacgatctcgatcactatgtctatacgaaccgaatccgaatcgttcctgatctctgtctttttagtgcgacgtctcgtcattctcatgacgtttcttgtttctcaaagcataaaccctaactttttccccacggtctcctctcttattaatgtataggagacatggacgatttggactaagaaggcccaaagagacaggatttggactttaggacaatcttctagtactaaataatcttgtgaacaaaaatattggttcaagatggtaaataaataaataaatccatattttcatgaaaaaaagtgttaccatctctgtttcattctgcatcaagacaaactctacgatccaatatatgcacataagatcaaactcccactacgatatttctcctaatccgtagaagtaagaaaaaaattaagagtaacgcaacatgaacattggttagaacatctcttgtacaccgtagatgtcacttgttttgctctttgggggaggcagtttttctaacacccagctcggagagtcacttagccagagacctacaccggtttctttgtgcttaaaatccggcgattttggggttctctacatggattagaactataaatgattagtatgttacctatatgtgaaaacgattggttaaatgtaacggaattttcaccttgtccactctattgtcccaccacttattcatgttatctaccaagtccttccatgattcctctccggcttcacatgttgaaagaagcaagattgttaaagaaaattcgaattgcatcttccgagtcagagacgaaaagattagttgtcattccaattcatagaatactgcagattcattggtaagaaaactgtttccttaccctttggttgttttgcgtattttggaatatcaaacttcacgtctttgagctcggacaatatctctgtaggagcattgttaagccaaagcgcttgactcccgtctttcttcttgaaatcagggtgtttaggattaacctgtagacagagatgtcaagaaagaaaaagaaaggagaaccttagccaaatgtatcacagaattgtaacaaatagaaccactaagacaagtttcattaccgatccattctgtttcatttcacggtaatcacaccattcattcggtttatcaacaagatcaaaccaaagattagttccaaattctcttcctctttgaacgctagctaagaacaagaagatgaatgttcatggttataatcaattttaaacagccaaaccagtaaggatattacagtaaagaaaaaaaagaaacgggaatgatgcgctagacgcttaccagaatgctttagcacaccttcattttgatccaacgttggcaaaacctttggcatggctttagaaccttcaatgtagtggagatcacgaaccattacttgatgtgaaaagctaccatgaaagcttttaaacaactgaacatgtgcttggtcagaatttgctccagattgaatcacatctcctaaaatctgtccagtaatatgaacccgatcgtttttcttcaaataagagttagccgtatgagctaaatccccttcaaacagtaccggaatcctgatgttcacaaaatcaataaatttcttatcaataacaatatagtaatgcatcatcctaacaaacatcatttcaatttcaactcaataacagcccaaaatctagcaaaatggaccataggtactcaacaaaattcagaatcaaaaccataatttcagagttcatggcttaaagtcttaaactttacacgaaccaaatccacaggtaatcaacaaaattcagaaccaaaacccataaattcacatttcatggcttaaagtcttaaactttataagaaccaacctacaagacaatcaacaaaactcagaatcaaaacccaaaacttcacaaatcatggcttaaagacttgactttagccaagtacagagttacaaaacgacaatagaccaacatgcaaaactctaaaacccaaaaaagcaacaaactttcaaaagactaaccagaagttactagatgaatcagactcagacttggaatcagaagaaggttcatgagaaatgactgtgcctgcccagaattttccatcgagtgtagagtcgaactgaactggttggtgaacgtaaccaattaaatctatagagttcgcgattttgggttggtacggtacctccatcggtctcggccactcctccgacgatttctcagctctgtttcctcctcctcctccgcgagtacggctactactttccgtagaagaagttgaaagaaattgctgagaagaaagaacccatgattttctagcagttgaatttaacgaaggtcttatcgatttcgaaattgatcttccaagaaactgcatttcgtgaagattcaaacttttagccttttagggtttatggggtttgacgacaaaaaaagaaagactacgcctttttagattctcgggttcgtcaataaacggtgccgtttcttcacaaagtcgtttcgcggcaaaaaactaaacgatgtcgtttcgcgtacaatagtgcccttacgaaacgatgctgtttttgacggggctgatttagaaaacgtagcttttgtgagggttattttgtaatttatttttgtttagtttgtcacttcgccgtgcgcggcgggagagaacgctggcggaaaaaagaaatcggaaaactggagaaaccctaaatcgacgaaaaggagagacctttgaatcgaagcttggtgtgtttatactatgaagagtcaatggtctaattttcatcaggtttttcatctttctctgatcttagacccccaattccgaaccatctctgattctattcccaaactcgttgtttttgcagattgggagaaactctttcttagctgcttctactgtttacgtttcaaacgaattcaacttcttaaacacttctcttcttaatcgaagaagcttctgttttgcagaaggaggtaaattgcttaatttggttgtgtgttaattctaattgttcttgcatagtacatgaattggttcaagggtattgtctagatgattttttttatttgttgagaaacgaattgaatcgaaaaatatgagctttaagcttgatggtggtacaatggtaccttgtgtttgaggagttttgctgatctctgtaatttgaaatttagatcgatccagctttgtagtgttgaaatcggaagcagagttcaacagtgcattgagtaaagctcgaggtaaataaacaaacagtcattggtttcttttgttaactacttcagaattatatgagttgcttagtatgattcagctctgctttatcttctcttgatgttattcatttttttcagatggatctttgccatcggttttctatttcactgccgcatggtgtggaccttgtaagttttagttccatgaaagcttctggatagtaaatcttttctacgtgtggcgttattaatttttgtatggtttggctctaggcaggcttatctctcctgtgatattggagctcagtaataaatatcctgatgtaacaacgtataaggtcgacattgacgaggtgtgtttgcatcattagcatgacttttataggtttatacaagtgtcatcatgcgaccgaagccatcattgtaaattgttctgttctgtggttagaagattttagagtatctgctatcaaatgccttttattagtcgatatgtcgaaccaaatggagaactcaactaatgttaagtctgagatatgttgctacattatgcttcctgtaactggttactgatatcacattctcaaaagcgacataagtcacttagtagagaaattttgtggttgagccacacacaaataagctgtcttgttatgagtatcattgtaagctccgttgacaaagatatctcttattacatatttgcagggcggtctatcaaatgctattgggaagttaaatgtatctgctgtggtaacatcctctgttcctttcaaaaaatactttacattttaggatcaagcacgagctagctttgcatctatatgaactctaatattatcaatgtttgagatccatctaatggagcattatgataatttgatgaatgcagccaacactgcaattcttcaaaggtggcgtgaagaaagcagagattgtaggcgttgatgtggtgaggctgaagagtgtcatggaacaactctacaagtgagagagactcttgacttctgtacactacattgctttgagttgtgattatcttgtgcttttgcttttaagttagattctttgattctcgtgttcctgcaaattcataagggtgctaagtttggtttctattaagagttctttttccggtttagagcataataaaactgagttaaaataaaatggtgtacaatttgtttgttttcactcttcattctaaatgttactcatagtttttttttttgtgaaagaatgtgatttggacatgtttcttggcccaatatggatggatgaaacagaatcgggctagtcttaagaagattcttatgatttctctagaccataaagacaataaaaaccagaacaagaattttagttgggacttcaaatttggctaaaccaaaccgagattaaaccggaaaaggacaggacagtggtaaaaatcagtgataagagaagaagaaacaaatacaaaggagggagttagatgatgatagtgagtaggaccggatttgaccggtatagtacaatctgtttttacagctccatacagacacttaacaatcattaatgaatgagaacattttatgtatatacacaacaacttctcttatctctatccttttatgattttatctttgtccttcttctctttgtatcgtaacactaccactggatcgtacccgatacaaacgagaaacaaaaaaaaaacactacaaattcgatataagtcatgacttattattgtaattttctcatacaaatttggcaaaaaggttttaagaaatttcaaaacaaattgtatacttttcttcttgttaattaaagacaattatgtagacttacaagtaatgatttctccaaattttcaaaattctttggcgtaattcacaacaattgtaaattttcattaacttttgtaagttttcggttacacattaatataaccgagaacatgaacatcaccaaacatgacaaaacgtgatgaacaatatcgataagcattttcgtctaaacaattttttaatatataagcaaaaatatatttcgtgaaaacaaagtcgtggaagtctaatttggaagtgggttaccaagggttaagttaagtgcttatacaccaaattataattttatgcaacaaataaaatataataaacggttttacaaacactttcacagtaaaacagtttacacacataacaaagatctagtttatgtgctactcaagatgataaaatttactttcaccacatgaaatcttaatgaacgactcaaccaacactacatcacaaattttctgtaagtttacatccattactatgtaatagttcatattttatgaggatcaatcttagatataaaatagctcattttaaaaataataaaaataatcctatttaaggtaaaattcttttgtggtcttcttttacttcaatccttcttttggttttatcgaaagcaagtatataataatgataagaaaaataaatgggatgacgagagagaggagggtggggaatggtcaaaggagaaggacaatgatttggccctcttttgtttcttcagtacttttatttcagtctccttttattttccatatattatcactaatcttatcatcttttttgctattcatagcaaaaacacgatccatatctatgcttaaacagactttgatagccaaaagctgtcatgaagttttatagtattaagtgataactatctatgaaacttttccttaaacttttatttgagttatcaagacttgaggaaatgatccttcaatttggcgaaataccgataagttatatcatatgcggcaaaagaaaagttagaaaagttcacaactctttgattactaggtaaggaagaagctatagtatagggtcaaaatgttctatttggttcaatcacagcatatgttttgtcattttatataattattatatattagtgcaattaagattgaagataccatcctatgtgttgtcatatcaaataagattatgtcattcccaaaaatatatttgataaaagaataatacactcagtttgtcttctactagactgtgatatagttaaatttattgcaattttatgatgcttacacatttaggaatggaaacatatcatataccaacaaatccaagataatctaaatccaacctacaaatattcatatttggatatgtagcttccggatatccatccaaaatttagaatcaaattcgttaaagacaaaagaatttaacataattaaataacatactgaaataattttaaaaatctaatatatcataaaataacaaacattgattactaaatatgtatctttataaataaaagatactatatatgtatcttcacaaaacatatgtaagaaataatttacttattatatatacatatatatttatgtctagatgttaaattagaatactcaaatccgaacctaattttgagggatccaaatttactttcgggattttggacctctcagattttgaaattttgaataggatttgggatcataaataatgattcatccatatacacatttataagtactatcaccgtacaagataaggcgatagaaaattaaatgtatttttcacaaaaaaccacttgattaattacaactgatatgtagacgaattttctgtgattaaactgcagttttctgataattaaatcaagaacattgccaccatttgaactctataatcaagaagacagaacaagatcggtaggaggtcctaaggaggccaaaaggactgacaagtgttttcaataatgagagtgatcttttggagcagtgagtcagatccatcaaaatggagaagactatttctctctcctctctcaatttcaatctcaaagaaggtcccatctaaagaaaggctaatagattgccagattctgcagggagtaaattggccagctagttttctttctatggcctctctgcaccaccaccttcatcattttcaaccctccttttttcttcacattatattactattatctttattacttactattcaaagaaaaaattgaccatttcttgtggaaatatgaacttttcatcactattcaaagaaattgaaaccataagttaattatgggggttttaataaacaaattcattagttaattatggttttatataacaaattttcaaagtatttaaatttgaaaacgtttgagttttcatatatacaataatcctagatagtctatcatttagtcatgtcgaccaaaacttaagacatagctcagtcaaagccatgcatatatgcggtctcttacctcgatcaccaaagcaaactcaatgatcaacaataagggaaacaacccaatgatgatattaatctattacttagcaaatataaatataactattgttttaagcttaggagacaatttcttagtggagatacatggacatatttttttttcttaagagatacaatgacagaaatggttattatattgtgatacacaaaaaatggttaatataaaagcaaacatacgacttgatgtttctaaatcccatgccgtatgctttagaagtaattattgaagtctcgcaatattaaaggagtgacactccagtttttgtttatgtattacaattacattatatgcgtttgcaatttgtttctccttgcaataagtttattttcttcttgaaagcttttggtatctctcttattgtgtctcaaaaataggggtttctagtttataactaaggtgggtagtcattgtcatgtgcattgaggggacatactaagaaacttaataaaaagataaatcaaaatactttgaactgctcattttttgtatttttactagatatctttctaaaataatcacgtgggtcctttagggagtgaagcctacacattacaaagaaatcgacatcatgtaggttccatttacctaaatgattgagtaaacggtcaaaagcttctatcataccatatgcctcaactctttctctctttctttttcttggaacaaatattccaaatgaaactcattgtgttaactattttataattaaaaatcttattatgtttattaagattcgacttagcaagtatgtgaatttagcggaaataagcagattgattgatacgacaagaaaacttcattgcacaatactaactacacaagctttcaatacaatcaatttcaagttataacttcatcagcttgtactttctactacttcatgccacaatgttagtgacaaatccaatattctgatttaaccttaaacaacaattcttatatcaaacttttcgacattattagatataaatagagaaagaaatcaaaattttatattaaaatatttcattgacatgtcattttgttgcgataaaactccttgcaactttacatgacatcactaccatttattttcatgttttatcattattcacagattcacatgatacgaaaataatgagtcctagaaacttggtttgaggcttaactgtggttaaacaattagaggtcaattttacaaccattgagtattgttaaaatttggagaacaaagagacacagaaattccacaaaatttggacattccaaacctcttacaatattcttatatatcattccagttttaataatctataaaatttatcgtagtacaaactggaaaagaatggctatagaaagatttatttgcaaaattctttaagtggatgaaaatgtacacgattttttctctatatttttcatgtgccactcgaattaccaattttaaactaacttggccatctagctaattaacttaaattatacttcaaaaacggttttccgcatacatctcatcttcatgtgttccactgcattagttgtttgccctcatcgttgcttttgcagggtacatatcatatgttggagatattatattaatcataatgtagagaaaacatatttgaaattctacatcacagatttaggaaattaactaagcatgtaatatatttgatcgacaataatatgatttatatcttcaacatatggtatgtatttcggcattaatgttaatttccatttcatgttgtgcctactataataaaatcatagaatgtatacatattatatatataaggtacataaatgtttttctttataagataaataaataatattgatttagatattttttcgacgatagagaaagagatcttagtggacttctgcaactaaaaaggctgtatgacacatacacacgtcctattgtttcctatctgtccgactacctcgaacctcttgtgccttgaagcacaggctgtccaggtgatacatatccattatcatatttacttattaataaatatatagtaatgtatttgtgtaaaagactcatattgtattgacatatatttatcgaaagtgaccacaaaattttggtgtatcatttatatacaaaacttcaaattttcataattatatcaaattttgcagtgagtaaaatatataactcaataaagatgtacttactatagtttttgttttgctttatttttggtgtgcatcctaaataatttaatgaaattatattatattatgaaaatgtgtagttttttaaattaaaaaagaaacgtcaggagtcaggtgggaattggcatggttcttgaaaaagtctgtatgggtgaatgggaacccatctctccgccttatgcctcttttccaataaacgaatattaagatctctatttcttccctatatatttttttaaaaaaatttaatgttaaattatatttaaaagaaaaagtgtactttgttacaactagtgcagcaggttattaaaagtatttaagactaatttctaagactagaaaaactgttaaaaatgatcaatatcgagctcgtagccaagcttggaaggccttatcgtaacgcctatctccggattgtctgatgattgtgatttggttccgtgtctgcttatcaatccatccaatcacagtggctggtgtgttgggtgcagcatcgtgtctcctaccgtttcgctcgcgccatacgtgatagattgtggcttggaagatataccgggttagaaatccttctacacggtcctggaaatgagttgatatgtgagtgagtaaatgggaccacctagttgaataccttgttttccatatgcccttcgcaagcgcagcccaaactgtagaagcatatgaacaagagaagaagaggtgttcgagagttttggagttgttcgtacataatacgcagtttcctgatacacttccactgctattccacttcagcatacggtcgcccgtgggaagcctattatggatagctaaccaagtacagagagcatacttcggagtagcgtgacggaaccacacccctttgtgccaagagactgtggaggaggtggccttaataagatgccaagtatcccttgtggagaaatgtggtttgaaaacatcattttttcccctccatagaaccgtatcttctgcatcactatgatgtatgcgttgatatgccatcatctcttctatctcgtttaacagactagtgcgatggcgccgacgacttcttctagtccaagcatctgccactgaagcctccctgggtatcccgagatctatggttcctttgtcaccaacggtatcaatcaatctcccatgagcggaccaatgatcataccagaaagatgcactttctccattccccacctcaactctactaaacgatttagctacatccctgattttaagaatctttctccaaatccaagagcccatactcgtgctctgttttaacgaccatatagacttctttctgattaagtattcagcaacccatttggtccaaagtgaattgctattagagatgattcgccataccagttttagacaacttacatcatttgcttcctttaaatttcgtaaacccagacccccctcagcttttggtttgcacactatatcccatgaaattttcgccttatgtgaactcatttcagaacctgaccaaaggaaggatgaacataacttgtcgatctctcgtatgcattgacggggtaaccggaaagcagccagccagaagttacaaatactccagagaaccgactttatcagattaaaacgacctgcgaaagagaagaaacgaaaagtccaagttgcgatgcgttttttgatctgctcaagaagaggtgagtagtctgctgacgtgagccttttagttaccaacggcaaacctagatatcgcaccggaagttgccccacatcgaaaagaaatttagccgctatctcttgtttgattattggggaaacccctgccatgtataaagtcgacttttccaaacttattctcaaacccgaacgtttacaaaactcatcaaaaacctccagtattccttcgatagatcgagtcttaccatctgagagaaccatcaaatcatctgcaaaactaaggtgtgttagtcccaaacgttgacacttcgggtggaaaccgaatttccttacacctgcagccttatccagcatcttcgaaagaacatccatgcatatgacaaacagataaggcgagagggagcagccctgccttagaccccgcttgctctggaaataacccacaagatccccattaacctgaaccgagaaagaggccgtagtaatacaaagattaatccaatgaataaacgtgggagagaaattcatggctaccaacgtgtttgtaaggaaggaccattggactgaatcaaaagctttagatatgtcgatctttatagcacaccgcgccgagatcgaatctttatgataatctttcacaagctccgtagcaagcagcagattctcaattagcaatctgtccttaacgaaagctgattgattttcagcgataaatctcggtaacaacagtttcaagcggtttgcaataatcttcgagatgaccttgtagagtacattgcaacaggagattggtctataatcccgcatttccttagctgccaacttctttggaataagcgcgaggatgatggaattaatgcccttaggaagaaaacccttctggaaaaaagattgaacaggcaaagtgaattcttgtccaataatatcccaagttgctttataaaactctgacgtatatccatcaggacctggagatttatcctttggcattgaaaataaaactgttttaatctcctctgatgagacctctcttgtaagcatctcattatcactgtttgtacaacggaactgcaggagatcttgcaactctctaacctcgacacccacaaaatcctctggaattagctggagaaactctttaaagaatttttcagcctcaaccatgatgtcatccccttgcaccactctaccatccgtacaataaatttccttaatcatgtttttagtttccctttcaataacagctctgtggaaagttttgaaaaaaaaaaattcaataaaaaaatcatatggatcaacaaaaaagaatgttgaaaaattcatatatatatatatatatatatatatatatatatatatatatatatatatatatatatatatatatataaaccttctacatttctagtagtattctaaaaatatttcctccttccatttattaaaaattgtttatattttttcatgttttccatattaatgaattttaagctaataaaaatattttaaattagtctcagaaaaaatcattaaaaaatgtaatgataagaaaataatgataaatcatggaaaagtcaattactatattttattgtatcattgtatggttaggaactaatctggattgtaaaaaagtgatcagtatagtataatactaacaaaactgtgtttgctccaataaaaaaaacatttgtatcaattactggtatgaatacatataattattaagtcttactaatttagtatactagttaatattttaatagacttatcttaaaaaaatgttaagcccaaagccattgcattttgcatgtggaggagaaggaacatgaaggtatttatggcagagaaagacacgtgtcaaatgcccgttttgccacctactgtatgtacgccaatggacttatatatgctacaaaactgttgcatagattgttacaaatatggaaacctaatacgaagatgtggaccgaccatgtgctttttatcctcatcaatctctgaataatccctttttatttctcacgcatattactttcatacgtttctctaattatagttttttgcccttaattagtaaactgtttcttaatttttttcactaagtcttatacgcacacgtgatattttttgtctatcaccattcagtattcactggcgacactaattattagatcactaaatcatgtctttcttgtacggaagttctgaaaagttgggtaagtgtttcttttgttttgttttaatactaagtactagtaacaattaaaatgaccaaaatgagagaaaaataaaaataaagacaggttttaaaaaaatatgtatacggtttaatgatttttactgacaattaaattcaagagatatactaatatttatatatgaatttattttgtcgataaacattttagaaaccggtttggaattttatggtgtaagaaagatcctgatatcgtctttatataacgattaaatctacttccataattgtcctttgaaatgtgtttattcataagaaactatccttacctcacacaaaaaaaaaaaaaacattgataaaatccccggaccatgaggtgggtttagttcccgatgaagggatcctaagatacatttgcaagtaaaacaaacatagagttcctacaaattaattgaataaatcataagaaaaccatttatcagaaccacttattcgattgtgaaaactatcactaacaagagtagaaaaccaatgtattttatatagtttatatcaatattgtggcagtctctacacatgacctactgtaaaaaggacaaacttaagataaacaattcccacaaaagaacacctacttttttttgtgttaacatactcttaaaatacaagagttgaatatgtttgggctccatacatttatgttactccgtgttatataatttacggttttctgcaaaaaagaaaatcaccattttctataagtttatcatttatctccaataatacacaaatttcaaaatgtttctacggttacatactttagatttacaaaatttcaaatattaacttggattttttgtagtgaaaatttcaatatgatatattatatgttaatattttatgacgacaatttatattacatattatttttgatttcgtagaactaacatcatttttaaaaataaatccaaaattgaaaaaacaacactttaatagaaatcgtcaaaactcttaaaaatcaattaattatagataggtttgtcaatcaaaataacagtaacaaaaaaaaagaatattgtaaagcgtttaaaatttctgtattatcaaactaattactatgatatcacactaaacataaattgataccactttaaaatcttaaacttattgcttgttgtctgttgaaagtacacaacattttattggtgttgaaaagaaaaataaaaaaactaacattttattttcatactagtaaagtagaaaaaacggtgttggtgactggtgtaattgatgacgcagctaagacttttcagctgtccccgtgaaaacctgtcgtcgtctcttccctctcccaatgaaatttacccaaactacgagtcctcttccttttctttagatttattaatctacacttattacgacgaatatacttttatatagtaccaaaatcacatacaacttcttttattcatgaagagaccaataattcatcaacgaatacaagtaagaaactaatttgacactacccacaaaagcaagaaaaaaaaaccccacaaaagtaaacacattttcgtgattaaagagtactacttattttatcgtacccgttacaagatatacctaataaataaaacacgctacatatataaatatggaatgcttatttatataaaatatatatatgatttttgcctatggttatattggtttataattatgaaaaaggagccctatgaggagcaccttttcttctattaccaagtgatgaaagaaccatcccaggcaagtaattgctctctggcttcttcttcttgctcttcttcttctctttcttatgactattgttaccttgctcagattcatctgaaattaccagtatatcctccccatcctccatcgtcgatatctctccgagctgatcatgtccgtccattctcaaaccctcgaacgtaaaatctgattcatcaattctatagagaatgcttgataaatcatctccttgatatgataaataatccacctgcattcaatttttttttaatcattgttaggtaacataattgtgtctttataataataacaacgcatacggctaatattggacatgatagttcataacttaggagagtgcccactttgtacttgcacatgtgtttaagaatattaaacaaatgaacacattaatccaaattttttgaacatgattataaagcatagaaaaaacagctgtttcccaaagttttgttttttcatcttaagtgtaatgatttgttttaaaaaaaactttatgtcatatggttaaaaagttgaagcaatcattctattctattattttttccaatttttacagaataaaaacaatcaacaagtgaatctcaagagttaatgggtctcacttttgttcattcatgggtcaactatgtcaacaacttataactaatttccatgtttttattgcactaggaaggacaaaaaaatcgaattataaggtttaagttattttttcaattagggataacctaaaagtaaaataatttccaaatttttgttgcaatattattaccttgcaagagagggaacaaaagtggaatggttcttgaaggattctatcacaagtgaagcaaacatttgaagaaaccttagctcgtgattgttgtctttggtttaagaatatcactttggctccattaattgtatatggctgaatatacaaattctctatcagtataataaattaaacatcaaatcaaaatctttagaaagagtagaattcacctgaacatatgaacaatctatgagcttctcaagatcactcaaccgaacgacgtcgtggtatacgtatcgtctcacctgccaattcataaacgaaaggatttaattgccacaattttaactaatggggtaaatttcataattccttcaaaaaaaatccttcttatctctattgaagcaaacaacagggtaataaataaatcttataatattatcaagaaggatagatttgcaccaataatgtttttttggggaatagtggaaaatgattaaaaaatatgaattgataaaaacaaaaacctgttgaaaagaagttaagggaagtgaaggaaaaggaatttggtcaaagctttgatgttctttgaaagcaacagcacaagagaagttgaacagagaagacaacaaattttaaaggaaccaagcaatttgaaaagagaaagaattaataaaagatgagaaaaagatacatactatatatagaaacaaaccaaatccacacaatagacaattcaagtccaattactatcatcacataaatccatgatacatataaatctatacactgtacggttggttatacatactctacaattctcaacataattagagaaatgatcatatgtttagagtaactaaatcaaacatgtacaattcaatcttagaggaaaaactatagttatgagaaatttagaaagatggcttaagtagatgaacattataaagaaacatatttttggggagaagaaaaagtttatgataatgaaaggtccattaaaaaacaaagttccaaaagctctatgatttgcatttttttttttgttaacagggaaaatcttaaaccgaactccagactagtcccggaattgagaattttccgggaaaattaccaagaaaaaaaaaatggtttatggttaaatttaacaatttgctaacgtttgtgagtatatacatatttcgctacaatccaaacatctcttatgaaagagagaattttcttagagaaatcatacgtacacagtgattcagtgtaagtacagatttcatcacaaaaatataattacaattcacacacaaaaaaaaacatgggtattgaaattgtcaaggaatcaaatcggttacctgaagaagaggatgagagcgatgagaagggagacagtgaggacaaacactgagacaacagagtaagcaaaaaacgttcttttcacttttacggcgagtttcgtggattccacagcttgagaagaaagtctccgccattaaaccttcaagccatgcaggtttcgttgccatcatcatcatcatctcttcttcttcttcaccttctctaaccatttctgtggatttttatggtaattaaagagtcactcaatttattgaagaagaagaaccctaagagagattttgattgggagcttaaattttggagagtgtgtgtgtgtgtgtgaagaagaagagtgtgtaaatgtttatatataatatctaatgttatgtgtatgtgtatgtatgtatataaatgggtttttgtaatgtagaggaggttccagaattattgtcgctacgtatagagagagaaagtgttggttgggtgggtgggagaaagagagagagagaatgtcttttattgagaaaacgaaatgttcaaagaaagatcaaatctatttctccattggcgaaagatccaattttaagagagaaggtgtgtgacaaaatgtcatggagtattaaagatttagtcgtgatttttccattgggcaaaacaaacccaatttgaagtttttgattaccttttgcattgaacaaaaagattggactgagatatttcttgagggggttttatctgtttctttctgttaaggaaaaaagttaaaataaaattagagatgtgttgtgtagtgtatatctattgatcttttgtttgtggtgcatttaatttcattgaggacaagtgtccctgaagattagtttgtttggagggatctctaaggttaatttaccttttctggatatgatgactcatgtctcccttccttctacctaacataaaaaagaagatgtgatttttctatttaaaaagatttttaaaatttcatatttttgaaaagttttacgtagcttttatttataacatttactatcatttatagcataattacgtatattatcactcctatatttatatcttgcgaaggcataggtgtagttatggtgtgatatttatatcatatgacattgggaagatataatggattgataatgataagaaaagatatggagtgataattttatcataataatttttgtaatgatagtgattatgtttatactttattcacacggtatatttgcattttactaaataaaactcgtgaccaattcgaaatctatagaaatttgttaatgttaaaaacgtagttattagcataggaaaaataatatacttggtgtcattatgctatgcacagatttaaattttatattagaagaacaaacaaagtttaaaagtgtgtaatgttgcgttattagattatagattaaaaagtttatataagttcttaaaaattatatcaacattgccactctctatttctctctttcaaaaaagatattaaaaaaaatcgtatttttgcttttataatagtacttcaagtttgtagtttttaataataatctcccatgcaataaacttagttaagcccaaatcaaatacattatatgatgcaattatcctaaaatcaatcatattgctatccaactaaagaaaactaatttaatttgaaagaatatttatatttagactttgaaaaatcaatttgttcactataaagactcttttattgaataattaattttaatgtacataaaataccattttgaaatgataatacattgttattgtaaaatatttatctacattaatgtataataaaagtgcatggtataagaacatcctcaatcgatggctcttagatttttttcttatatataaaaatattattattttaatataatttagttatataattaaattttacttttaaaataaaattaaaccaatatatagaaaacatgtgtttcatataacttaagttaccgaatctcttgtataagagcattttttttactctctcttttttataacatgtttatttttaataaataatattcatttaataacgctctattgaaaatgctctaagatatgaaaaaatggtaaaaaaatagttttttttaaataaatataataacgaaaaaatacaagagagtatggatggcagagactttggccttggcaagagtgctgctccttttttttttaaagcttttaactcttctcttcacctcggtttcttaaagctttctcgcatttttgttctctttgcatctttaatatacttagctattttttgctatataatgtgttcatactagttttggttaattagaattatgtgcatgatttttaaaatttgcggataattttgattattgcatatatgtataagtttttagattattgagactaacggttgaagagttgatgaatatgcttacatgcatcacgagtgcaaagatcaaatttgtttgagatgttggtgtagagttattaatgatttccaaacactcaagtcaatacaaacttgcgaataaatgaaattatacatgcccatggaatgatgcgctaatgttcttcgatttataatttgaatatacttctataatagagtatttttgcgaaaatgctttagtttacttacataattcaatatacttatcatttttatgttaactaatgagatgtttaaatgtgattgatcgtttaaaatcttacgtgaatatcatcaaaaacttataatctcgacttttagatagtatagattcaacgaattgcaaatttcttataaacttcggttaatctttatatggttaagttgatgcttttttatatctttgagaattgcttggatctactctattgataaaacttaaatagtttatgagtttgtaaaattgttaagtaaagtgaagtatttcagattgaatagacagtttagacttgcaattcgtatataagttttcagtattttttcataaattgataggattacatatttttttcttgtgtcaaccaaatagaattagtttattggtcattttccaaaacatatatggtcagattttcggttttccggaaacattttttttgtttgtattgtgtagcattaagtctcatgttataaaataaaggcatcgttggcccaattatagaaaaacccaattcgtttatacgctctcggaagcccatttactatgctgtggcatctattatttggttaaatcgtttcaaaccgaatcaaaaccatctacaaaaatgatgcaaagagaacaatcaattttacttattctatacaaaaatgtaaaagaaaaaaaaaactccaaaatttgtgttgcttaagtttatttttaaaaaatcaatttaaagataagtttgttaacaaaatgaattctaaactgaaataaaaatcatagtaaaccatttgaatggctaacgcctagtcaaatggttgaaatcaacaaggaatatgccattaattaactactttttattacattgtagtatatctaattcaaactccaatattaatgtattattctatatatgaccataacacaatgttttaggttacgcaagaacaattgcaaatcaaagaagtgtgaccccaatgattaatatgcatatactttatgtacacatactcttctcccgttttactgcttgctccctataaaatgatcgatgtttggaatggtttaccactaccataatttaatcaaatctttctctctacacactttttgctatactagtcactaacgatacaaagaacctctatacgtgggattccagtagtcagttgcactgttatcgcggtatgcgattggggtatatgaaataggaaccaaacaaagccctctactccttagatcaagatgcttcggtccccttttgttgtgatcttctctgtcccatcccccccatggatcctaaaaccatacatatgacattatgattaattagctgaagagattccattatctaaaacgtcatgaagaaaatattttataaacgttaccttcattgatgaattcttcatataaggagtgcttagcagctgcatgttcgttaaaatcaccaacagtcaactaagatagtcatgcttgcatagacatgcaacaatttaccttcattttcgtaaattttaccgtgtatgtatataatttaccttaacttgctcttgataaaaatttatgtaagtgatggcctcttgaagcacagaagcagtatcagtctgaaatgttttcaaacgaaatgtttcattttcttcgttgtattttttgaaaagaaacgttgaaagagagaagaactatatatgatttataaaattaaaaaaaaaaactaaaagctgttacaaaaataaaatatttttaaaataatatgacaacaaataaagaaaaggagtacggtctttttttgtagtacctttccaaagggagacacaatttgctgtagagtcgtgatcttgtctcgaagtttggctttgggtagttcctgccatttatttttcgaaaataatgttagaattttgattttatttatccggtatgattcaaacaattaatatcataacatgaacaaatcatatgaaaataatagtgacaaattatttacatatgtttaccatacaaaatcagggcaattgttatctatatgtcccattacgaatcatacattttttttaaagattattttcacattcagtgtttgtcgacgtatagttttttttttttttttaaagtagattcatcacttgttttttaagttatcctaagaaacacattatattttttgcatgaatttagacttacttaggtacacacaaaacataatgagattatgtagattatattaccttctctggcgaaagtgtagagccctcactgcacttggccttctttgaaacctcatcggaaatttcttcacatctcttcttttttccagcgtttgttgttcccagtctcactgctgcctgcaaaaatagcttccaaattcgggtttatacgtcggtacatagactttcatttgtaatattacattgttttgtggatttgaattgtatatgcaggatgacaattctaaaggcgaactagaaacctcttacgctaagaaacaatccatgcaaatagtagcaaaaggaaaaataaaaacactttactaagaaaaaaaaaggaaatttcaactaccacaaactttacatttagaaataattcctaaaagcttaagtggtggtacttttgagaattttctcaaacttatggcatcttcgaaactgaaaattatttgtggttattttagtatatttttcaaaatagaatatatatttgccacaaaatgctgggaagaaattttaatgcatggtagcatccttaagcaaagttaaagattgcaacagaaatatcaacgttaaatccattctaaagtacaacgtattatcaaataataagcaaattgaaacgacgtcgttagcaagctatgataatgatatcacatatttgatagcgtatacgtaccagagatgccgtttgatgttctttcttgttaaactcggatacgtttaaggccttaaagcatggcttaaatgacggattaatatccgttaatggcctacttaaccttatatcaaggaaacttctagaactttctataggatcatggaacaaggaaccaccaccacttgagccattattgtaacaaagatcttcctcatttttcacctccaaggcttgtctgtacatagaaatgtcgtcgttttgagaatgatcatgatcgaagtgatgatgaaggttatggttcatgtcgggattattcggtggtgcaattgaccagtgcttgcctacaagatccgtcaactttgacagccgttggtcactactttgatcgtacctaacttgatttgggtcatagatccaaccgttaccattaccgttatggcacgctggctcgaatgatggtaattctgatgttgttgatgaatttcttgatgctatgtgatgatgatgatccatcatttgatctcctaagcttctaccaggcctgtccattttttaaaaattaatgtcaatgtgtgtgtaagaatatggtatttagtattacaaaacttaagttaaatatgggctcgattttttttttggttttaatgaatttagtgttatgctagattattaattttacttaggaaactctacaaattaaaacttccactaaaataattttgggaaattgtaaaaagttacaacgtggtactttaatttggtttgcatttgacctttcgtttatatatttttttggtatgataacgttttcgtatattgttcaagtaattacgttgtcgtttatactttgtttttaaaattgtaagacatgatattggaaccagtagacgcaaaaacaaaaacaaatagtattttataaactattaaaacttcttttaattataaaataagaataaaaatacatcttcgagtggccaataataaagatgaataatcataagtgcaaaattataggcataccctaaccaatcaaacgttaaatcatttactggggaacaataattcaaaagagctactaatatactttttgtaaaccaacttttagacctctcttttgtttctaatgtttttatttgttttatttttaggcctggagcattcattctttttaaacaaacgaaagtattaatagtgagaactagatgatttctttatggagtggagcgtagaacctaaaaccttaaactaaactttgaatccacaataaccgttatgtgaattgtaagtaagaacacgatactaaagaagatttgttaatggttcgaaaagataaataaaatttaagtgttttgatagatgcttacaagaaggcaagactccatagatgattatgagaagatactacatggtcgcgaagcaactcatcggaggaggaggcaggctgattcgaagccgagagagagtgatgattggaggattcagcggttaggtccaaacgattcgaagcgcgtacggtagagacggagagattgtcttcttcacagctagcgttggcgtgtgagttattattactactcttatggtagaaagacgtcgaactaatcgagtttgcatgatcattatgatgatgttgaacatcttcccaccatgatgaacttggagtacattcttcccttaacattttcctatcttcgagctttttctttttgcttctttcttttattttgttggttaagagtctaggatatgtgcattagagaatataaagtgtatatatgatacgatcggtggtggtgacaatattatatgctagtggggtacgtccactacgttacatttaaattacatatagttatatataagccaccgaaggatgtgttatatgcggtctgcgtaagatcgtacgtcaattgaagatgtgtttgacctctacatgaacttgtcacatttttcggcaactagatggatcttggaatattttacaatcagttaaaattctatagaagctagcatattaatctttggacaggacaacatgcagagtcacacaactaactcaaaacttgagtttccctaaacagcatatatatcatatactaactaattgatcgacaataataaaaatggttaatctttttattagtaataattatttccttttcaaccatgatattctagataacattatagattttggagattaatctaagtttcaaagattttaaatatcacttttatttccagaaagttactggaataatttatgcctccgccacaaggagacatatctctggcataatgtacattgtcatcagacttggtatttaccatttggccaacctgtgttaccaagatatgcctccgccacacgtgtatgcggccgggtgccacaagtccgtgaatgaggcctaaaaattgttgtttcattctcttgtacaagcattggtgggagaaggcatgacgatactagaagctccacgcttcatcaatcataagtgcataaggagtagaatcggactcggagtcaatagtcactagctaatcttttatgatgattcgttctagatccaatataacaaaatttacgtcgtcttctcttctcttcatagtataatttatttttggtttatcgagagaagccaattatttggctgattcccttgctacattaggtttgaccaacttcttttctttgctccccagctttaataaagattttggtttgccgaccaaaaggttagatttttgtttttgaccgataacaaaacttctgatattgaaactaaaagtacatactaatagtcattgcgaaattgaaggagtttagatgaaaaaagactaaactaaaaactgattattcacatatagttgattgctttctacttgcatgttgtatcaataccattatagagcttctcgtatctaccaaaaaaaaacttagggcgaaagaggaaggtgtagaaaggggcagtagggtttatttcttttaattaattttctgcgtccaattattataaaaagttggcacacgatgccaaacaacttaaattaaattaacttggatatgttaatttaatatgcaagcgtgattattgatacacgttattatctttttaatttatgtaaccaaaagtaagggggcaatatggaatattaaaatatttattttgtaaggtttcaaattaccgaacacagaagcactcattgttccaatctacatattttcatataatactccatagcaaatctcagtgtgggtaatccagttttcagtaattttgaattatgatagagtgaaaaaatatatgaaccaaatagtaattatatccgttgtaacttgtaagcatattgattggtgtaacatataaactatataataagaagcttttaacttttaaggtcatgaattcacaatttcgaatattaataacagaagaaaacactatttaattagttgtgatttatcatttgtcataaaacatctaaaacacaaatcttttctgttgcaggatcctattgataacacaaaaagataagtaaccaatactaatagaaattggagattaatttttacaacaaccgatagtcgattttagtttcttgtttccccttacgatctagtacgtaatattgacttatatcgtaagcttaaatttgatgcttacttgtttggtgacacgaaacctagcaataaagggttacgattccatactggccctaacttttaatttcaaaaagataatttaaagtattaatcaataatcacgcctgtttaattaatttattatcgtttcttggtgcgctatttattttctcaggcattcataccttttaatccgagtccaattccactccaaaagtttcttgtcttttgcgacatctttttgttcttctttcacatattttaataaataacaatttaaaaggaaattgagtggccaaattttctgaggttgacttttgtttatttcattatcatttctatttgactctgtatataatagtcaataaccaatcgatagcaacataacccaagatgtttttctaatggccgaaagtttaattgaaaatattcaattagtgattatagtttagttaaattacatgaatgaaagtatgaaaccatgtaaacttttagtggaagagaacgattaggcaagtaatggaagtattctaggcccatttatttattggtgtttggattttctgcataagcccattcatgattcatgcatgaaacaatatttttctaagttctttttctttccctttttgtaacgcatgaaaccatcaagttcaggttcgttgtgcgaggaagtttaaaatttgcacatcacatattttgttaaacggtaaggactaaggaataaccaaagccaaggaaaaatagttacaattcatgtagagtaccaatatcatatattcgtttataatttgtttaccaaagtaaggatttttattttggccaaccgccaaccaaacgatctattagaacaacacaatttagcaacggttcaaaacagccgaacttggttatatagttataagctaagaaagttttgtcgtcttagccctaagggttaccttgatgaaaacagtaagggtggggtgaataacttggtccagctattatttaggaaccggacacctaaataggatgaattatgatgtgttttagtctcttttccagttatccacattacgtatagcgccacattacgtattgttatggtcccaagtaaaatgtagcctttgtaaaatttgtcatggctttgtaagtgctacatgctatcagagccgaggaaaaacaaatactaaaagttaagctaatatataacatgctacgtgattcactaaaaataagtacaactttacgctaacaattctcataaacaaaattacatatgatgttaagtgattcgtccaagtgttagtgagaacttttaaccctaaatatatggattattcctgtcaacattaaattttgtgtcaacaaattgcccagatgataaatgatgtgatacgctctaattgtgttatagtataatatttatcaaaattgtaaatcatatacaattaataactattttatatatttagctagttaaagtattaggtatataccactaaaggtggctggattgatgaggccaaactaaattgtgaccgtccggctaactaagtttgatgtaacaattgaataatcatctcaccaaatccctaaactcttgtcaccagctctagtattttgcttacatttctatgcgatattttctaataattagattaagaacagaacaatgattagttgattataagtctatgaccaaataaaatgatgggcaaatgttcgtttttttttctttgtttctagccaacaatgatggcccaatgttcagaaaacttaacttcaaaatagtatttattatttaaatatgtaatcattatttttctaataattatcttacttttgtttagctgtctttgttaattaaagtaatgttgggtgcactagagactagaggccccaattcaactcatactcgatttatacctttctccaatttctccaccttgaactaagtaactaacgcctaacggtagattagtgaaatatatcaatagaagttttaaatagaagaatagaatacccaatggtctctgtttcaatcttgtccttattttctgagtccatatgtaaacaacgattacttttaagttctaaataaagttataagttgaaaaaaaaaaaagaatagaatccatacagtttcatgaatattacaacaccatccttttttttgtcaagcacaacaccatccttttaacatctatttttttatttgtatttgtatatccacatgtttaaatagatatatcgattatcatacaaaaatataacaaaagtgattttgaaatatagaaccgttcaatttatttgaaactagcagttgaacacgtacgaagttatacgttttgggggaagtcgggcaagatcttaagttggagcaccaattgcatggttaaataacagttttcttataatataagcacagtcccaatgtacgataaacacataacgatacttaaaacattggttccgtccaaaattcttgtattattatttttcaaattgttgatatgtatccatgtttccttgtgatgttttcgattatatattcactgctttatgttaataacaaaacagtagtatgtacatataaatacattttgcgggtttactgatttttatacaaaattttgtaaagtcatgaaacctgttatagtccatgacttaggcatgaatccaaagttcaaccattatcaaatagtattcattttattattacgctacacagtatcaataaaatagcaactcgaatacatatatatgcgtaaagatgctatatataaactccaacaacccatgcataacattgcaccttagtttcataaatacgtacgcaattccccatacaatcaaacatattttttccatcacgcaattaacagttcccattatatactatgtcggtcattcatattttaaggaaaaatgggaatataaaccaaatgatataagtcatatattgtccactataaatcgaaagatccgtctattgtggataaactttaatatagctcgtatgatatatattaaaataatatcagaaaatgagatctaaaaccagaaagagtgtgtgattgatccaataatttgttctaaaggattacaaactcatcatatggatcaaaacgaggaatcaaattccattatctaccaaaatcgttgtagttttttttttttgattactataaacattttatatagaaaaattattcgatttttcaccggtttcggcttagtatatgagattaggactaagatctagtttggttatgttaaaaagtcttgttaatagaaatatgtattatcacatatctttttcaaaatgagcatttataatttctataaaaacatatacattttctaaaatataccaatacacaatggcatttgtatacaaatacaccaaatttggtataaagtgtcgtatttcaagacactcaaaatatgccttttttgtaaatatttctcagaattgtgtatattttctatcacataaaagtagatataagatgaatagttttggtatttaatacaattagaaaaggaaactcgaaacccgcttaacaagccagaagggctaggcaacaaactgtcggaaagctctgacagaatgcatgagactaacaaaaggggtgaaacagtcatttcataactccagttgttacacgttggttgattgattatttgttgattcttgtcttcttcgccactgtttgctccgctcgtgttaaaaccttatattataaaatcccttccaaaaaacagaaccaacttagccaaacgtcacaaatccaaaactcaaaaccgaatcgtttttagcctccaagagagagagagagagagagatctgcatatagagaatgatagaaccgtcgatggagagagagaatggtgctttaacggcggcgacaacaacgacgacggcggtgacttctcctcctccgatggcttcttcaccgcgtcaagctttagttgagagattgaaagattatggacaagaagatattttctctctttgggatgaactttcaccagacgagaaagattttctcgttagagatattgaggttcgtgatttcgattttttttttccagattcttcgttaagatttggatctcagattcagtttaagcgtaattaactgataacactgttattttattttctgcttacagaatttggatcttccaagaatagatcggatcattagatgttcacttcactctcaaggttttttaattcgttacgctaatcaaattagttaacatgcattgtactataatctcggtttttctcggttaattaggtttaccggttgcggcgattgaaccggtaccggagaattgggtttcgacagtagatggtagaacaatggaagatagagagaaatggtggaaaatgggattaaaaactatctatgaaggcaaattaggtgttgtgcttttatctggtggacaggtaaaattaattaataatgcaatttttcttaagctatataattaagttgctacttagagtgctaaatgattctcttgttgatggttgagattgggagttttggaataatgctgctactacctaacttaaaaagttgaattaattagattataagactttagtgtagtgttgtgtactttatataattgctatatagtagtttgaaatggaaataaaagtgttgtttagataagtagggttattaaaagagacaataatgggttctattatattggcaaacaataattcatgattagttttcagacaaatcactgtcggtggtgtttttgagtaattgcgttttctaggaggaaccttctgattaactataacggtgctgatgttgatcacgtgatctgaaagatgctttataggattccgtaactttttattattatattaggaggatgctctgtttcgtgtgttgtaaggaagcttgaaaaaaaatctggttttaaagatacgtgttgcttgatgtattacttagtttcggagattcataacttgagaagatcttttatacatcccagttaacttttttgcaacaatcctcaagtgatttgataatgaacatggtttggtttgattacttagtttcggagatttgagaagatcttttatatatcccagttaactgttttgcaactatccttgagtgatttgataatgaacatggtttggtaatgaaactaatgtagggaacaaggcttggaagctcagatccaaaaggatgtttcagtgagtaattctcatttttgttatgctctgaataagcttaggttgttgcattgcttgaaggcatgatggttacttaacaaagtagttattgacttatttccatcttagatatcggattaccatcagggaaatcgctctttcagattcaggcagagagaatcttgtgtgttcaaagacttgctgctcaagtagtgagtgaaggtgagtgagactactcatggcttcttctatattccaacagatatttgtaccgttatgccatatttgacactcttttccgcataatatcttacgttcaggtccaattcgtccagttacaatacattggtatattatgactagtccatttactgatgaagcgacacgaaaatatttctcgagtcacaagtactttggtcttgaaccagatcaagtaagatgctgcttatttgtataaacattccttattgttgtttccttcgtctcttagaccaatcttgatcacttcttactacagatcagttttttccaacaaggtactttgccctgcgttacaaaggatggaaagtttattatggagacacctttcagtgtatgtacaattaaaaaatgacaagcactcacttttgttttcagtactcacttaatgagtttaattacatatcattaacagctagctaaagctccagatggtaacggcggagtctatgcaggtacgtttactaaattttgattctgttttttactatcatacatatgttctattcaaaccgttgctgatgctgatccgagatttttacagcgctaaagtgttcaaggctattagaggatatggcttctagggggattaaatacgtcgattgctatggcgttgacaatgtcctggttagctctctagtgtaatcttgagtcttgacatgtgtttgtttcctcaacgttgttataatatggaatcttgaaaatgcaggttcgagtagctgatcctacttttcttggatacttcatcgataaaggggctgcttcggctgcaaaagttgtgcggaaggtatataagatcatacaatgtaactggtctagaaagattttaagattaagacttcatcttctttatatttctgtatggaaaaaaaacaggcatatcctcaagaacaggtaggagtgtttgttagaagaggtaaaggaggaccgttgacagtagttgagtatagtgagcttgatcagtctatggcttctgctattaatcaacgaacaggacgtcttcaatattgctggagtaacgtaaattccttttttcttcttcttcttcttcttattcttatgaatttcactactaatccaaagttgtgttttacatatttcttaggtgtgcttacacatgtttactttagatttccttaatcaagtagcgaccggcctagaaaaagatagcgtgtaagtttctcttcaaatacaaacgaatctggcagtcaaaatgttattgaattgtggtttgtggcaggtaccatttggcggagaagaagataccatctatgaatggatacacaatgggactaaaactagaacaattcatttttgattcgtttccttatgctccttcaaccgcactttttgaggtatagtatcaattcatttttacacaatatactaactaaagaaaccaaatattaaaaactgagaaattgggttgtgctatgtgtaggttttaagggaagaggagtttgcaccagtgaagaatgttaacgggtctaattttgatacaccggagagtgcgaggcttttggttctaaggttacacacacgttgggttatagcagctggtggatttctaacacattctgtgcctttatatgctactggtaactctcaaaacaaatcttctcattactgtgtttttatttattttacttttctgtccaacgaatttatttttcttatatgcaaaatcgaataaattttaggtgtagaggtttcacctttgtgctcatacgccggagaaaatcttgaagctatttgtcgaggaagaacgtttcatgcaccttgtgaaatttccctctaatggtttttgtgtttttgttttggggtattaaaatcttttcatcatttttatgtgctttgttttctttgtttccggttgtggtttatatataaactgattatcttcccatgagagagagaaagagagagtcaaagaggtcttggcgttttatatccattaatgtaacatatctaataaaaattttatgttggtttttgaatcttttaggtatagttttggagatgaggagcaaagctgattattagatgattaataattaacaacaaagaaaatgaaaaaaactacaagcgaactctttatatgctcgaaagcaagtctcaaacataacatattaatgaggaaagtctatcacattagtgaagagcgaagtgactagatacagatcggttttagttgatcttataaaccgaaatcaaacaaaaccaaaccaattaatgccctaggttccgatctctatatattggctctcttcgtgtgtgattggttcgtctgtaactgtagatttttttgctgtaaaatttttgttttatttgtgatgactatagctatagattttattgccgtaaaaatcagtagattttattaattttatatttttatttaagaaattggttgtaaaaataagattatggttgtatgtatttttatacaaaataaatattattggtaaattgtacttatgtgttatataattgaattc

SEQ ID NO: 68 - DNA, 76458 bp, Arabidopsis thaliana
gatttttttgctgtaaaatttttgttttatttgtgatgactatagctatagattttattgccgtaaaaatcagtagattttattaattttatatttttatttaagaaattggttgtaaaaataagattatggttgtatgtatttttatacaaaataaatattattggtaaattgtacttatgtgttatataattgaattcacaaatatcaatttaatatatatatatatattaaaaacaatgtaagttatatatatgtcataaagtagatatttacctattatttatatccataaaactaaatttaatatatatatatatatatatatatatatatgtatatatatatatatatgaaaactatagtaatatttttaaagaaaatgagaaaataaagttaaaaaagaaagagaaaaaaatgtacagactttctaaagattattaaattgtgctttagaaaaacatgaatttacagacaaaataaaaaaataaaattatttgggctgtgagaaaaaaaagaaaagctaaagcaagattgtttcaattttgaggctgtaacttttttagtgtctttaaaaatttcttacagcccaaccaatcatagacttcgtccgatcacaatataagaagatgaatagagaaaaaaccttagattccattccaattgatgtctttctcgatatcttctcgagattacctgcaaagtcagtcgggaggagttgttgcgtgtcgaaccgatgggcctccatacttggcagtcaagatttcaaggagttgttcctgaccatgtcttcgactcgtccacgtctcttattcgccctaaaaccatacaacggtgatgagtgtctcttctactcgtcacctcaccctcataatcactatgagaagtctactgtagtagtaacggccgattttcacaccaagttccctaaaagccaaagtgattgtatctacgcctctggtttgttctattttcctgatgtgcggatctcaaaagataaggacgaggattccgtgcatgtgataaccctatcacgggaaactatgcgatcttacctaaactgaggacaaggagagataccaaaagatttttagggtttgatccaattgacaagcaattcaatgtattactcatcaataattcagttaattatgaaacggttcatcatattctgacattaggagctggaggaatatccaatgtcccttaacccattatcctcagggtaaagggatatgcatcaatggggttttgtattacttagcgagtcatgatgaaaagccatatatgatagttagctttgatgttaggtatgagaaatttaggtttattaacaaaaaatgccattcttatgaattgattaactataagggtaatcccatatggccttgtttatacattattggctcattttcacattttgcgtaaccaaattaaatattgagctttattactctgtttgcttatcatattgtttattttctggttatgatcgtgtttacatgttactttgaatttacttttaccaaattactatatgatcttgtatataactgccgttttaatccctatcttaaataaatatcgtaagaaaaggtggatataatataagctagcaaaaatgtttcaattgatatttttgtagatatcattgctgagaagctaagagattttgatttctcaaatctcagtttcttctcaaatttaatgtcgtacttgttgtaaaaacgatatttttctttgaatataatttaacattagattttaaagaaaaaaacagaggccttggatgaaggaccaaattaaatgtcaacatctctcgtcaagccaatttgtggatattatggagcttaaggtactagatcatatatagagttctttctaagaggaggcaacaatgtgatggatagaattgcgagggaagcttttacaattacatatgtaaattttgttcccaaactttattcaactgtgaccaattgactaagcctttagttgagacccattagataatgtggggacataatgcttagccaattggtccaatggaggcaacaaagtctatttttcttaatgctatgtaattttaagaagatgctctgtgtcttttagaagatgattaatgctatgtaatttttcatatcaacttgaaacaatatttttaaatctttccgtttagaaaatatagatcgactgtgttttctatattaacagcttttcctatgtatcagaccaacacaggaaaaatgaaagtctctagtttatcaacgtgattattatattggcagctaagatttatattcagtaaaaattgattagtctttacaaaatattgaaaactaattgaacatattgatattgcttttttgttaaaaattgaaacatcaaacacggaccacggtagcagtaggtcacttaacgaacttgggagctgcaacgatttcatagaacatttttgtttctccatgtaactgttggactttcgtatctccctagctagctatttgctaaaacctatgaaacattttttgtcacaccgtacattgaagggtacaataccaccaaaagcacaaactgcatctgctttacagcaagatggtatgcaatataaccaatttctcggtttagcattagtactgcttaaccagtaacctgaagtcatataaaacaagaataaagcatctagatacttccccatatatacattctaccaaaaaatggattctgaatgaatgaagttatccaaaaaaaaacttaggaatggtcatgtcagatgcaagagcaatcaattagcgaaagtgtacaagaactcagattaaaaattcatatatctttagatggttaaagcccatgtttcttgggctttaagttagcaccaaaccttgaacttgacgaagatttttccgcgtataaattcaagagtctctgccattgtgatttatctccgtccgataaatatatacaagaacaatgaacagaggagcaaactctgcttccatccctaatgatctcattcttgaaatactctcgagattgcctgcaaagtcaaccgggaggtttcgctgcgtgtcgaagctgtggggatccatgctttgccattcatatttcacggagttgttcttaacgaggtcctcggctcgtccacgtctcttaattgggatccaccaagacggtgaccggtttttcttctcgtgtcctcagcctcaaagcccatatgataactcttctattgttttagcagcagattttcatatgaagttcggtagagttgaggatgaatgggtttatcatattctgacattaggaactgaaaatgtgaggtggagggagattatatgtcccttttcatatgatcctcctcgggaaaagccgatatgcatcaatggggttttgtattacataagtgtcggtagttattattcacttataggttgctttgatgttaggtctgagaaattcaagtttttatatctaagcccagattgctttccaaactggtctagaaaattgataaactataagggtaaattaggtgtgactataatggaagattatcatggtggatttccccttaagttgcgtatgtgggttctagaggatgtcgagaaagaggaatggacgagatatgcctacactttgaggcctgagaataaagtcgaggacaatgactatgtatatgttgttggggcaactgcttcaggtgaaattgttttgacgaaacagaatgcatataaaccgttttatgttttctactttagtcctgaaaggaacactctcctaagcgttgaaatccaaggtgttggagaagaatggttttatcataatgtttactactttgtagaccatgtcgaggatcttaggtttgatgttatgaagacaacatatgctggaacatctagaagcccaccaaaacagagcacatcaacatcatctagagaagatcatgaagtgaggacccttgctcaccagaaagaagatcgtcttacgtttgagagtgttaaccaatttgatgctctgcgtcttttagaagatgattaaaatttacaggtgtcaaaacctgattgcttaccttactcctcaagtcagctgaaaaagctctgtatttgatgcaagttgtattctctctttgtaaccattaataaatcaaagaagttcttaaaaaaattgtgtttctattacgattctgtcaaatttatataaagtcggtaacattaacactaaagatttaaaggaagtaacggcctttggaactgtctatcacacgagtgctagatatgttgcaatcaagtgaatataaaggagctcgaagttcttaacacaagagatctgtgagcttgtttggtcggtgacacatcaagattcatacttctaataatgaatattaatactgttaagtccaaaagatatttcatgttctaacatcaatcataatcaaataaataaaaaacattagtggaaaaacattgtcatttctacaattgcaacagctacagttacagtcacgatttctgctgtaagaagcagagtgtttccttttgatacgctcttgaaccaaaaacgttacctacccaaaatatttagccacctttgactttttgttcttaagatctatctcggcaactcaattttcctcctaatcttcggatttttcgcctgcgcttgataagaatctcactgaaaacaccttctactttataaatatagtgttccacctctagttcaaagattacattcaaagaggttagagtttcatattaaaagggatacacaaattgtttagcttttataaatcagaaatgtatcagatgaacaaaaaatgaatacatctaaggaagtaaagaagggacactagttaatctcattcctttctcaaaggatccaaaacaagattgagtttacaatactatattctttcggaatagatgggatgtcaaaagcctactcgactatccgggtgaaatgaagcatgctcagaaattcagagttgaaaaaaaattgtgaattttgtctctatgtttgtgaagaagttaataaccataaatcttatttatttatcgattttggttaatgtttacatttttacgaattgaaatcgacaaagtttattagtttatcgtgtttattaatttatagagttttttatgtagcaatatgtcattgaattatttagtaaaatatcttcgaaatctctccttataaaaaaagaaatatctacggaaaaaaacaatttctcacgtttacatactttaaagttgaaatctataatatttcgatattttcatttcaagaaaaacagattcattgccttataaagaaaaagttggagaaaaatcaatgacaatccataaaaatatttgaatagtaattattgacaatgtggtaaaaatctataaaacactttaagatctctccacttttaaaatcaataactcttcacaaattcatttcctaataaccctcaagatattttccatttctatatatatatttcagagagtcttcgatgaatcgacattcatatctctctcccatgaataagacgatcatgaatagaggagcaaactcagattccatccctactgatctcatttacgagatactctcgagattgtctgtaaagccaatcactaggtttcgatgcgtgtcgaagctatgggagtccattatttgccgtcaagatttcaccgagttattccacaacaggtcctcgtctaatccacgtctcttaattggggttatacaaggtggtgagtggaacttcttctcgtcgcctcagcctcagaatcattatgggaagtcgtctcttgtagtagccgccgattctcatatgaagttttctgaagacaaacgcccacgttattatagctatgcttctggtttgctatatttccctaatatacgtatctcaaaccataatgacgatgtagtgcgtgtgatatgtaaccctagcacaagacagtatgcgatcttaccacctgacctgagaacaaggtaccgagactcagggcggctttttagggtttgatccgattggcaagcaattcaaggttttggtctttaaccgtagagtcgatgatgaattggtttatcatattttgacattaggaactgaaaatgtgaggtggagggagatcatatgtccctttacctatggacactatggttttagttgggaacatatatgtatcaatggggttttatattacatagctaaagaccctaatgatatgatagtttgctttgatgttaggtctgagaaattcaaattattacatctagccccatccttcgttcgtttttggtctactatattgataaactataagaataaactaggtgtgattaatttggaggatgattatgatggtggatatctccttaagttacgtatgtttgttctagaggatttcgagaaacagaaatggactacatatgtccacactttgagggatgagaataaaatcaaggacaatgacaatgtttatgttgttggggcaactgcttcaggtcaaattgttttggcgaggaataaggcatataaaccgttttatgtgttttactttaatcccgaaaagagcactctacaaagtgttgaaatccaaggtgttagagaagaagaagattggtttcatagagtttactactttgtagaccatgtcgaggatcttaggtttgatgttatgaagacaacatatgctgcaacatcgataagaccagcagaacagaacacatcaacatcatctagagaagatcatctagtgaggaccgttaaacgtaagagagcgtaaacaaatttgatgcattgtgtccttaacaagatgattgaaattttacaggtgttaaaacctgattgcttactttactcttcaagttagctgaaaaagctccctatttaatacaagttgtatttgtattttctctcaatgtaaacattaagttatagtaaaaaaaaatctgaagaaattatgtttttattaagattctgtcaattttgattttgatttattagtcactaagcctgagtagagaaatttagaaattagaaccctatacgagtgaaaaacataagataaaaggcaaaaggtaagtgtggcgccacataatttgagataagatacttaatgtggactttatttcagagaaaatacacattacacaaacgcaaacacaaggaaaccacgacaatgggacaagttcaatcaccaacatatatacaacaaaatcaaccaatccttttgtgatttttgtggaacatttgtctaaaacttctcgggcaattcatctgctgacgaaaccctcctttccggtttccattggacacaaaactcgtccagtcttccatcatttgtcttaaatccttgagcttactttcttgtccaaagcaacaattcccatgcattatgcaaattttggtaatatcccagtgtctttggcagaaatttccaaagtgtgtcatgtcgagaaatcttattttgagcccgattttcttgacatattgatcagctttgatcctgttaagcaccttttgctcgtttttgccagggaatcttagtctggactcataccaatagttgtagaacttgattgttttacggttagaaatgacgaatttaaatccgccattggctgtattgtgggtgtcactaagatttccgttgaagaataaatcgcaagcgatctgaaaatccgcatccggatcaaattgaggaaatggatctcgaagccaaagtatatccatgtcctttttcacaaacatttggcggaaaaacaatatttgaatatatctatacaaattctcaagctaaatcagtaacatagataaagtaaacaacctaaattctcaaaccaataccaaaccaaatttcacagctagatcagtttaaaattttaaaaaaaaactaaattacttaaccaaataaaaataaaaataaccaaactaacatagttttaataaccaaatgtccatcataaattaaacatgcaaaacttagagagctaccgtgaagaggaagttatatccaagcatttttttttttttttttttgctaaaatgttaatattcatataaatgaaagttcggacttacatattgcagtacctaaaacaaatgcaattttggcaaaaaaaggtaaaaacaagattacaataattttggaaaagatttgggtaaatctatcggatccatcgaatcattaaatttcgccaacgttttcttttttttcgagcagtgataatattacgaacctctcggtcgatgaagtgaaaaacagtagcaggagagataaagatcgagttgtgaagcacattgtttctttgtttccagaggtggaagacagaagcttgagctgcaattttgcgaaggagagaaggagccttagacgaattaatacgagtccaggacagtagctcagcccaagagttgaaaatggcttgcgaaggggtcaatctgaagaaaacaagtttccagattacagccgagaagacacaatacagcagtagatggtctctagattcaggccgagaagaacatagacaacagtctgttgtagttgtgacaccccaggctgcaagcctttgtcttgttggcaatctgtttaggtgagagacccacatgttgaaggcatgtttggggactgaacccttaaaccatacagacttggtccaatccttaacaggtttctttggtctcatagcttcccaagttctagcagcagagaaaccgtgacaagtgaaatcatcaacaatccagacaaaggtgtccggtgaagagtcaaaacaaggcaacgcaatggttgttaggtgaataagcaaggcaagtgcctggtccgttctaggcggagagatgagccaaccaacatcagagcaagcgtcagcaaccttagcctggatagggatacacaatgctctagggcccgacgacccaaacaacttaaacagagggccaaggggactccagttatcgaaccaaaaggatatttttttcccatcccctaatacactaaacaagaatctgccagcaacagttcttaatctcaacagagatctccaagtccaggagtctgttgcagattcgtcgatttcccaaaaagacttgtttctaaagttgtgaaatttgtgccacgcagcccacagagactctttttcagaaaaataataaccagactaatcttaaacagagagttgtattcaagaccgtgaatctcctaaggcctactcccccttcctctttaggcaaacaaacttcggaccatgcaacctttgcccctttcttcacgtcaatattgccagaccaaaggaaccgagcacataaagcctcgattcttttcacgcagccctttggcaaaataaacgtagagatccagaaattaataatcccagagatgactgaagcgatcagttgaacacgtcccgcaaaagaaaggcatttcacagaccatgatctaaatctcttagccagcttctccaaaagagggccatactcagctatcctcaatttcctacacatcaagggcagtcccaagtatctcataggtagggttcaaatagggaaatcataccttgcaatggtggaagcctcaatacgatccaatccagccaggtataaatgggtcttctctctgttcaatactaaacccgaccaaaaagcaaagtcctccaacgcctcactaataccatgaagtgaggagctgccaccatcaaagaaaaccataatatcatctgcaaacattaggtgagagattgatagtggagaagtttttgggtggtaatgaatataaccagcctggaaccttgaattcaaaagactagagaacacctccatagctaaaacaaagagaaaaggggaaagtggattcccttgcctcagccctctggtactcttgaagaaaccacctgtgttcccattaacacaaacagagaaggtgggagtagaaatgcattgcgtgatccagtaaacaaatctgtccggaataccaatagcctttaaagcagagatgataaaatcccatctgatggagtcaaaagcctttctcagatccacttttaacattcctctaggatcaatattctgcctattatatccctgcactaactcagtagccaacaagacattttctgctagaaacctccctggcaggaaagcagattgaaagggggatataacctgcgaaagaagacactgaagtctgttcgtaagcagcctagcaatgaccttatacagagtgataggaccaaagtcgttgcaagaaataggcctaaaatcattcatttttgaggcattcgtgattttagggatgaggaccaaagtcgttgcattccactgcttcaacaaaacactagacgtgaagaactcactcaccgcatccgtcacctcagtgcctataacactccaagtctctttaaaaaattcaacaggaaacccatccggccctgaggtcttgttgctgggaaaagagaaaaaagctgacttaatatcctgacgagagaaagacatggccaactctttcttctgatcatgagagcatctgaaaggcaggagcaaatcgaaatcctcttgaataagcataggtggacccacttctccaccaagaagattagaaaaatattcaatgcaatgctctttaattcccaactgagtatcaatcttaacaccgttgtcatctatgatgatgtgaattgtattaacagcttttcttgagtctgccatcctgtggaaataagacgtgttactatctccctcacccatccaagtaacccttgaccgctgacaaaagaaactttcttcagctttaactaggatgagccatttcctctgggcttccatctctagagcagcattcggaattgtcggatcagacaaagtcttgttttggcgatataagaccagattgtgagcttctttaactcttttctccaagtttgaaaaattctccatgctgaaggttctaataggattcttaagcgcctttagcttcttagacattttgaacatggaagagcccaccacattgatcgaataccagagctcaccaaccagagaaataaagtcagggttttgaagcaagaagttataaaacctgaaaggtcttttttctctatgcataagagggttgataataactccacaagaggcatgatccgagaagtctggttccccaaaaacagcataggcagacgggaagcgggagcaccaactctcattaacaaggattctatctagctttttagcaaccggccttgtagcagacttgttccaccaagtgaaggtattacccttaaaaacaaggtcacataactccgcttcgaaaagacaatctctgaataccttcattcttctattcacattgagcgaagtagcctgagaatgttcagcagggcataaaacctgattaaaatcacccaacataatccaaggcttgccatttcctgataaagacactgacaaaagcaacaactcctcccacaactcttttctggtgattgcctcattagcagcatagacaatagacacaacaaccgagtcatctgaatccggaaacatcacctcacaagtaaccatttgcaaagattttgcaatgattatcactctcacagtcggatgccaaactacccaaaatttggttatatccaagcttaagcagagaacctaagaactcggttcggcgccacatcatcttgaggtaatccgccgccatgaactgcgtctcgctggagaaatcaactccggtagtcctcagaaagaagcaacggcgggggaaaacttccaagcaccttgagtaggctttatcgtccatacacaccaccacaacgtggcggagtagccgctaggtcccttcgccgattcgaaagccttcaagaaacacatcaaacgtggaatttggttccgcccaagcctgattcattatcgtcactatcaccgtcttctccttggtcgatgcttcttttaggattcttgccaaatttctcctatcttctgcctcaatctatccacaaaacaaaactaaagtactttaatgaacatgctctagtaagaatcctccatttatatattttaagactacttctctaggactatacttgccttaataatataaaattggatacatcactagttttttttcaggcaaacacatatataatatacttcaacttgattgatatacaacatgcttccaataatatgataaatgtgtagatcataaagttaggttacaaacggtatcagtattgttagagctttgtttgactccaatcagcggcggtacaaacgctgaaaagcttgaaatttgctgcagcggtagaggcagtggctgaacaagtgacgccaaatagtaaataactagagccagcaaaactgtcgaaacaaatagaaatacattccacttgaccactatccactttgcttgaagtagcaatgacatctgtctcagcggcagcgactctagaccgcggctgctgttgacggaggggcaattgttggccgcctttttcttagggatgattatacttcgaatatagtctttaagtcaaatctctttcgcttagtattgctatgtgtacttcttgactcatgcgtgcaatagattaaatacatccccgattgtttgtgttaacattttttctaaagtgtaacccacaagtttaaccgttctaagttaaattaatttgttaattgtgaacgttaaagagcaacgggaatatattttttttcttttggcgtctatgttcatactttgtaattagaagttttctagtatatttttaataaagttcgtttgttgttcttttttatttgcaaattaaaatgcgaatttcatttttttgttcgtttgatataatctgagtgatagctaaattgaatattgttgtgaaaaaatcaatgcgtgtctatatgtattaaatttattagatgttgttgtcaaaaagatgcattaaatatatttttttccttggccaggtagaagactagagtatagtgactatcgacaatctttttccaaggcaccgtgaacgttatcaaattagctggtattattagcttgtgtggctttactgtgacgtataaaagtaaatcaataccaataataaatacaatcaaaagaagatttgaagttttttcttctataaatgattttcactaacaagcgtataagattataatttgtctatatatgatttcatttacaaccgtataagaatcactttagtggtagtgtagtacactaatactaatatacaatttgcaaaattgatcgtcatcttttacctttgattgtatccgtttgacgttaactaagattggagtcatatattggacttacaaaaaaaaattcacaatgaacagtcttaagaccatgtctataaagcctctctgattaaaaagataagaaattcagaatccataatcaagactaaaaaaaaaaggataagaatctcaacattgtgacttgtgagaagagattgtctaatgagagcatctccaatggatgcaaaatggagttctcattgttggttctcttgaaaaaagagttgaaaaataaatcaaaatggattaaaagagagagagctgtctctcttgagagagtttttgagagagatgagagacgatgacgtggtgcgttatcattggtcagttggttttaacaaaacaagcaaaaaaaaaagcgtgaaaagaacccaaacattatttcgtttcccccaactctttctctctctctctctgttctttgctgaaacatgcgatgccgattgcttctgatttctcctgtgattgaggtcacaactgaggctgctggcgacgattgaaggtagtactgagtgtttgggcagaattcatcatttgcagagccgcatgtcacgatcggagtgagagagatgatgcaaatcggagattcatatcgacctctggagagtaatcgatgaaggaagctcgtaaatcgtaattggtaagaatctacttcttttttgttctgtcagattgataatccatataggatttatttcttataaacgttatgttttggcttcattgtttaaagcttctcctgattctatcttgatcattgtttctaatcatatcgatgttttgacttacgttgcttggaagctctctggttttcaggtgaatcgagttcttggatctggtatactaatcttcttggttccgattcttaatcgcagatcatctcgatgttaatgctctagatgtaaaggtcagtttctatctaaattaggggtttgtgtaataaagctgtgctttttttgtttatagactgcgattaaggagtgattagctagtttttatatggtttagtgtgataaaaatctatgcttctgttgtttaatactgcagctacagaagtgtagaggagtttcacatagactttcatctcaaatacttatggttctttgccttattcgttttcaggttatctttgtgtgaagaagttgcaggttttggtttgaaaaattgcagcttttaattttttgagttatagattgcaggttatttgcatgttttggtttgagaaattgcaggtttctgcaaggtttggtttaagaatacgaagcagcactaccttctttccaataactgaaagatagtgaagatggaggttgagttgtaggtttcatgagttgcaagtgtttgatgagttacagttttttcttaacaatgatttgagactttgggtagttgcaggttttcaatttgagactttgaattcatatatcaatattccagtttgttttctgcaatgtttcagccatatcttaacaaagtttaaaaatcttgagttagttctttgtgaggcagatgaaattatttcaactcagatattatcatatgcaaagatggcaactaatctctccctatagaccgaccatatcatgattttattacactagttggttgtttgacaacaacatcaatagaatttttcacactattacaacaatttcaacatcaaacatttcaacatttcgatttcaaaatcaatagaatttattttctgagaactctacaaagagagactaccattggactttacaaaactaaaaaaaataacataagttctcatctcttcaattttaaaattttattcttaaaaaaatggtgagagtcccctaggaggctctcaccattggagatgcttacagtcacatggtgagaagtgagagaacttggaagaaaaagtttattttgtagagtacaactaaataactaaataaagtattaatcatttaacaaatatggcctattagctcagttggttagagcgtcgtgctaataacgcgaaggtcacaggttcgatccctgtataggccacttttttatttttggtaatccacaacttgaaaaactcgatttgtgatttttggggctaatacaacatgtgatttatatctgtaatatctgactcgatttgtgattatattatatggtcactaaccacaattattttctttaaacaagatataatcaaatgaatcatgcctaacattttacatgatatattacacatagaaaatctggccaacatttaaaaggctctcctgaggaacattgaagatggcactgttttctctacaaatcttcctaagaaacgcataaacataatcaatggctatcctcttgtagaaccttgcctctctcctggctcgaaccactgtgttccccattatatgcaccactcctgcgtctctgcacccgtttatgaactccacttcgtcccctcctccgctcatttggctcgaccccgtcactgtgtgacttgtccgttttgttgtagtgggagctataaccgactctatagaatcaaatgtatcaaacgtcgacacgttcctaatctcgttcccattcccgttgaccccatctctggactgtcgttgttggcttccgcagacgctgtaatcttcggaatctgagcagccttccatcatcgattcgaggcggaggaaaaggaagaggctttcaaagagccgtttctcaaagtcgtcatctttcttgtgcaagtctctgtatccgtacctcgcaacgcagcggaacatgtgaaagtttttgggtccgattctttttacaaggaaccgttcttcctggggaacggtgtatacgggaaggttcttgacgcagacaaagatcacgacagagtgagttgccggcaggtttgtgatgaaatgagagaaaatgtgagggactccactagctagctcggtgtaaacaaggccaatcccaggaacacggacaagaccaaggctaggaccgagtccgagaatccaagccatggagactttactatgcatttcaaactcatacctcttgagggttccataatgccaaacatacatgatgacaagaaacgcagccgcaatgaccagcggaacccatccaccttggttaaccttgaagagcaccgccgagaagtaagtgcattccacaacaagggatagaagagtaaataagaggactagaacccaatggcatcgccaaacaagtatcatgatcagcatcatgagaagcgttgtcacgagcatgacaatcacaactgcagtcccataagcatttcctatctggttctggttcttgaatccagcagtgacagctatgcaaaggatcatgaggatccaattgatgtctggaacgtaaatctgaccaaggaatttccgggaagtatgcacgactttaactctcgggaaacatccatgagcaagagcttgcttgatcaacgagaatgttgcggatattgtagcttggcttgcaactattgcagcagcagttgcaattatgaacattggccaatatactctttctgcaacaacaaaaaacaaaaacagaaactcttctctaactttgtccagagacatccatcgatagtacgaaaattgataagagatatatataacaaacttggaatggattgataaaacgcgtcttcgacatgatgcgggtactttctaaggtatgcagcttgtccactataagccaaaaggaggcaaggaaacacaattacagtaaaagcgaattgcacagctgagactggaaaatgagagagatccgcaaagagagcttcaatccctgaaatatgatggacataacaagaaaatatgaatatcataaaagatgaagaaaacgataaacatttgatcagtttctttacctgtgatactaagcataatgcctccaagcgaggtccaacgatcttggcctcctcttttaaaatatcgaaatatataaaccggggaaaacgctttcaaaacgcttgggtcatgtttccatatattgaacataccgatacttgcaataaagagaaaccagagaaatacaatgggcgcgaaaagccacccgactctgtctgttccataatgttgtacactaaacaagctcactaatatcacaacagccacaacaacaacaatacctgtaacaacaatcaaaaaacctagattgatcaactatcatcgctagcgtaaatgggcactgtaaaacgaatgatttaacgtaataatcaataccgttgtttatatgaggtaggtttaccctgagcccacccgcagcagatagaactgcaacagattaaacacgatgaaatactatcccggtagaaaaacaacaaaatgtatatatttggaaggtcaatgaataatacattacccgaaatggcgggagtaaggattccatcgcctatcaccatgcacgtaccaacaagaacgagaataagtagcgcatttttcctagaggtaccgttctctaaccatctcttggtttttgcagcaaaagaacgctcatgaaatgtagtacgactataagtagtaagctcttcatcagtacggtgttggttcggaattgtgctaacttttgcatgtctacagagcaaagaatagagagcaaatgtaccacctactcaccaaacaagagacaattcaacaaaaaaacaatacgcatagcaaaagccctgaagccgtgaaatgtaatactaccttgcccattatcgtttgctttgcatacaacgaacacatatttgaggagagggatgagtgtgagggaatatatgattagcgataaagctccaatgatatcttcagggtctttgatccctcgaggaaatgtattatagaaaacatatagaggagaagttcccaaatctccataaacaacaccaagactctgaaatgaaagctgcagaagcaaaaacgccgagaatttctgcaccaaaaccgaaaactacattatatcccccaaactacaaaatcttccatataagtctctacaacagtcttatagcaacaacacaacactcagtgtttagcatcacagagcaactaaaacagccaagatttatcaagaattataattaaaccttttctctatacatgttcctgaggcgaccagcttcttcatccataggttgatcaagtgactgatccaaatcccacatactacctctctcatcaccttcttcatcaatctcaccaccaccaatggatgattctactctccccgccatttcttactttctcaatcttatctttgattctaaaacacaaaacccttttgttgctataaacccagaaccctaaatcccctctataacttcaaacccagatcttcacctaacccaaaacctgaatataacctcgaatttggaatcaccacgtttcaattccaatttggtggattcgaaattctcaattaacagagaacctacaaatccctaaaggagaaataaacattgaaaattcacaaagtttacacaaaaaggcaaacatctacttatgtactgcatcccaatttgagtaagaaattaaaaaatcgatcctttaaacaaacgattaaaggtttaaacttttttcctgaatttgcaaaatcaaaattcgtcaaagaaaaacagagaaccccaaaaacccctatggagaaagtgaaacaatttgaaattcttgtataaagaagaaaatgttttcaacgttatggagcatttactttggtggggctcggttcaattcacagactcaaattacacaaaacccaagcgaagacgatcgaagttatcgggaaaaagcagaattgggttttttgaatttcttcgttctcttttaaaaacgaatttattcagctggtgattgataggaactaagaactaactgaattcctgttattttctcagagaaagttctctgattaacagagtaaacaaatcagtttttttgttatggtgaaagagagagagagggaagaagaactggggaggggatatatgattacgacaacgacgaggattgagagatttaattaaaaatataattagcgtttttaaaaattatataattaaactttatgtcattgtattgaaattgtattatactaaaactgtctctgtcttttggggacattacctaatttatttacgtatatttaaatttctatacaaggctgtcaaaaaataaaaataccaaaaaattatttacaagtttatattcctatagatgaaatagggaagaataaaaaaaaggaatagtaactgtatttttaatttgttaaaaatattacagaaacacaattgatttgtgttgttatttttattaacatatataatgtggagtataaattattagaataaataaataaattggacaaaaacttcgctgccggctttgccgctaggacttcaagcccaggtaaattctctttgaagaacaaaacttcatttttccagctttgaccttgtgagattttttaacttcgtttaaaaaaaagcataattaaggtcaaagtacactgttctatctctatcatgtggtctcgtactttaccattttgggtaaccaaaataaaatggaaattagagttcatcaaaatttaatttatttattccttaattatattgtgtatcatcttgtaatacgtatttatatgttcaaacttcaaacattagacatttgactcaaagaaaatgatgttcagaaatagataaatcgcaaacaagataatgcttgtttaacaatacatacaccccaagtatttttttctctctttttttagtgttttaaaaagacacgttatctgataaatcttatcatcaaatgacattctttaaatcgaggatgtgcagttaacttattggtgtaatcatgtacgaattttttttaagtctataatagtacgtaatgtttatagcttcttcttaaatatttgactaaacttgatctcagttgaggatcttcgacttcgagtatgtgctaaagataaacaaataattgtgttatcttgcgcgtaataactaataagaactgtgctatatgtttggccatgaaaatcaaaatatttatatactaaaacaaatcattaaaaaaaaaataaaaaaaaatcataacgtgtcctcattttatgttggtaacaggtaagataaccaaattaaaattacgatacatttatcaaaaaaaaaatgtttccaattaagttatttacttttcatgtatatgtgcatgtgtgaattaaaagatacgattaaaactgttttaaatttctttatctatgattagaacttgaaatacataagaaactttaaaatctatagccgtaattatcattttgcgatgtttcaaagaaatgtctaataacactctcgatcgatcttagataaattatgataaacaagctaagttaatgtccatttggttactagctaccactaggttagatagctaaaagctagcattcaaaattatttaaatgacattttcataataacaagacagtcttttgaaaaaaaaaaaaaaaaaagccttttgcctatgaattttaagttgatgctttgtatttttcgaatttgtttttgttaaattgtaaatatttcattgaaaatgaacaaaatttaggttacaaacataaaatttgaaatctatacatatggatctatggcaaagaagaataaaaacatagatgcataaaagacggttaattaaaaactaaattttcgatccattttctcaatctggtattgaagcgagagaagattttttttcgcttcccttgcatgatgcaacaaacttttcttttcgaattaaaagtttcaaagtgaccatggactgtgacaaagtgtgtatcataaaaaaaaatcttgcctactctgatgatcaacctcgaagtcttttaaaaaaaaaagaaactagaattgtatggactcatatgttactacgatatgtacatgcacgtgtttgtaacctaaaattgacagaatgagacatacaagacagctgatacggtaaccataagtggtccttgcccggaaaagaaaaacaaatatgaaaaaaaacaaagctggtccaatttttatcattatttattattatatttcgttaattggctaattacaacaacatagataataaatgatgtttaattacaacaacaaaaaatacaccttttggttctggaatatcataatatcattattttctcccattattttatatcatatcactcaactcttttattaaacatagaccaaagtaacagctatttattcatgattttatcaccacattacttttgcaaataagaaaataatatttgggtatctagaaggttaatccaagtttcaaactcccatgacgtgttggtattgttactgatacggcacacgtgcatcacgagttatgaagcaaagaggcaaacggcaaacaaataaataagatatagttttgaaaccaaacgaccaaaacccctattttcttttcgcgggcaccactttgaggtcatatttgaactccatacaaaaggagcttgtgaactaattaagtgcacatctttaataagtttgtcttttatcaaagttttaggtccttgttcaataattattcgttgtgtttggggccgctcgctgataaacctatggtacggtaaaaaaaaagtttctatctagaacagctctccatctcttcaattttgcaagaagactccaagtactactttactagtatcagctatatcagggacatgcattagctttctaggcattttggtgtaaagggatttattaagagttaagattcgagttgagactaattaagtgtgctatcatgcttgtccaaaaatagtattcattatgaatagacaacccacatcagtttaaactacatgctatagatacattatagcttataatagtgaaactatggatgacaacccacatcaccatgtacatgggtgatttattttgggtattaatagctcaaaaatcatattttaattgatcaaactatgaatttgggcctgatttgtatcagtgaactgatatctttgatactcagtatcaggtgacgtgacagcatacggttggtcagtattttcactcaaatcagaagaaatttttttttttagtaatcttatgttttactatattaatttctgattttgtaatttttttttgatacttaactggtctcaccaatgcaaacatatttagtaggaatatcataaaaattcttaaataataaataaatattataaataatactaaaaaaatacttatgatactatatgagtatcacccatatacatgctctaacaaaatcaatacaaagaaaatcactactaggaagtaagttcgagaactgcttgttgaaggtgctcaggagatgattggttagaatagtcagaattcacattattgggagttactataaagaacctaactgtgaagagaaaggatggaatcaaaacaaagataaatggaatcactggttttttttttttttttttaaacaatttcagaatgtttcaatatcagaatgttcctatgcaacggaaatgtgagaaccattaacaacgaccatctacaacacaagctattccacggactggcaaaccatcattaacgtcgtctcaaacaactggcacgatcgcatcgcaggctttctagctcgttgtctactgcaggtctcaattcatactatttggcgagagtgcaatgagcgtaaacatggtgcatccctgaatccatcaagtcggctagtcgggtggattgataaacatattcggaatcatttatcggctatcaaacatagtggagatcgaagatttgacacatgttttcaaatttggcttcaaactcgagggatatcataagtgggaaactcttcgtaaatttattgtgatttaaatttaaaaatttaaattctcggtagcactcgttgtaacaactttggccatttctttttaaatttaatttaacagaaaattcaaaaaaaaatatatatatatatatatatatatatcgaaatccatgtccttaatgccacttatcacattttatgtcccacaaagacaaacttgagaaaacaatttaaaaccatttaatttgtcattcaattgatttggtcgacttaaatcggattaaattttaattaatatgtatagaacgcattgctgattaacataaaaactttgacgtataattttttaggtttgaccattcgaacatgttaactagtaatctaattttctgttttcgttaactagtaatctattaatcgtgtacgtatctacatagcttaaagcctaaaactaatatgttttaagtagttactctctatctaaatgcgttaagaactcagaagtttaggcttactctgaataataaaatgcataaaaattaaagagaacatttttaaaaaagtcgacatttcaaaaaaaaaaatacaattgaatagaccaaaacctaacatgaactgtcacagcatgataatgtgataatatacgaatcctatcaaatctactttgggttaacattaattaatcccaaaaaaaaatatactttgggttctgtgtagttgtcatatgttgtcttattactagatttggtttttacttcagggtcgtttttgtttcaagtatagtgtactgttttttttttttttttgataggtatggtgaactgatttgggaccatataaacacacattgtaagctatttgccttctaagattacaaagatattttcttgtgatcagaaattggatccttggaatattccctaagaccctaacaaggatgcttaaaaagagtgattcagccaattatcatttgtcccatatatgttagacagatgtgacatttaacaacaacttaatcctaagccgaaagaaacatgattcactaaagaagtactattttagatttatgcagagctttattgctaaataatttccataacatatggaaactttctcaagtctctaagaagtacatgaattaatatttgttccgttatagtaacatacaaatttattcatttaacacccttggtttaacagaatatcaactccattggctttttattagtttcaattttttttaaaaacatatttatatgatgaaatttatactataatgatttgtgttaatactaaccttatttcatcatctgaatttaaacccgcatatacatgttactcaaacaaataggtctaggagctgtctaaatcctctcattagtctttttatagtaataagttacttttaattcctctagttgtataaaattacatataaccatagtcaaccaatgagacagagtggagagagatacgttacaacttacaaataaatcaagtccatgaggtgggcttgacaatatgcattcaattatatctccacacgttcataaaggatctataagaagtctacattatttaactgattaattaagtctatattatttcataacatttctcaagaattttcgttcatatcacaaaatttggatctatactaacaagcctatagtatttttcaataaaaaatgtgtgctttatgtatccgctatatttaatgctaatgtagtaatgttaagtgtgtgttttttttgtcaaaggctttgctaatgtgtgagtgaatttgtatatttcatacgatcgaatgctagtacaatgttagttgaatctaacgtccaaatatagggtatgtcacaaaatcgatcttatccttgactatatattgagcgtgaatgagaattttcgacgcataaaaataagtcaacaaacttgacaaagaaatataagaagttgcttgcagtccttaaaaacgttattttgttcttgataaaaattcgtaaaagaagatgttcttgttgggcctagaaaccagagtttaattgggtacttcagaattaaaaggcccaatcaaatctcagtttatatttggttacatagaactatagaagtagaactcaaaacgatgtaccaccaatacttgcttgggagtttaggctgacaaaacattccatgattcaccgaaattttgttatctatgtggcatgtatatggttcattcatttatatattaacaaaaaaaaggacaatttttgttccaaaacaaaacaatgcatgatcagggtaacaaaacaaaacattgcatgattcacattgacttattattccaaatttgtttcattgatcatgattcacgatatttagcattagttactatttgggttagtgttgttgatacatcaccatctaactttaaattcacataatacaaaataaaaattgataaaatcagattaaaaatgaatgaagatgtatttttgttttcttcttcttctttgaattaagttttaaatttggtttccattcggtttagtgtaagttgtgtaaccaaacctcccactcacgaacaaaaattcagatttataaacattacaaaagtatccacaataattgctcctacgaccttaacttagtgtaggttaattccaaggtcaaatcctacagctaattacatatctaaacaagccacttccttcatttattatcaatttaagcatctaaaacccaacatttttaacggataataattatcatcaacatgagaagaataaaacacatctttcaacaagaataaattagtaaactcaaatcatgtaataataatcaaatgaaaacaacaacaaagagtgttgagtctaatacatacacattacattaaaactattgttcagattccaaatttcttcttcttctccaatattacaaactacaaagagagagagagaatggtaataagagaagaaaaacagtacaagagaatcatcatcttgacaaatcttcaaatatctaaatcctccaactgaatgttgctcttaagaggcacataatctccaagatacccaccaagttgatcatacaaagcggtcttatcaatagtctgatgatgataactcttacaaacatagtaaaacacactctgaaccaacaaacccacaagattaaccatcacaagaacaccaactaacaatccaccaaccaaagtcctagtaaaagttccatacttcccaccaccatgaaccacaacagcaccaaaaacaactccaatcaatccacagaggaaaagataaacaaagattaaccccatagccatcttagtcttccctttaagcaactcataagcttttctcatagcggcgattccgtaaaccggttcaagaacagagattacactacctaaatgccataaagcagtgaaataaacatgaacaccaaagtatagaacagagattataaccccggctacaatagctaaacctaaactattcaaatcaagagctacgagaagcatcacgaggaagacaaagaagactgcgttataagcaaacatcaacagagcaacccaaaggaaagttataaagagtcgtttaaagactttgggaatcgcagagagagttgacgagaaagaaacaggctttccggtgtaaagagaagcgacggtgaagacaacagcagcggttgagagaagagagaaggcaaagaggaagatcaagtaactgaactggaagattagaagaacagtccaatcatgacgtgaacgatctgagtttggtgggtcggatttgtcgagtttggctaagattggttgagtgaagagtgagtgagcgaggatagcgaaggagagagggaagatgaaggagagggttatgaggtagaaggttcttggagatcgtttcttgattgagattgattcttgaagtagttgaggtattgtcaagaattgaagctcttctggttggagatccatggtttgtttctttggaatgaggtttgatcggagaagaacagagaggagagattaagaatcaccgacgggtcaatttcgaaatctgagagagatgaagtttttttttttttgttgaggtgtgttttgttgatatcaagaagatggagaaaaaatgtttacgggtaaagactttttttttccttggaaacttctgggaaactcatataacacgttttgactagtattgttattgtgaccatttttttttggggggggggggcaactaattgtttattttttgctttaattaatatgatggaatcgttattttatgggaaaatatgtaagtggtaaagagatggacaaaaaggaaaaggagatttggtcaagttttatgagcacaactctctttgcatgagctgagacgcaatcatggaactagactttctatagagtttatgaatcttgtatacttacaaagaaatggtaagatagggtaaatctaattttgatagagtttaattatgcacctaatacctaatattcaccgtgaagaatactctagaagagtattcagattttcatatttgtaatacatatatatgtactacatttttttaatgttatttatttacattttgaaattaaataaataagttcaaagaataaatatgatttaatttgaacgacatatcagaaatgttgtaatctgttttttttttttttttgaatattgtaatctgaaaaatgaaagtttaatggtttgatatttcggttgtatgtgtgattatgtatgttttgatttgttttcacgtaataatgaggaaatcaggatcaaaactttaaaaagagcaaacagaaaattaatgatgttaaaagtttattaatacgaagaagaaaaaaaaaagttttattgatacgaccttgtttgaaataggattaataaattttctgatgaagttaatttatgatagaaacaaaatcaaagattaatgcttacttccactgaatctgaggtgcagggaaatcacatggaccgatggtcccaacagttaactgtccatgtcaacttaaatactactaatttacataattaatagatgtgaaaattatctttgcaatgaatattgaacttgtaactttttgtatgtgtttaatttggagatcttataagtttacgtaaggaaatagaactagcaatcaaatgttggtgtataagcactatcctacacacacgatttctttaattatactttcaatttcgaatagagaaatataagaaatggacaagaccggccggtccatgattatatactctcaagtttcaacttttgttttggttttctaacttttataaagatatgtaacaaatgtgtttttaatcgaatgtgttttaatcttttttcttctggcactaggttctttctacactagctactttaatcgaatgactaatggaatgtaataaaccaatacttaaactaaacacttgcctcttaaagccttattacaagaaaaataatagaccgtgtatcatcaaaatattgaaaaataaataaataccccaacacgtaatttataacagtaagactatgaatggaggtagcggacaaagcggtttaatttgtctgcgatttagtccatctcatttttgaggcgaacaataaaccgctgcggaccaagtttatttgtatgtaaaaacggtccgtagatgatccgctgcggttttcttctattttttttggtcattgatgaattgtaaataaaaatagtctgattcgttgacggttttgtccgtcccaaccgccataaccattcaaaccctaaatcgaattcacaagtcataacaactaattctccctaaatataagcatatcctaacacaaactaaagaaatacctattattatttaataaatttagtaagaatacctattattatttaatgaaccatccaaaccatacttacaaaagtagcagtccctatctaaatagaaactgttgatctcaaggtttcatttgctaaaaaaaaaaaaaaaaagcaaccacatttctttctctatctcactctctcgtttaacattctcatgaaattagggttttagaaagatagatcgattgaagatgaggaaaggtaagagagtgataaaaaagatagaggagaaaataaagagacaagtgacattcgcaaagagaaagaagagtctaatcaagaaggcatatgaactctctgttctctgcgatgtccaccttggtctcatcatcttctctcactccaacaggctctacgatttctgctccaactctaccaggtttatatataaaatcatgcatatgtgtgttcttgttttggtaaaacaaaaagaaaagaaaatgaatgctctttaatatggacagaaaaaaagagttattgaagtttttttttctagttgtaattaatcaataccatcatcacttggtttcatcttttctttttcgttggtttacttctttttttttgtgaaactttcgttgatttacttaagagaaataaaatgctgacaatcttgcctaggaaatgagatgattaatcaaagtgttgcttcatttagttttttctgttcactcgtacgcaagtttgaaatgcttttggtcatctttttttttttcatataatttggtattgtatcctttatatgctttcttgggatattttattatgtaccaggtttaattctatggaaagttatgatctatgtaggaaaagttatgatcttttgtattatggatccaaaagaaaattcatattaaagttcattcagaaataactcatcttgatataaaaaatttcttctgttttctagttcctaagtttatttaatttttgtaacatcagcatggagaatctcatcatgagataccaaaaggaaaaagaaggtcaaaccactgcagaacacagtttccactcggtaattatttttgttataattcacaaattaatatttatcttcacatgttttaaatttatggatgttatatatgaatataataaaaatttgttgaaattttttttttttaggatcagtgttcagattgcgtgaagacgaaggaatcaatgatgagagagatagagaatcttaagctgaatcttcaattgtacgacggacatggcttgaatctcttgacctacgacgagctcctttcttttgagctccatctcgaatcttctctacaacatgctcgagctcgcaaggtaaaataatactgttaatatacacactttatatagtctatacatttattaaaggttcttgtctcttgtttactaataatgtagtctgagttcatgcatcagcagcagcagcaacaaacagatcaaaagcttaagggaaaagaaaaggtgagttcttggctttggtatattttttccattaaatacatgttaattttatgtaattttcaaagcttaatttacatataaccattttttcaactgtttgtattatttttttctaataggaaatacttattgatgaataaactcaacatttatgtttcgtctgtatatgtgacttttacatgtaaaataagttaaatgtataaaatagctaactcatttttcatttctacttaattagggtcaaggaagctcttgggagcagctgatgtggcaagcagagagacagatgatgacgtgtcaaagacaaaaagatcctgcgccggcgaatgaaggaggagttccttttttacggtggggaacaacccaccgacgttcttcacctccttaagctaccacaaccaggcccaaatacaggcccataacttctctctatctataaaaaacaactgatagtaaaaagtattgacccggtttggttcggttatgttgataccagactattaattaacttcggttagacgtatttacgacttgatgctatctagacctttttgcccttcacataaactaatgattacactttaattgccactgaatcttccaacacaacaccacccagttaacaccaccgttgtcgtccaccttagtggtcggagaaaccaaatcagtataaaattctgatgaccgggaatgcaaactcaacgtcttcttccctcgagatcggcggcgaaatctttttgaagatctcctaaagatttacatttctcattatctcttttctccccattttcaagttccgattcatgcaacaatgaaccaaatcaaagatccaaaccctaatctaccggaacgtctcttcgccgtcgattgctatcccgataaagcccgtcttaatatatattcaagacctgaatatctcggtacaattgctaaccttctcaaaggctctgaagaatgggaacgaatcaaaagttcacaatttggtaagctgttcgaattccctgtcgctcgatgctcacattcaggtaagctgatacatggtttattatcccgacaagtcgtaactaaaaagaaacacgagttatggtttgtgtttggtggacacccaatacgtttctctataagagagtttcatatagtgactggtcttagatgtggtaaattaccaacagaagatgaggtaaagaagcatcaggattctaagtatttgtctgtgtggaataggcttttcggagagaaaagaatggttactattggagatgtgttggagatgttacaaaagaagaaactttcctcttggaaaaagctttgtttagctctcattgtaattgtggatggtgttgttgtatgtaatgaccaaagctttgtaactctagattttgtggagatgttgaatgatatagacttctttttggagtatccatgggggagaaaagcttttctcgcaactattcgtcgtttcgggccacctaaagatgcacctaatccgttagggaaacttaagaagcgtttgaaacagaagacgagtgcgtgttacggttttcctctagctcttcagttacaagtttttgaatccattccggtgatattggagaggataaaagatccaaacgatcttcgggacttcactgagaggtcatctgaggggttgtcaatagcgtttctgcttcgtaagagttatattcttgatgctgaagttgatgacaagcttgtggttgcacatacattggaacctaagggaatgattaatgaatctgagttggtttgggaaacagaggtttctgatcccaaggtggattacattttgagattgatcaacgagggacattgtttcaaaccatttgaatggccacacttgaaagcagcaaatcaagaggtcaatattccagatattgatggtgacagccttgaagatgtcacagatgttagtcaagcaaggcccaaaaagcctcttactaggtcttctaagaaggagaaggaagttgtcaagcctcctagtatccacaaacatacttctcaggaaaaaataaaggctaaagttcatgttggtggagaaagtaacgacccggggtatgtcacgcttgcttacttgaatgacatgaaggagtggatactgaaacagaatcaagaccttagaaacaagattagggaggatgttaaagaaattgttgttggtcccaaatcaccagcaggaggagcatctaatctgcgtcaatcaaacaggcttaacaccaacagtaagggaaagactgatgcatcacctcctaagaaaaccggcaacacagaaacgcgaaaacgaaaaagaaaacaggtagaggttcactccttatcatctggaagcgagtcagccggtgacattgaaggtgaagaggatgttcagagtacatggaaagaggacggaaatgcgccaagctcgggtacatttgatgaatgtgatgattatggaggtgctctaaaaatcactcaggaaggtgatgtgatgcaagaagaaagtgactttgtaagtgttctttacattcttacatcacattcccatattttatctgattacattttgtttttcctcctgttattgcttatggactatggttataacaatatcaaatttcttgtaggatcactgttcttcaaattgtacaaagatgaaagaatcaatgatgagagagatagagaaccttgaactgaagcttcaattgtatggaggacatggtctgaataatttaacctacgacgagcttcttcattttgagcatcaactcgaatcttctctccatattgctcgagctcataaggtatataatatacacactctaggatataattatttaagcgacatatatattagatattcatatacagcatgtactttggtataaaatagttttttataagcacacacatatcccaaatttcacagttttagtggttcatgtctcttgtttattaattatgtagttttgagttcatgcagcaggagcagcagcaacaacaaacagacaagcttaaggagaatctcatggtgtgtcaaaggcacgaagatgatgacatcatgcaccggcaagtgaagaaggagaacccaccggcgttcttcagctcctcccgccgccacaaccagccccaagactaggacaacaacttctccctatctaataacaacttaagcagatcgacccggtttggttcagcttaccagacggttaatttattaccggttattttctttgctgactttctaatgaacatgttgaccatgctatgatagctttctggtttatattaaaaggttttctttagcagaaattaaccaaacctgtgttctgttgtgttctcctaactctcattaatatgtacagatccatatacgataattgtaggagagaaactactcatatcatataaattgttagtatttatttctaacaatgaaaaaagaaaaagaattcgataacaattggaaatggaagctatctaatctctaggaattcacaactggataaaatccgatagtggtaaaaactcataaaccatataagaaaggattgtagttgacaattttggagcacgttggctttgggttgacatgaatctttcttcttaaccgggtggccatttcatctgtcggcctccgaggacgtgcagatgaagatggtaaacagattggcctgaatgagaggaagttaattcagtcatgtgtatgaggacgatgatgcttaattggatggaaaagaaaagaaaagacttacaggcttcaacaccgttgttgataaccacacggaacccatcaaggattccttctttctcagcaacaatcttcgatgcatgtagaagttggccaagaacctctacgtgtcttggttcagcctgcgacggcggttcagaggaagatatgtttcaggtaaaatcttaatctgttccaccaaaataatacttttaactccttttttagtgtgggtggcagcatttacatatattgaccagaaacagtggcacaataccatgatgaaacgcgttactagttacagaacacaatgatgagattctttgagacctctaagagcaagaccaaaggaagtcacgagaagaaacagattgaatgttaaaacataaaactgactcaccttgccaagcgaggtcaagccatctctcaacttgggaatgaccaaaacatgaacaggagcctgagggttaatgtctctgaatgccaaaacgttttcatcttcatagacaatatctgagggaatctcttttgctataatcttgtcaaatctaaaaccacaagatacacatacacaagagcgtctagcataaacttccacgaatcacatccaaatcaataacgaagaattaactaggtcacatatttgaaagattaggatcatttgtagcaaaaacacaaacatggattgctttgaaatcaaaattaagagaaaccatacatggtcggagctccggtgtcagcaacagaagccgcagctttcgcggcggcttcttcattatgagcagcacgagtagaacagatcaatctacagagcgactaaaccaaatcaggtcaattacaataatctccataacaaagacaatataatagagaaactataaccttttagaacgagtataaggaagaaccctaatcaattctccggtggagaagaagatcctcgaagtcacacgaacagattgagcaactcttcccaccgtagagaagttcctaaaaaacgaaaaacctcaacggcattagcaaattcaacaaccaattccttatttctgtatcgagagagagtttcaccgaagcagcagcatagaggaagaagtgacagccattgaagctctctctgcttcgattcgctaaccgtttcgatcgatttttcttacgacattttcaatcaaacgacgtcatttagagattatcaacatacgtcgtcgttttaactctttattaatgggaaataccgaaatggaaaactaaaacgtctaaaaccaccaagaagaatgtcaatgcacacacacgtatatataatccaagatacaaatctacttaacggtgtccaacttcaaattcacaaaatatttttttagtcaattagttggttattattaggtccacattctcactggatcttctcaattccgaattcaaagctttttctcaactccaaatgtcacccttgagagacaagtatccttcatgctcattgatgactcttctaactatagctttgcgttcaacatgttcactattcctacccatggccaagcccttaaaagttagggagattttgaaaactaccttgttttttagttattatttgaaaaatacactttctttatttttaaaaaatattaaaaaatttaatatataaaataacagttttgtccagatttaaaacaaaagctgttttcttgataaattaaaaaaaaaacgaaatttagaaaaaataaaataaaataaatatattatgttgtttatttttcaaatatttttgagataaaaatagtttattatatttatattaaaatttaacaaaatgatatctaaaatagtttttagtctatcacttaataaagtttatttatttatttgttttgacgaattttagttaaaaatatttaagagaaaaattatctttaaaatttttagttgcatcaacttttaaattatgggtttctttttattttaagttcaaaataattttaattattgctaaattttagtgagcctagtttaataatttatatattaaaaatttaatttttagaaaagaaaaaaggatagggtatttttcaaatgaaagctcataaagagattattttcccaaatttactgtgacaatcgcacgtttggcgttgagtctttcattcggcggctccacatgttcaatagctactgattaaaccatcaaaatcgaaacactaacaaaaacagtaatcagttagtaatatgtaagcaaaccatttctaatttaacaaaggaactctactagtcatctccgacaaatcaaagctatggataattatccattgtcacatttttcagtgtaacttttcataaattaataacttaatttttaatttatagttgtgaaaagttgtgtctttttacgcgactttactttattttattttttgttatactcaaaattgtattttacagtcattaaagatatttttgagaattaattgaagttatatatgttcacttagagttgtatatttttcactatgttttattagtgtttctattatcttcaataattatgtcccttaccaacaattttgtctatttaaacattcatgtctttttaaatttctatatatttttccttttttgagaataattgtgtatatttattatttcctttttatagaaagttgtattctttggctacctaatattcatgtatatactttgtcatctacagtagaaactttataaattaatacttgataaattaataaacacaataaattaataaattatgttggtcccaagtcgggccaatgtaaaaattaaacaaaatcgataagataataatttttttgaaatctctatgtaaaaatatggtcccaataataacataaattaataatcaaaatttttaagataatctactataatatgagtccagtgttgtttgttgtcttttcttaaagtttgaatcttgttgaatttcatctgtaattttctttttattgcatcaaaaactccgggtgatatcttctcaatatgcatccaaaatttgtgaagagttctagatgcgaaaattggtttcttacgtgtcactatttccaaaagtttctcattatcgtcttcaacttcttcaccaacattatagacataaatagcaatttcttttaaaaactctaaattttttactatgattcatttttacccgaatagtcgagtaagctcttgacatttattctattctgaaagaatatagtgttatattttgcttaaatatttctataaattgataaatattaatttattaatatataaaataaattaatatcactataaattaataaaatttcatggtcctaacattattaatttatagagtttgtactgtatattattattttttccttctaaataactatgaatttcagttatttgttaattgttttcctaggattgtttctgtgaaatgttacatctatttaccataatgtttttctaatactaatatactaaataaatgcttctgaggattctctttatcatatttgttttccataaaatttattcactcaagctcatataagtcttatataacctagttgttttttaatcctgcatggaagcttccagcgcagtccattagtgggacaataaaattagagagtagatgcatctggtggggagttcgcctaaccttctctttcattatatcattgccaccaacaatgaagtaacagacatgtcccagttttgctttcttatctgttccaagccatcttggatgtgtaaaacggtagaggtaacgcggacagagaggataatagtcgctttcccattggcggagaatccttttggcactgactaattagtcagatgctgcatacgcccaacagagaaggtgttgttgttggtttctaacaagacctacgaaatccttccatgatgtgctagccaaaacagatgatacctagccaaaagatttagcaaaagatttaagaaattctcaacatatatatattagagtttgtttgtaaagtagtacgtttctaaaacaaaattataaaagtagtacaaaaactattcaaaattagaaatgtactataggtggttacagttggttcttttgtgcgtccggtcatgctactaataaactcatgtaattacagtcatgtcactgcaactataattgttggctgagagagagagagagtcagattgttagaaagaaatctaatctttctttattatatattccctctaagtttaataattaaaatgctctttagtaaattttatttttaaaaattgatcatataaataaaatctatgttttttcgctatcatttgatatgcattttgtttaatgattttaaaaatttatattataaaccattgtacagatatagaacactgtacaaatatagagcacaatacagatatagaccactgtatagttataaagcattgtacatatgcattttatcatttaatatgcatttttatatattcgcacagttgtctacatcttctgtacaacctcaagagtatcttgtaaacgagatcattcggaatcgaattcattattaccagtatgtgaaaactcctaggggaggtggatttttaaattaaacctagtcaagcccaataagcatactgggctttttaccatcaaaatttatattaactttttacttttttttccagttttgatcaaaaacgttatggacttaatattgccagaaagaaggtcataaagaattggaaaattctgattctttaatttgttttctctaaaaccttttcaagaaactaattcatagtgtttgtttagttttaagtaaagcataaatgtttcattgttcgttagtgaagtggattgttcatcgaatctcaagagaaaatgaagtacaaactccatgtttcactgatatcttcattcatgtatgattatatgactctcgttaatacttaataagtgttcttttagaacacagaaaaatctggaattcgagtttcgttacttaaccacctaagctaaagtgttttattgtaatttttcacaaacgcatatacttatttggaaaaacagctaattatcccacaaacttagagcatatataatttaactaaattgaacccaaaaaaaaaaaaacagtataactacatgagcttttaattaagatttcaatttcctacacgaacagtttagatcgcgttaaaaccatcaattcggcaaacaaagttactgttccgttaacagatactaactgtgccgcatttacactgaagaatgccacaaccacaaaataatgtcgtttatgaaaaaactgttgattcctccacgaacttagttgttttagcatatttaaacataaaactttctcttgtacctataactacctgaacttaactaaaatttaaatttaaatttcttacataaacaattcgaatcttgctaaaaccaaaatattcggcaaacagtgttaacagattctgactaaaatgtcgcgtttacaatctaaaatgtcacgtggaaccactaaattatgagttagtaaagcagtaatttataaataaaaaacttacataaaaaaaacaatgttgaaattgaatcttaattttatgattaactcaccaaattgttgactttttttcttcactaactgaacaagctaacaaaaatactattggttagaactactaatcattgtcgttttccccattcaagaaacactaattatttatttttttgtttcgttgtttaaggataaccattttaatttggccattataaggtaccaacgattaatcaagaaaggaactgggattggaggttaagagccgattgaaactcttgagaaattttcaaagatttacaactgttaggcattttcacgaatgtgtccacacgtgacaaaaatagctaggtcaaccgaatgatatagctagaaaaaaagaaatgtaacaaaaaaaaacaaaaaaaaaaaaaaaataactaagccaacagagtaatagatgttagagattatgtagggattaatgggcccatgagatgagagacccataatccggaggaagcatgtaatgtcccacatcggaaaagtgggagggaccttgactaatatataagagatatgagccactccacttattgccaattggttttaggttggaagcccatacgactttaataggtggaatgactcatatctcttatatattagtcaaggtccttcccacctttccgatgtgggacattacatgctttttcaggattatgggcctcccatctcatgggcccattaatcccttcctaatctctaacaatagagcatgttagctaatgattcatacttgttatgctgcttgtttcttcacagacggcgcaagacttgcagaggtcacgagatgtatgcgggcgttgttgtggtttcggcttcttggtaacgatattccggctttgttgtaaagggcttgacttgatttgcattgcaatgttaacactgatatcctctacatagtctaaaaaggtgcaaatacgattacctctaaaaccttggatttcaacactttgaagagttttactttccagtacaacgagttatatgtatatcccatcgacaaaacaatgttaccgatagcggaaagatcgtggccaaattttctctcagaatacaaagagtagacatctttcgaccattcctgcttatcgacatcctctagaacccgcataatcaacttaaggggaaatccaacatcacgagcatactccacataaatctcacataattttcccttatagtttatcaactgataatggcagttttctgcaccttcgaacttgaatttctcggactaacaataaagcaaactatcacacaagaccttcttccatcagaatcagaatgttgcgctgagtaatacaaaaacccctatgaattagtttcttcttagagaagataaaattaaagaagcaaagtgtacagttcttcgacgtgttttgtatttagttttaagtaaaacagatttctttcattgttggtattgtagcggctagtggtggtatatatgtggaatgtggttcatcagatttcaacgaaaaaatttgatcgaaagaacctcgtcaagaacaactccgtgaaatatggacggcgaagcatggattcccataacttcgacacgcaacgagacctggctattgacttttgcaggtaaactcgagaatatcgcgagaaagagatcaattgggatgtattttcctccattcatgatgagaaagatctatgaatacgaatcgcacagactcttaattaatctcaagaatttgaacctattcagagtcggtactaacctaattaaggcccaagaatatttcaatgggtttattgattttttccgatgatttgttttatcttaatggtactcttttttttttttaatgatgataatatatagtttcctctcgtatgatacataattggtcctttagggttgggaaaaggaatttataattattgctcgagctaacaagctatataatttacacactctatacacatacatataattattaaagcgacattatgtctggataggaatggtactaacacaattcttcgccatagtcgacgttgcaaattaactcatggtagtccctggatgtaatagaaaacttgacatgatgctattccgtgatttgattgctgttgctataattgagcatgatctccctttctcatttgttgaatatagaaggattagggaagcttttgcatatgctaattctagtattgaagagtggagtagaaatattgcagctgctgatgttcttaaaatatttgagagggagaaaactaagcttagaaagattttgagtgaaattccgggtaaaatctatttgactactgatttgtggatggcactcacagtggagggttatttatgcttaactgctcactacatagatgagaactgaaatttaaaagcaaattagtatcattttgtgcttttcctccacctcatacgagataagtgaaagtttgtttttaggtgtttcaactcgcctttgccttgtcttgtagatctagtcacttgagcgagtttgttctctgtctgaaatcattttcggttttgtactaacttattgatagtttagtttgtcaaatttatgattatgattgaagttgtttatcatttgctgagttttgtttagctcgtgggattgacgtgagggggtaggggtagctatatttctgggagcgaactccatgtgaatatgaagcgcctggatacaagttatgacttggtctgatgctttggtttgattagtagctagatgtgccaattttgttgtttcattctctttgaagtttgcttctttggatagtataatagttagatttgacttgaacagtcactgtcactgagaagtcattttgataacccctacttaactgatcatgaacaaagcaatactattgccaacacaagtgacgtggaactaattttaatctgtgtaccaagtaaaattattttctgttattgaaagcatcctctattggccacacatacaatctacctttgtagaaaccatgcaaaggtgtgtaatcctgaggtatgaaaggcgagggctccgtgttcaggcctgagcaaaatattcgttcgatccgtttcgactcgctattcgatttgatttgattcaaaaaatccgaatatccataagattttggagcaaagcaaataggaaaatgtagtattcgtaaaaatcgaagcaaataacaaatactattttttttaaagtcggatattcgcttcgatccgtatatatatcataatataggttgtggatttgtatatgttgggatttgggcttgtatttgtatcctttgggcatgtgtttttttttgtgacacagtttttattagataagtggaattttttaaaataaaattgtttcatattttatattttatcctaaaattgtcgttttagtttccaatccatcaaatataagagcgacgtttctgtttcctttcttcgacctttcactatttttatcactcaatttggttacataatttataaccagaaaatttccagttgctctcaatctcacactcgtaagccataaggtaagaaatttgaaatcatgttaaataatttttaaaaaaaaaatttggatgtagcaaagcaaagcggatatccggcaaatatcacacaaaaatccggatattcgtatttctggatattcggaaattttcggatcaaagcaaataataaaattaagtattcgattaaaacgaatcgaataacaaatatcccaaattttccggatattcgcttcgtgcccaggcctagtgttcactacgcaacattaattagccaacaagtgagatttacgtgatgtaaaaatgaaaaaatgcaccacaagtcaccttttacctaggggtctaggtttagcaatacgacatatgaaatctaaactgccataacattttttattcaactttaacctgaaaagtctcttgcaaacggctggttggatcgaatgcaagcaaagttatgtagaaagagcaaagacaatgcatatcgttgttaaatctctttaggagatcgagcttcaagtttgtcccctcgtagatcaagaaaacaagaaactaagagatatgtacaacatgtcaataaaaagcacaaagagaggagactaatttttacattttttttttcttgaatatctggaagttcaagcccaaaggccctacatcttccagaggcgggactcacaccaagttaaattcatctcctttcgagaagagatccctcctaacgtgcctcgaactcaactactccatttggaagatttatcactcggctaacagctcgttggtagtttttacacttgtaaagatgaagccccgtcttcgcataagcttgaccaaggcaagataagtatgctttttatgacacccttcgccttcacagtaggaggcttccaaggcaccagagctactgattaaaccatcaaaatcgaaacactaacaaaaaaataattatttattaatatgtaaactaaccatttctaatttaaaaaaggaactctactagtcatttccgacaaatcaaagctgtggataaattccaacacatgcatggatcaacctctaaacaatcagaagatgaaagaaacagaattacatctgatccctctccactcgacgcttgccgcagttctccatatcatcatccatgggaatcgtcatatcctcctcctcgtcaaggttgttccaaatttcgacagaaaccagctgacgatgcattttcgatcgacttttgttttttttacaggccatgccatctgtgctcatgatttcatctgtttgggtgggcttaagttgggctttctcaacccaaatctcgtttacaaatatttttaacgaaacgacgccgtatttcgagttaatcgacatacgtcgtcgttttcactctttatatttcgttcacaaatattttcaaataaatattatttttagagacgagaggagacggcgacaatggcgaatttgatgatgagattaccaattagcttgagaagcttctctgtttcagcttcttcatccaacggtaacgctcttaagctctaatacttgcacagtaatctgaaatttaagcttgaaattgaagctgagtctctgcgattgatttttgatttcaaggttcgccgccggtgatcggaggatctagcggcggtgtaggaccgatgattgtggaattaccgttggagaagatacgaagaccgttgatgcgaaccagatccaacgatcagaacaaagtgaaagagcttatggatagtatccgtcaaatcggtcttcaagttccggttaagcaactcggttattcaattctgatttcaaatttcttcggttcataattctaattttgtgttttgtttttgaacagattgatgtgattgaagttgatggaacttactatggtacttttcttgttctttgtgatatctgttctttgaaagcttataaatgataaattcttccattggtttagggttctcgggatgtcacagatacgaggcgcatcagaagctagggcttccaactatacgttgcaaaatccgtaaaggaacaaaggaaacattaaggtatgtatgtgtttctttaaagaatgaaaattttggattggagactttagatttgctttatattgaaggttctttggtttctcacaggcatcatcttcgctgaagagagtttatacttttatgtatattgtttgtatgataggaactcgagagtgtgtgtatgaaagtggctatgtttaagttaataattagaactttgtacaatctttgtgacagatctagtgactggattctacgatctatttgcacactaataagtagctgaaacaatggttcaaagaatttgatcataaattggacttgtgatggtcgagatgatgagtataaagaagctgtgttccttatagcttgattgattactttgaagatctaagcagcgttccggtggcgttttgtatgaacattattcttctgttatcggttaagctttgtggagagggttctttgggccaagaatctatctatcctctttacagaacactaatgagtcatgttccgcatatgttggacgcaatagaaagaagtgggctgctgattgcgtccatgcctaagggaggttagaagctctggagtggtatgtgattacttcttcatttctttagtaattcttctttggccgattgataccagcaagagaaagagggaaatgctataagaaccatgtaacgctaagagagaaacatctttctgattagtataggtgacgcatgacctcgaggcgaggtttacttcggtaactcgaagggaactcgtatatttggatgttctttttattagtctgcattcaatatcgaagatacgatcgagttaccaagtaaattaagaagcagaactaatagcaaaatttacaaacgcttgcaattgtacaacaaattgcaatcatattatggaattttaacctctcatgaacacaaactttcaaccactttaagcacaaaacactgagcttataagaagtgcagagacagagtatataacgcgatgaagatgatgcaaaagatagagaagtaatgaatgcagagcataaacgaggaaaccacacactaaaggtttaacgagttacgacatattgtatgtttttaacttgaaacacaatctttgtttgactcatcaagttttcatcttccatattttattatggttgttttttcattttaatagagtttgagtttaaaatttgcaactagcatttaattaaaagggtaaaaaacattgtgtttgtttctaactaccaactttgaaataacaataaaataatataaaatgctaggtggcaatgctgattgatggacacaaataatcaagtcattgatttggtttggttaacgaatcttattcacaaactaattgtcaaaccaagaaaagacgagtggggattattttgttcgtcacacttaataaagtctaattatcttttcttattccaatcatgggagacattaaaacataatcacgtttctatggacccaattattaaataatttacgtcaattataacaacaaaaacaaggaaaacatttaatggagttatcatgcatagactcgtagcgttattatacttgtttcttgtttttgtagttattatgaagacaattgtgatgtacataattatattatgaagagatatatcaactaattagtaatgccttcgtttaaaagttaaaattaacagttcttagttgagtactttaatgtggttttttactttgtaaggaaaaaatgtatgaagcaaaatatatctacgtacaactggaaatgattcaatttatgagtaaaacacaaaacaaaagacactagagatgacaagagacaacacactactcaagacaactccatcttccaacaaatcttgtcatgccaacgtctatttattactacttgtaagcacatcgattcattaatacacttatttttgtttcttgtcactccaatttatacacttatatactagtataattgtatccgaacatgggaagttttgtgattgattagaagaatgtggtgtttttatgcgtggaaatatgattgttttcataagtaaaataatatatcaattttcttctggtattgatccggagactggcacatatatgtctaaaaaatctatttcgaacgttttattacgagtgttcgcgcatgaaatcgaagttttcacatagtaatttacaaatatgtataagtgtttttgtgtatgcatgcatgtatgtgtgaacatgttggatggatagtgagggctgaggacaaaaagaaagaggagatgcaataagacagaagacgcgtgcaatgaagatttcggatttgttcgtatccttttcagttgtctcagccattaattcctaaaaccctatcttctcttcttcatccatctttttcgtttctagaaaaatatcttaatatagttacgtaaatatttagtggtggtatgtataattatggcccgcttattcaattgaggcaaataaccatttgaagatcgaaactctattatgtatttcttttaacgaaggagaaatatgaatagacaaaaacaaaagtttacaatggtagattttagtaggtgtgccaactattaatttccttctatgattgaagttgtaggttaaaatagataactaatgccattctattcatgtaaacatatggtgttaaactgttaaccatttaaccgttaatttataccatctactgctaaaaatttagaaacaattgtaccatatcatatgtcaactaaactattttcattatttatgccatttggaacacttgattgttaataaagaatttcaatataaactatttaaactaatatatcatagaaagacgacaaaaaaatactcgacatatttgttattctcttaataaggatttaatttagctaaaaatgaaaaaaattgagtgtcaaaaacattaataatacttgaatgaaactgtccaaacacatattctcctaaattcccaaggaaaatatcttacattgatagattatttatataattaagaaatattaatatatagattaaccgatatttttaaactataacaaaatatcatgatcccaactgtattatattgacattttatcgtataccaaaattaaatacacatgttgacaaaaaaatagaaacaaaaaatacacaattgtggtccatttatccaaacaaggatctgtgtaacgtgtattattataatttcttatttaaatagttattcaaagttgctgttggtgataattttttgttatatacatatgtgtgtgtgtgtgagaaagagaagaatctcgattaagattatcaagctgagcatttttcctgtctcttttcttcttgttaatgtttgctctctcctaaaaactcaaatcttgaaaaaagcttcacaaggaggcatttctcttctcattctttttcaattatctatgttggtttttagaagctgaagctgccagcatgatctggtaatcgctacatacgacatacacacatcactaaacttctttataatttatgcacacacatacagctcttaatggccacaactcaaagttataattagtgcatgatctctagttatttgactgcttttaatatatgtttatggattcacgcatgtgtgtgtatgtacataatttacatgcatgcactttgtgtatggtacacatcaatttgaacccgttcaaaattctgtttttattagtatatatatagatgtatgtggtgtgtgtgtcagtgtgtgtgtgtgtttatagatagtagtactaggtcatcctgcagcttcagtcactaaatcaccaacaatgcaaaaaagatataaacacttcatttcatgagaaaggcgtttccgccttaacttttacgatccctctatcaccattggagaggtaacgatacatttacttgtcattttcttaattttacttcctatagtaaatccaatccaattatgtgttattttcaaagtatcacatcttcattctccgaaatatacgcatatatgtcttagttactgtgtataatcaatatgtccacaagttcatgtttgttggtagctagcgacgcgtttacatgtgcctatgtgtttctttctcttgacctattatacttagatctattattaaataaacatatatcttgtgacaaagaaaaaaaagaagcgtattagtttagtgacaagacccatgatattaacaacaatttatcttatattggagacttaggaaatatttcaataaaatatatataagttattaatgaacttaaatacaattggcttgttacacatcactctaatccatgtgatagatgttctacaaaatatacgtttttattttaacatggaatcttatgattgctttattgtacatacaatgagagctaatagatcaaacttgtttgaatgtaaataatttggaatcttttttgtggggatatagagttgggttttataatctcctcgagttagaaacaagcattattggttttagatacatctaagattaatcttgcatactattgccatttttttggctgattgttactcatatatagttcgaccagagaaaaatcaacgtctacacttttcatgtacaactgactacggctcaagccttctctaatatagattgtgccatatgcaaatgtaaccaatcatcgacattgagattctctgctttgatcagcaacttctgtttgttttaaagattcttaattgaaggattcataatggaatttttttttaagatcgtgaagattatacttccttatagtttggttttaaagatgtaaaatttatttcatatggtttctgatgtcttttgatcatttgtaagtatattagttgtttgtgcaaacaatattactagttccatgcatcgatacatatttgattaagaacattcgccaaatggtcaatacaatggggtatcagatcaaagatacaaaccaaattaagacccttggaatctgtaacaaatatggtgctggagatagatatcacaattcataataattaattataggatttataatcaccattttaatattgatgtatcaattaatggaaacaattgcacggacctacttgcagtatatgcaaaatgaaattggtttgagctatgttttggtattaacttgctttgtaacgtttgaatctttttttctaaatatattcacattttaatataacattgtacaattacagatgtatgagaactataatatctaaacaaagccatgattaatgacaaataataaattttcgaaagtgaatatattattatagaacttaattatttatttaaaaagtaaaaactaatcataactcatgaagtaaaaaaatagttggtctagccaattgcaaagtagtcacatataaccacttcggttaagacattggcaaagatcaaaaagtcacaaacatacttttttctctggttgactaaatcgtcgaaccaccacatgtaattaatttgacttaaactaacaattaaaaagtaaaaataaaaagaatagtggtattttactgatgggaggacatttttccaacgattattttgtttcacgagaaaatgactatgtacgaaatcttcatatatgtgagaaatcggttttagtcaactcacgacttgggccagatttggaagtttaattctttagaacattttcaacgggagttctcttgaataattagatggattctcttgaattagtagaataaaaataaatataaacggattaaaaaacagagaactagctctctcaaaagagtttcgacttttgagtaagtgatagaaccggacatgtgtcaaatagataaaataatacatgacgtaaaaaacaaaaacaaaaaatgtattaggaaaatagttaccttacttttaatttacttatctatatgtcgtgatttctggttggttgccttcagagacgaggacatgagaaatgagacctctgtaaatactgctactagtttgtataaaaccaaaacactaaagattgtagcatcaagttgtattgtaagcgtcactctgaatttgttattgtaaagaaaacattctacgcagacaatatcagatcaaataacatcattgtctaagcaaatcacttatttttattttttttaattggaaattaagaatcatctcttttaattttagtgtctcaaattttaaactacattttctaccggttgtcattatttcttatgttttgcatatatttttcttatgttttgctcatttatgtatattttgctagttgaattttttgttcaaaatttccagtatttataacatattcaattttaaatttagcattaattttttaataaatttaatttgatattttgaatttgtttaattattttgtttttatataatgatataatgtgtgttaaaaaagtgggtttgactctattaacaaagagataaatatgggcttacaaaacaaaagcccaaacccaactagtgagttacatcgtgagatgagacggattcacaccggaaaaatcagagagattccgatgaaatcttgcgatcggttggaggaagcgttgttgcagtgccaccgtcggatgccggaaggaccggcaaggagatccggttgcagacatttgaacaaggcgtttgcggagtgcgtggtggcggaggcttgtccggaggaatcagaggcggtgaggtctctttgctctagcggcggaacaagccttaagcgtaaacagtgcgaatacgctcagctttcactttctctctgtctctctcgccatcagcgagagtttgagcagcgttagatacggtggttttgttgttgttgtcggcgaaaggttattttggatcttgtgagctacgtaattggtaaaattagggttttaaaattctgattcttttttctgcatctgttggagatagtaaggatggatatttctgggaatttgaatatgttcatcatcaaatggcagaagaatgatttaaggaaggttgtgaatttttgttgaatctgtagtaatcctttatatggttttggtataatgaattgtgtaatcaagaatccgttattcagatttctataagctgctctgaactgaagcaggagccattgtggtggaatcatttccttttgttagctactttcaagttttggcagctgttgttggattcagaaataaggctgtttctgtttttgtgtaagatgttagattcaatgaggtttcgagtgtgatcaatcaacagcctcaggtctattggttactaccagaagttttggttgtttgtctcagcttcagcatcttgacttgacgttcaatcatctgactggaacttcatctcggttcttgttctctttgccaaacattagttacttagactttgcatctaacaagctcagtgggaagctacagcataatctgacctgtggaggcaaacttggatttgtcgaataacagattaattgggacccctccccgtttcttttccattattggcagtcatgatcagcatcaagaattcgtaatcgaagaggctgaaactgagggaaaacagttccaaggaagaaagattgggattttggttgctgtccttggtggagatgtatttgttcttgtgtgtataaaccgctgctcttgctgttgttcaagagaaaggtcagtgcctcaaactcggcttaaggttgtgacagagataactcacacaccagtctctcctccgaagttcttgctagtgcaagtgagtaactttgactcaaattgtagacctccgcctggtggcaattgtctttcaggaatttaatatccttgtacgacttcgtcttgcagggttaatctctcaagcagcaaagctaggtgcacaaggtgtgccctcattccggtcattttcttttgaagagttaaaggaagccacagacgatttcgattcatcacgtttcttagctttggaattatgcaggaaaatggctaaaacagagggcgatgtgtacaactttggattcatacttctggaatctctgataggaccagtacctactacaaaaaggagaggcctatcttctcaacgaaatggtatcatatagggtaaagaaaagaagcaaatcttcatcattgttaatagctgttgctgcaatgttgtatttgcagacgtcatttgggagccaagactgtcgacagaaaataggaagtccaacggtcctaacaacaagctcgcaggagtctttacccaattgccatctcaatcgccaataaatgtgttttgcttgaaccttctgcaagacttcctttaaagatgttctctggaacttaccatatgcagctcaaatgcagtctgccgcagacgctgaacgcaaatctgataagtcgtcgtgaatccaaaggctaacctgatgattgatagttgttttcggatttataaatgttatgttttataagtttggtttttcagtagaaaaatgtaatactctagcggctaaaaaacatagtttcttgtctctcttgaaactttattcgtttaacaaatattgattgaagaagatgttgagttttgtagttggcgagaacttctcaatcttcaagaacaaggtactgaggcaggagacttgtcaaatgttcttggagaattttgtctttgaattgcagaatcgatcccaaatattttattattataaaagctacaagaatacagtttctaatacatgtattagcaaaaaagtaacagtaaaaccaagggctacacacttttcttaaacaggaactttggagtccactgatttgagaacctcctcacccatttccttgcatcccaccagtttctgcattttcaaaacacaaaaagacttctttaagtatattgtcattaacttatacaaaacaaaagacagaaatcatcatacacatacatttccgggggagtagatgtctccggttctgaaacctttgttcagagcatccacgaccgcgtcttcaatcatctttgcagccttttcttctccaagtccatacttgagaagcatcgccgcactgagaatggtggccaatgggtttgccttgtcttgtccagctatatctggtgctgaaccatgtataggttcaaagagtccaggtccctagttttcatcacaagtttaacaatcaatatatgataataataaacagaggaaccttgaaatattagatttagtcttacttaccgattcaccaagacttgcagatggaagcatcccaatgctaccagtgatcattgaagcttcatcagacaatatatcaccaaaaatgttattggtgacgattgtgtcaaactgcaataatgtttttaaaaatgccgtgagtactacaagttccacttctgtgttagcttaatcaacggctaagctttatatatgcgcgaagatcacctgtttcgggtcacggacaagctgcatcgcagcattatcgacatacatatgtgatagttcaacatctggatattcagaggctaaagctgttactcttttcctccacaatattgatgcctatacgaaacaaaacaaaaaaataattgtataacgaaaaacacacaagagtggagtggaaaaacaattcaaaacatacatccaagacattggctttgtcaacagaacacagcttgccacgccttttcctagcagtctcgaatgcaacacgagcaattctgtcaatctgaagaagataaagcaatgcattaatacacatacattgtcacagagcagcagattgtgaagagtaagtagtacctcgtgagcagcgtagatctctgtattaaaaccgacttcttcgccattttcgttgatcgtaatgcctcttggctctccaaagtaaatacctccagtgagctcccttacaatcatcatatcaacaccttgtgctacttctttcttcagtgtggaagcatcaactagctgaacaagcaaaaacagaaaaatttgagtatatttacaactagaaagcaaagtgataagcaaatcaatacctgtggtaaaactgtagcaggtctcaaattagcaaagacattgagatctcttcgaatgttaagcagacccatctcaggtctcagatgtttctcattcttgtcccatttgtacctgaacaaaaaatcatcataaagagaataaatttgctgaagaaacaacacacacacgcattacacataccctccgatagctccaagaagaatggcatcagactgtttagcagcagtggaagtttcctccggcaatggaactccgaccaaatccaaagctgctccgccgaaaggcatctcctggaaatcaaactctagtccttggagaaatccagctttctgaagcacattcttagcaacagatataacttctggaccgataccatcgccgggaagcagagtgatgttataccgttttttcaccggtgaagcggcggcgcacctaattcgatacggcgcacgaaacttatgatcggtgagagaactgtatcttcccggtatgatctccagacggatgttagtttgcaaaaacgccgccatctttttttcgagtttagggcaccaccatcggcaaaaactaaccatttgagtatactacagagaccggttatctctggttatttgttaacctgattttggttcaatgttctcattaatttcaattttaagttctatcagctttttggactctctcatgtccaccatccgttcacttggccgcgttcatataaaccaaaaaccgaacaacaacaaaaattcgaaaattctccggcgacaccaacaatgggaaggtctctaatattctctggaaacatgtcattgagaatctctcacttacccagatcatctcttccgctgcaaaacccaatttcaggccggacagtgaacagaactttccgatatcggtgtacgaggattttgtctaatagcttcaagtccacaacgagacttcaaaccaaagctgttctgtctgaggtttctgatcagacgcgatatcccagaatcggcgctaaaaccaccggaactatatctccggcacacctccttgaagtcgttgaactcgccgctaaaaccggcgctgaggttcgaaatttcatgtctgtagaatacaatatctgaatttatgtttattggaaacaaaaactcttgatgagacttgaaattgtgttcaatggtactagaatcaagttcttgggttcgtagggcacaactgcacaaggagaataataacaaaactaacttgaattgaatcatctggtttgttaggtggttatggaagctgtaaataagccaaggaatattacttataaaggtctcagtgacttagtaactgagtaaggacttcttcaccttttaaaattgttagcttgaggttttaactatgttcatgttgacttgattggttgaagctattaaagttttagtacttttgatgaatttgcagtactgataaagcaagcgaggctgctattttggaagtagtgaagaagaattttagtgatcatcttattcttggtgaagaaggaggtatcatcggcgattcgtcttctgattacctctggtgcattgatcctctaggtttagctctctttacaaatctcattgctttcttttcatgtgtttgtgtggaatctctgagatttttagtattagtctcttaattcctttatgcatagatggaactacaaattttgctcatggatatcccagttttgctgtttccgtcggtgttctgtatcgtggaaatcccgccgctgcttctgtggtaaatccaatatatacttgcacaaaccagctaatgcttgttagttcctatttgctgattctttggtcagtaggattaacaacaaaatctcatcatgcaggtagagtttgtcggtggtccgatgtgctggaacactcgaaccttttctgcaactgcaggtactatgtgacaagcttatgtttggctatatatctaaattttgtctaactagttcacttcttaggtggtggagcattgtgtaacgggcaaaaaattcatgtcagtaagaccgatgctgtaagtaacttatcaagaatccaattttaagtttcgacatggtgtgttcaatggttttggtttattagatatttattcgggtttgaatgaaggtggagagagcacttcttatcacagggtttggttatgaacatgatgatgcatggagcactaacatggaactgttcaaagagtttactgatgtgagtcggggagtgcgaagactcggtgctgctgcagttgacatgtgtcatgttgcacttgggattgcggaatcatattgggagtaccgtttaaagccatgggacatggctgctggtgttcttgtagtcttcttcatccttcttgttgtttttttcttactaaagtacttaagttgtagagcttaatccatgtcagaaaatggacacagatagttgaggaagctggaggagctgtgactcggatggacggagggaagttttctgtgtttgataggtctgttttggtctccaacggcgttcttcaccccaaggtttcatgaactgttcatacttttatcaatgcttttaatctgttgtgcttagagatcaggtctcacatattttttgtttaatcggtgtagcttctggaaagaattgcacccgcaactgagaatttgaagtcgaaaggaatcgatttctcgttatggttcaaaccggaagattatcatacagagctttaagacttgttcaagaaaggtatataagattacattgttatgatctaaagctcttatatttgaactgaaacgaggtataagatttgcgttcggattatgaaaatcaataatgatcatattcccccttacacttcttgaacaaaggcttcgtggatcaacagacctgtcttccatcgtccagtccacacctcatacagaccaaactgaagcttagtatcttggttaagcgctgtgggactaaccaagatttcaaacaggccatcggactcgtcaggtatattgacgggttctgatccacctttcagtataccaaagttctggctaacggatttgattcttttccacactgtcttgcctttcttcccgattttagcagacatgaaaacaggggctttgtcccaaccggtcgcatccggtttaaacgagattttaaaaccgattcgatatgttttcccgggttcaatcttgtcgaatgaaccggttacttctaaccaactcaccatcttcagctcagcaggcatcctaaaaccaacaatcaaatgaatcagtttaagatttttggtatcagtaaaccaaagttgggtttatcggttaagtcggaatgaatcggatgataccttggttctttagggataacccaatatctcgagtcacctccccaaacaaagttaagaccactcggttgtgaaatccatgcttttctattgttctgcagaatttaacaaggaaaatacaaaagcaagataaaacatttttaatcaaagtttggtgatttcatttaaaaagatgttgcaaattatcttcaatagcaaagaaaagaaactcacatcttgttccattttggagtctgccttatgatgcgaactcttttgtgaagacatttcttgatttgccttttttacagtagagaaataacaaaaccatatctctcgaaatgagctttatgtagagtatttattttctcatgtcaaaaattcaaagtaagattgtgacagaagaaggaaaaataagtaatttacacaaaatcctgacttttctttcgttggagggacaaagttaataaaaatgcttcaacggccaacgagagggaaagcatatatccacaacttgttggtcttaatgtgaataaagaatctgagaatcaaacagagcaattaaatgacataaattttcttcaagtgccaagcttattctttccttctcttttttccattttcttttggactcataatcattttactcatttactcaagttgtatctcttttataataatctcattattcactcattgctgaaacgattagagaaagtttcaagcttttggtaaaaaaatcgtttctttctcaataattacattagggttttacactactcttttatagacattgtagaaggagctagatatggaacagtctagaatatggcagatgctgtgtagctggctatggtgagtcatcaggcaaaacgcccctcctctgtacgatcgttgctctgttttgagctggagtctattttgtcttcttctatttgactgggctgagatgggccttttgttgttgttgggccggttacttgtttgttgctcacactccccctcaaacttggagtgggtgaaccagacacaccaagtttgctcctgagatcaacaaatgctcggcgtggaagtgactttgtaaacacgtcagctaattgaaaggtagctgaaatgtgttgtgtttcgatcagaccgagtgcgacctgctccctgatgtagtgataatcggtatcaaaatgttttgaacgattgtggagagccggatttgcagataggtacactgcggagaggttatcacagtaaacttgtgtaggaagatattggggaatgccgagatctcgcagtaagaaagagatccaagtaatttctcgtgctgcataggttagagctctgtattctgcttcggtagaggaattagacactgtaggttgtcgttttgccgaccaagagatcaagttggagcctaacaagatgcagaatccagtagtagaccttctagtattcttgcagcccgcatgatcgctatcactgtaggcagaaagagtaagagtagagttcctttttattggcaaacccattccaattgtccctttgatgtaccgtagtatccgtttgagcagtccgaagtcagaggttgtaggggagtgcattctctgacaaataaaattgacagcaaactgaatgtctggacgtgtgatggtaagatactgcagttttcccgcaaggcttcgaaaataggttggttctgcaaatagctcagaattgaggttgtccaattgttgtggtagaggagttggcatggggttgcaatcactcattcctgcctgttgtaaaatgtctgtcgcataagccgtctgatgtagaaagagaccattagcataatcttcaatttgaatacccaagaaatagcgaggtggaccaagatccttcatagaaaaccgattcttgagagcttgtagaagatcttctaagagagattgatcactgccagtcaacaaaatgtcgtcaacatataacagtaaatagagtatttttccatcttgatgacacacaaataatgaggggtccgatttactgcagacaaatccataatcaagaagaaagttgctgaaagtatcaaaccatgcccgtggcgcttgtttcaaaccgtagatggctttcgtgagacgacagacatgagtgggtttctgaggatcaataaaacctgagggttggtacatgaagaccggttcttgcagctcaccgtgtaagaaggcattggagacatcaagctgcttaataggccaaccttttgatgttgagacatcaagaacaagacgaattgttgctgtccgaaccacaggactgaacgtttctagatagtccaccccttcctcttgatcgaagcccttagccactagacgagctttcagtttatcgattgagccatccgggtgaagtttggttttaaaaacccacttggagcttagaatattcatatcatcagttggaggaaccaacgaccatgtatgcaacatatggacccggttaatctcctcatgtactgcttcattccaaccaggatgcttcatagcggatgcaagggtttttggttcagcagtattcattcgagaggtgatgagagcatacctcgtgtttggcttttgaattcctgcctttgatcttgtggtcattgcatgagaattgattacttgttcttgatttgcagcaatctcttctgctactggattcacttcttcatcacttccttcattattagaggtaggttcaggatctgtcagttgttctgtaacttgagatcctgcatatgtattaagatcaatcggtttagaaaacaattggactggagctgcaggtactgaaatctcactgatcttgttatgttgccaagcttgaagaagaggtgttgagtactgagggactagagattgatacttttccttgaatggtagttcagactcattgaagataacatttcttgagatatagaccttgcctgttggagggtaaaaacagcgatatcccttatattggctgttatatccaaggaacacacattgcaaggagcgcggatcgaatttgttttgagcgagaggtctgagacaaggataacatgctgaaccaaacacacggagagatgaatagtctggcttttccccaaataacgcttcatatggactcaaattcttcaagacagaggatggtaagcgattaatgatgtaattggcagtgaagaaggattctacccaaaacttctgaggtgtatgactatgaaagagcatagacaatccaagctccacaagatgtctatgttttcgttcggccaatccgttttgctgtggggtataggggcatgagattcgatgatggatgccatgctcactgagatgtgtttttaacttgttgctcacaaactctcctcctccatcactctgaaatactttgatcttagtgtttagctggttctctaccaacttctgaaacgaaataaaaactgagagaaattctgacttgttgtgcaaaggatagaaccaagagtatcttgaataatcatcaacaaaaatagcataatatttgaggccttggttggatacaactggagaaggaccccataaatcacaatgaatccgatctagaggatgtaaaacacgagaatctgaaattaaaaatggtagtcttgaacttttccccatctggcaaggttcacaaactggagatgttctgctcttatttatctgaatcgccttgctgttttgaaggtgctggagagccttagaatttgcgtgtccaagtcggtgatgccatacttcctctgttgctgcacactgacggtttgaataaagagccacaaactcttgattctccaacacatagagcccatttctacgaggacccgtggttaccactttctgtgtttgtaaatcgattatgcaaaccttattagcatcaaagtaaacaccgcaaggatagtcatcacacaactttgacacagagagaagagatttttgtatatttggaacaaccaagacttcatttaaaggaatcttaccatttgaggatttgatagtggtagatccagtgtgagtaatcgggagataagtgccatcgccaaccaagacagcatcatccccttcgtactctgttgcagactgaagtccattggtcgatgatgttacgtgagccgtcgcagctgagtcgggatgccattccttgcctgtatcatctgagacccggagagtagaaaaagcttgtatttcagcctggtaattgttatcaaaccgattgtaacacttgagagcagtgtgaccagtgcgaccacatatctgacacaccggtcttggacctgaaacttgtggggaggattgatgttgggaaaaccctcgtccacgagttgagtagcctcctctgcctttattttgaccagaacgtcctcttcctttttgattggggttgtattgaggagatccagactcagatctttcaatgttgaaggcaaggtgaggagtaacagatgccgcttcttcatatgattgtagcttactgtcaaagccttgaacttctgagacaacatcattgaaagttggagtcggaagcttgctgagagagctttgaatcaccgtggtgatggggtcatagtcacgaccaagaccgttaagaaaaccaaaaattttcattgattcatcgactggcttgccaatggagctgagagcgtcgcagatggtcttgaactctcggcagtagacagagaaaggcttttcctttttggagagaagctggagattctgacgaagtgagaactcacgagcaacactgcttttgttgaagttttcagctagagacacccaaatttgacgagaggtgcttagattgtgaacatgaccaaggacttcttcagacaacgtgccaaagagccatgaccgaactaactgatcggtacagaaccaagattcatacagaggattgggttcctcggaggtgacttcgccattgacgacaaggcgagactgagatggtgcattgacggcgccattaacaaaacctatgagtttttgactcgataggagagactcgaattgagttttccacaagaggtagttactgtctgtgagtttgagagtaacagaacttgtaacatgaacattatctggaaaagggtatgaggtcgccatttgaaatacctgttaaggctacaaaggctctgataccatgaaacgattagagaaagtttcaagcttttggtaaaaaaatcgtttctttctcaataattacattagggttttacactactcttttatagacattgtagaaggaggtagatatggaacagtctagaatatggcagatgctgtgtagctggctatggtgagtcatcaggcaaaacgcccctcctctgtacgatcgttgctctgttttgagctggagtctattttgtcttcttctatttgactgggctgagatgggccttttgttgttgttgggccggttacttgtttgttgctcacaattgccattttcttatttacaaacaatgtaactagggtgtatgtcgtttatatttgtcttagttatttgtttttgatttgcaaatctctaaattctatcaatctgttttttttttcttctaattttcaatattttttctatgagtaaattattatatcaactgtttctaaaaattatctaatcatggtatgtcttagttatttgcttttagattgaattacatattaattagataacaaaaatggtatcgaacttccaccattggttcaaaaagaaggtaccactacaaaaaaattaatatgcttaacataatttacttattaagttagccctttttaaaagtgaaattctaattatataattgcttgtaaaattaagggttttgtgcaaaaaaaactaaaagttgttcttttttgtaactttacccttcacgtcaaaaaaatgtaaaattatcatatgaaatctaaaataatatacaatatagcttttctaattgttaatttttaaaattttgataaataatatatgtacattatgtgattatgaaaacgtttatagtatatgtaaagttaagaaaaatgggttatatattattgcatattattttggatttcatatatttattttgtattttttagacgtagaaggtaaaattacaaaaatagaagagtttgagagggtttttttttacacacccctatatataataacactagatattgaccctcggtacaccgcgggttgattatttgcgttagaaattaaattattatttttatttaatattatccatatttaatatcaagttatattttgaattcatcattttacattttatatctatttacttttgatgttatattagtatttgtttggtttgatgttgtttagtttagaaaaatctttttattatacacatcatttatatagagtgtgtattttatggtacgtaattatgtgtttgttatataatacttttttttgttaaaagtaaaagtattataactacctaaaatgtatatgtagatatggatatgacccgcggtacactgcgagttaatttttttatgacaaaatttaagttgtaattgttttattaatattgtttgtttgtttttcttaaattgtattttgattgttagttctagaatttcacccactgtataccgtctatattaatatagaccaaaacccgtcctaccgtataacaattttccgtataattgtataatttttttttttttttttttaattatattcctgtataattatattttgattgtttattttaggatttcacccatgttatacatcttgtattaatatcgaccaacccgtgctaccatataatatgtcccgtcaaattgaacaccatattttttttttttttttttttgaagattagctgaagatataacatattaatttggttttttttttgaagattagctgaagatataacatattaatttgtcttatttaaatatagatatatatctatgtattatttagtgtatgattagtattgtttaggtttcaatatttaaaatttagatacgaaacatacagttcattaagtaacgatgtagcagattttaaaaattgattttttttggttttaggattttagtatgaaaatattaaaagtatataggaaatggtatgtacgtgaaataaagaattatttgttttttttttgttccatatatactaaatattattaaaaatctgtataatatcttgtatttaaaatttaaaatctaaataattagtgcattattctagctgagattgatccgcaatatacgacgggctgtttcttaaaaatttttgttatttataaacttatgattttgttgtatataaaattaaccaatttattgtgtatgatttttaattcgatgtaactcttatatttaaagtatagtattatttagctttattatggctgaatatttatatgaatatgtttttgacctgatccatcaaaatcaagaggttttaacccccatggcaaatatttagtttttgtactttagattttaaaaataaaatttaatatatgattattatttttagatcaaagtaaatatagtaattttaggttctattttatagtcaaagttctaaaccattcacgtttgtttaactattattttatttttttcaacgaaaaaactttattgaataaagattattaggtccgatcataatacaacatatcataaatctaaatcaaaggactcaaacaatccgagaaaaacatagaatctatctaacctttttctgccaacaaatgagctaactgattacacgatattttagtaaaagagaaaaagatatttctaaacttggttgcccaaaagtgaatatttttgcgtaaggcttcggtaatgaagtccaccgtaagaaccttgatgatgttgatgagcgcttcagagtctctatttttgataaattgatgtatagcagtcagaccacacttgatgcattgacattagtagagctttagcttcagcttccggtggggtacgtacggctccccatctttttgcttcaccttgacatgtatatttaattttttacttacataaacttctttacaaaataaaaaaaaacagaaccgcaaatacaacaaaattaaacacacgtatatatacacacaaacgttcatatatgaatatctaaatagtttggaacaataatacacaggtcgttaccaaaaagaaaaaagaaatacacaattctcaagtattgtgttctttaatacagaaatcaacatcaatacattgacatcacattcataaagaagggtaatacgtacaaaaaaataaaaaaaaaataaaaagaatgcccatgatgtgtgtgtttgataatgtgatgggagataaacatatgtagtatatataggcttggaatgattaggtcaatattttggtgagcaagcaaaattaatttgcgatcttaactaaaatggaatcaaatatacgtaattagaatattttaggtatatgctataaatgcgatttgtcataataattaaaattttctataaaatcttatgtataaatattttgtagtgtatagcaattagttatgtcgagatattttagaaagatttttccgagaatattggcaaagatttgggaaataatttgatgtggtaagattatgatattgtgaggcactaatattccttaaaatcaagtatatgcttattttaaataaatagaaatgtagatatgagtagttgataaaaaatcaaattgttgatattctcatatatttcgaaatgaatgtatattattgataatagtggaaagttttaatggcaattgtttagcgttaatcgttttgtattatacatttttggatttactaatcaaaccggaattattgttgtaattgataacaaaagaataaattttggtaagatttcattagcatttaaaactataatgatttccgaatctaagtaattatagatatggttagttaggatttagtatcaaatttagtaattaggaattaatgatttgcgaattacgtagagtttatagggattgatttgtgcaatttattagggtaataattaacaatatctatgtttaggcaagtagttagtgcaatatcataatagttaaacaaaagtttggtcattgtcctaaataaaatatcttgtttgattgattttatagggactaaacatacaatatcaaaattgaaaaagaatttttctacacaaatcgttccaaaaatgtatatgtagattcttaatataaacaacaattattcacttggccctaattaaaccatcagcccattaagcctcttattaccaaaacccttcaaacccaacttctttccttcttgttgactttccttcttactctgtcgttgactctctttgcgacttcttcttctcttttcttcatcttcttctccctgattcctttttcttttgttgcaggactaaaatcccaacacctccctcctgagttctttgattaaatccccaatttcaattttagggttttgattcccattgtttcttttgatttatcttcattccggaaattgctccggtgaaacagcagccaccgccacatctttctccttctccggcaagcaacttcattccggattttcgtctgagacttcattcttgtctccctcttcgaccaaactgacacttattccgacaaaaccctctgattagaccgtcggaatggaatcacgggttttgttctctagtcaattcaacttcccggtgaattcaccgtttaagacccgtgaaacctcgattgctccgctcacaccttcccggaatgttctctccttctctttccgtagtcccgcagagagatgtgcgatgaggattgtaccgcttgtaaaagctgcttcgtctactccacagatagtagcggaggtcgatggttcgtctcacgaaccaagaaggaagaagcttgctgtgtttgtgtcgggaggtggttcaaatttcaggaagattcatgagggatgcagtgatggttctgttaatggtgatgttgttttgttggtcactaacaaaaaaggtatcacctttcttcttcttcttcttcaagttatttgattttggtcttctaagttgcaattatagtttctatgttgtggttcttagagttaatgaatcagaaaagaactgctaatatatgattgattagttagtggaatttgaatagcttacttgcttaatttcatcaatttagattgtggaggtgctgagtatgcaagaagtaatggaattcctgttttagtattcccaaaagcgaaacgagaaccatctgatggactctctccttcagaacttgtagatgtactaaggttagcatatctcttggaagtctttatttgtatctttacccttggaagtgaatgtgtttacctctttgttgaaagttcactatatgtctctcaacttgatgaacaggaaatatggtgtagactttgttcttttagctggatatttgaaacttataccggtcgagctggtccaagcttttcctaaacggattctaaatattcatcctgctcttcttccggctttcggaggcaaaggtctttatggtataaaagtgcataaagctgttctagaatcgggagctaggtaaagtttcaagctcatataatgttatggatgtgtagtgtagtttcttttttcccttttcttgtgcaagaaaacattcaacggtttttctttccgtagatattcgggtccgacaattcacttcgtcaatgaggagtacgatacaggtcggatacttgctcaaagtgcagtccgtgtgattgctaatgatacaccagaagaattggccaaaagggttcttcatgaggtactactaaagaatatctttgaacattacatttcactgttcagaagatttcattttcttcttttcttttttccatcttggactcaggaacacaaactgtatgtcgaggtggtgggtgcgatttgcgaagagcggattaaatggagagaagacggtgtccctctcattcaaaacaaacaaaaccctgacgagtactattagattctcaacaaatgaagttattcattggatgttagattagtcacattttcaaaacaaagtgtttcaacataggttatgtagaagaagtttttttgcccgaagtatagattgagacatgtttctgatactaaattttgtttcggttgggtcagaatcatatggaaggagatgaaattcgagtcaggagacagcattttaatgcttgtgttgtataataccaacagtctttattcaattttttcctagaatgttttattaccttgaagtttggtatcatctatagaaatcaaaatctctgaaatccaaaatacatatgctagcatgtagagtgtgctttaagacggagccccgagatagaaagcaaggcgaagaatgtcactgaagattccaccggctgtgacttgagcaccagcaccaggtccacgaacaatcagaggctgttctttgtaccgtttggttgtgaaagcgatgatgttatcagcacccgatagctgagcaaacggatgatcttttttgtaccgtttcaactcgactgttccctttttctctactgcatctacaactcctacgtatctcaagacctaaacaaagacacaacgcaacaaaatctgaaatgagttcttttcaagacggcgcatttggtgttaaaaaagttttgccaaggaggtattacttacttctcctgctgcttcagcctcttctctttgtttggataattcttcatcaaactgaggaagcttctccatgaactcttctgctgatgcacaagcctgtgaataagaaatgtcaaaaggattaaccttattgttgatgaatttaattgtgtgattatacagagtcttacttgtaacggctttggcacaagattctggactggaaggccctcaagatccaattttaagcctgattctctggcaaggattgttacctgcagaagtagcagatacgagaaggttcaatatttttttacaaggtgcattggctcgatttgttgacaggaaaaaaaccttacttttctggcaacatctgttccagatagatcatctcgtggatctggttctgtgaaacctgcttgctttgcttctgctacaacttcactgaagcttctggtgccgacaaagttgttgaagaggtaacttaaagtaccactgcagagaggcatcaaagcaaattttagtgtgaaggtgcaaagcaaggccattgttgtgttatctgaaaaaattactgtggtaccaagacgaagaggagatacctgaaaattccctcaattcgcagtattttatcccctgtttcgaggagaccacgtaaggtgctaataattggaagaccagctccaacggtggcttcataaaagtaatgtgtgtacgattttcgttgaagatctctgatctttagatactgcatttacaggagtgttaccaattagtctctctgttcataaaatcacagaatcttaatggatatatatcaagatgaacatatatgtagctcccgatccaacagtcatttaaacaaatatcaaacactttacctgatcaagtggtccagagttagcctttttgttcggagtgaccacatgaattcctcgtagcaaccagtcgtagtaacagctagcgatgtcagcatcggctgtacaatcaaccataacagagtttgggatgaaatgatttcccttcacatattgggtgaacttctccatgtcagctttttctccctcttctttcataagctctctccatcttgataagtcaatccccctaaaaagatgacgattgtgtaaagattacagcagtagaaacttcaccaaaaaggtaatgtatcaggttcgttggcttacgattcactcatcaacattttacttgagcccgtgatccctataacacgcaagtcaattttaaattcttctttgagcactgccgcctgtgaaaggaaatttaaagatgatgcagcttgaacattgatccatattttactataatctcgcatataagtatcacatactcacctgatctctaatctgatcaagtaaggttccaccaattaatcccggtcctatgattcccactgccaaagtggttctcgaaaggtaaaatcttgagtgcacagctcttaatgccctgatgcagtcttcacgcttgacgactactgtaatattgaactcggagcaaccttgggctatagcacggatgttgatattggcctgcagttatttaggtatggcaaatggcaatgtatcagcagagcttctaagcagaaaaaaggatatgaaatgtatgatgaaccgtcatctgattttctttgcaaacactacacttaacttacctttgctaatgcattaaaaaaagtggcagaaacaccaggagtgctcgccattttctggccaactgctgctaatatgctacaattagggatgatttcaatctgaatgaaaacaatgaaaccatagtttgagaaaaatagtagatgccaaaataatagtccagttgatttgctaagagaatagctatttgatatctttcgaagaacaaagagagatataaaggcacctgggaaaggcggccaccagccaaagcttgacgaaatcttgagttcaatgcttcagaaacagctttcacttccttctcaggtacagcaaagcacacagaatgctcgctactagcctgcattttatgtaattatattaagaagttacatttgacaagggaatacataactgatgaaagaaattataaagctgaactaaataacctgcgatatcataatcacattggctccaacttccttgacagcagaaaaaatggcactggcagtaccaggaacaccagccattccagttctataaagaatatgcaaagtttgtataagaaatacaataagcagccgagtgtgtaatacaatatccactatcagctcacccttctacattgacaagagccaaattgtcaatcgtcgcaaatcctttcacaggagcgtctaatttgaatccatcttcatcatcaatctgccggcatatcattgttccaggggcagagaggttgaaaatattccttattacaattggaatgtcatatttcatcactggaataatggtccgaggatgtaaaacgtttgccccaaagtaagactgcgcaggcatatgaacatgaatgttaggtgtaaacaacgattctggaaaactaggcattaaacaagtgcaagaggttggaaatttaccatttcccaagcctcttgataagaaagagtcttcagcacaacagcttcactaactgcaccgcacaaattcattagcataacacagacaaacatgatgaggaacacacacatatcatggctcaataactagtcctagctatatggcagttaatgtaggcttgcacatacctttcctgggatctgcactgtacacaccatcaacatctgtccagattgtgagttggtgagatctaaacagagcactcattatagctgcagagaagtcactcccatcccttttaagagtcgttggaatgttctgtggtgtactggctatgaaaccagttgctataataatctttgccgagttctgagtaaaccatttttccagtcttttttctgattccacaaagtcagggtcaacttgattagagctcgttggaataacaacaagcacatcccttgcatccatccaagtgcagtccaatccgctctaaaagaaaaatagacacaggcatataagaaaggtaaaccacagaacaactagttctttgtaattaggattttctcgcagaacatcatatatgactttaatacctttctcacaacagcagctaacatctgagcagaccacaactctccgtggccaacaacgaagtctgagaaagattcggttgcatgaccagctgcagaaatagaagagtgagatttcagaagaacacatacaaatccaattcaattacttaataacctcctcctaacaatatgcattgagaattgacaaaggcaaaaaatcagtacctatgtaaatggcacgaagcattgctttgagattatttatatcatcatttaaccgagccaagaaacttgagagttcatctccatcaagcaagtcaacagcagttgctcggtgcttttcaagaacaccactcaaagcagacagatatgaatcatcacgagactctgctctgtgaatgagatcatacatcatatcagtgactttcgacattgctgacacaaccaccaacttcctctcagagtcatccttaacaacaacagcagcaacatcctttatcctctcagaatttcccacacaagttcctccaaatttgtgtacagcccatgaatctcctttgggaagatgaccattctccacagaattatccaacgctaaatctattcaaatgcaaatcaccattagcacaataatcaccaatttttcccagataacaagcaaaatcaacgtctacatttcaaacctgtgacggaacctaagacacgaggactttgcaattcgcttcttacgcattgacctatacaactccggcgcctcaatttcccgaaagaaacacgattcgacactagtcgtttcccataaatgaacggaacacgaaccgctaaatctccggccaccgccggagaagtaacaaccttagccagagaaaccaccggcatattctgtagcaatttgatttctatagtcaaaaccagtggattactcacttcataacaacgacttattgcaaaagaaaatgaagaacaaaatcataccgtaactcagtcaaacactaccggagattttcaacacgagaattatctaccggagaagaagacaccactgagatcggagaaccaacaaaatcgaaaacagtggcaatttcagtaaattttactaagaaggaaggcgacttgtttttgttatatatatatgaaacatagtggaggtaatgaaacagtgtacctcaaacctcgatggttgccacgtgtaagttttgttttacttctctaatgaatggacggttgagattcatttagatcttaatgaaaaataatgttaagaaaaagactgcatacatgtgtctatacaagccacactagagtcaagttgcttaaaaagcttttttcatataaatactgaatacatgaaatttggtgaaaagaataacaacatgacattttagtttttctaacattttttaatccaccaacctatagtttgcattattttgagaaaataaaaatgaaacaaacaattacatacatagctttccccaattctttgagatataactcatccaatgagttctcattctagtttccaaaagaaccacacttcacccacaagcattatattcatgaacaaacctctatttgtgagacgaatccgttgtttacttcatcacttgtacgatggttcaatggactaaccaagttaacattgagtaaagtcgaacaggttcaaccatttttctatttcaatttttaaaataatcccatagaaagaaataaagtaaatccttagagtaatggctttataaaataaacaattggagcaccgaaactatcagagaagcagctcgtgcggtagattccaattggccaatcacacatatactcaagcctcgcgggttcgaatccatcttaaacctcgcgattttgtttttttccacgtcatcagaatagactaaaacggccactcgccggcacagtaagtgtatccttctctaattttcttcttaacctcaagatcacggccagattcgccattgttattgtcccgcgaccgctccaatctcgtatcaccaccactactccaatctcgttgttccatcttgaatctcactttatctctcattaccggtaatcttcctccgcttttagatttcaaactctccggcaaaatttcacggcgaataacggaatcagagttttcccacaagtgatcagatctattatcctttgaacaacgatcggagcagagactagagtcaggaaaaggcggaagccaagctggaactgacgtcacatccaccgatcgagtcaccgccacgtgatccaaatctcctccgaacgatccgtctctttcccgtctcggtaacggtttagcgaaaggaatctcaggagcgtaggtaacgaaatcggagaggttacggagaacagcggatttgatcaggcactgagattcaatatcgtgaaccgtagagccaccggggaaacaatcggaagtagataaagcgatatcttggagaccattgacgatgtcgaagagattaacctccgtgcgattagcggtgttagagaacgacgatgcgagttcggcgagggattgtaagaatttggtggtggttagggttagagtgttgagagcggaggcatcggtggctttgtatccaatagattggcagatttggctgacggcgattttggtgagagagaaggagaactctgccgtggatgtcggtgattggtcggaggtttcttcgaatttaagtttggagttacggcgtcgtcgcttcattggtggtggagagattttgagaggatcgagaaagagagaaggaggcgaattggagtttatgaattttttaaagaaccctaaattttgtgaagtatcgaaccggcgttgcattggttatcagtgatttttaatcagcactacaagccacgaagccaggatcttattccatcctaaatattaatctaaacaaagtatataattgaagggaaaaaataaactgttaaccgatacggatcgaccggtttgagcccatcgaaccgcgagtgagacccttgaccggtcatgtttatcatgaaaaacataagtttgaacatatgaattcttaaaaccagtgaaaaccggcgaaccggtaaaaaccatcccttacgaaattattgatttttcaagtttttaaattttgttaagatcacatatcgaattc

SEQ ID NO: 69 - DNA, 87618 bp, Arabidopsis thaliana
aagcttctggtgccgacaaagttgttgaagaggtaacttaaagtaccactgcagagaggcatcaaagcaaattttagtgtgaaggtgcaaagcaaggccattgttgtgttatctgaaaaaattactgtggtaccaagacgaagaggagatacctgaaaattccctcaattcgcagtattttatcccctgtttcgaggagaccacgtaaggtgctaataattggaagaccagctccaacggtggcttcataaaagtaatgtgtgtacgattttcgttgaagatctctgatctttagatactgcatttacaggagtgttaccaattagtctctctgttcataaaatcacagaatcttaatggatatatatcaagatgaacatatatgtagctcccgatccaacagtcatttaaacaaatatcaaacactttacctgatcaagtggtccagagttagcctttttgttcggagtgaccacatgaattcctcgtagcaaccagtcgtagtaacagctagcgatgtcagcatcggctgtacaatcaaccataacagagtttgggatgaaatgatttcccttcacatattgggtgaacttctccatgtcagctttttctccctcttctttcataagctctctccatcttgataagtcaatccccctaaaaagatgacgattgtgtaaagattacagcagtagaaacttcaccaaaaaggtaatgtatcaggttcgttggcttacgattcactcatcaacattttacttgagcccgtgatccctataacacgcaagtcaattttaaattcttctttgagcactgccgcctgtgaaaggaaatttaaagatgatgcagcttgaacattgatccatattttactataatctcgcatataagtatcacatactcacctgatctctaatctgatcaagtaaggttccaccaattaatcccggtcctatgattcccactgccaaagtggttctcgaaaggtaaaatcttgagtgcacagctcttaatgccctgatgcagtcttcacgcttgacgactactgtaatattgaactcggagcaaccttgggctatagcacggatgttgatattggcctgcagttatttaggtatggcaaatggcaatgtatcagcagagcttctaagcagaaaaaaggatatgaaatgtatgatgaaccgtcatctgattttctttgcaaacactacacttaacttacctttgctaatgcattaaaaaaagtggcagaaacaccaggagtgctcgccattttctggccaactgctgctaatatgctacaattagggatgatttcaatctgaatgaaaacaatgaaaccatagtttgagaaaaatagtagatgccaaaataatagtccagttgatttgctaagagaatagctatttgatatctttcgaagaacaaagagagatataaaggcacctgggaaaggcggccaccagccaaagcttgacgaaatcttgagttcaatgcttcagaaacagctttcacttccttctcaggtacagcaaagcacacagaatgctcgctactagcctgcattttatgtaattatattaagaagttacatttgacaagggaatacataactgatgaaagaaattataaagctgaactaaataacctgcgatatcataatcacattggctccaacttccttgacagcagaaaaaatggcactggcagtaccaggaacaccagccattccagttctataaagaatatgcaaagtttgtataagaaatacaataagcagccgagtgtgtaatacaatatccactatcagctcacccttctacattgacaagagccaaattgtcaatcgtcgcaaatcctttcacaggagcgtctaatttgaatccatcttcatcatcaatctgccggcatatcattgttccaggggcagagaggttgaaaatattccttattacaattggaatgtcatatttcatcactggaataatggtccgaggatgtaaaacgtttgccccaaagtaagactgcgcaggcatatgaacatgaatgttaggtgtaaacaacgattctggaaaactaggcattaaacaagtgcaagaggttggaaatttaccatttcccaagcctcttgataagaaagagtcttcagcacaacagcttcactaactgcaccgcacaaattcattagcataacacagacaaacatgatgaggaacacacacatatcatggctcaataactagtcctagctatatggcagttaatgtaggcttgcacatacctttcctgggatctgcactgtacacaccatcaacatctgtccagattgtgagttggtgagatctaaacagagcactcattatagctgcagagaagtcactcccatcccttttaagagtcgttggaatgttctgtggtgtactggctatgaaaccagttgctataataatctttgccgagttctgagtaaaccatttttccagtcttttttctgattccacaaagtcagggtcaacttgattagagctcgttggaataacaacaagcacatcccttgcatccatccaagtgcagtccaatccgctctaaaagaaaaatagacacaggcatataagaaaggtaaaccacagaacaactagttctttgtaattaggattttctcgcagaacatcatatatgactttaatacctttctcacaacagcagctaacatctgagcagaccacaactctccgtggccaacaacgaagtctgagaaagattcggttgcatgaccagctgcagaaatagaagagtgagatttcagaagaacacatacaaatccaattcaattacttaataacctcctcctaacaatatgcattgagaattgacaaaggcaaaaaatcagtacctatgtaaatggcacgaagcattgctttgagattatttatatcatcatttaaccgagccaagaaacttgagagttcatctccatcaagcaagtcaacagcagttgctcggtgcttttcaagaacaccactcaaagcagacagatatgaatcatcacgagactctgctctgtgaatgagatcatacatcatatcagtgactttcgacattgctgacacaaccaccaacttcctctcagagtcatccttaacaacaacagcagcaacatcctttatcctctcagaatttcccacacaagttcctccaaatttgtgtacagcccatgaatctcctttgggaagatgaccattctccacagaattatccaacgctaaatctattcaaatgcaaatcaccattagcacaataatcaccaatttttcccagataacaagcaaaatcaacgtctacatttcaaacctgtgacggaacctaagacacgaggactttgcaattcgcttcttacgcattgacctatacaactccggcgcctcaatttcccgaaagaaacacgattcgacactagtcgtttcccataaatgaacggaacacgaaccgctaaatctccggccaccgccggagaagtaacaaccttagccagagaaaccaccggcatattctgtagcaatttgatttctatagtcaaaaccagtggattactcacttcataacaacgacttattgcaaaagaaaatgaagaacaaaatcataccgtaactcagtcaaacactaccggagattttcaacacgagaattatctaccggagaagaagacaccactgagatcggagaaccaacaaaatcgaaaacagtggcaatttcagtaaattttactaagaaggaaggcgacttgtttttgttatatatatatgaaacatagtggaggtaatgaaacagtgtacctcaaacctcgatggttgccacgtgtaagttttgttttacttctctaatgaatggacggttgagattcatttagatcttaatgaaaaataatgttaagaaaaagactgcatacatgtgtctatacaagccacactagagtcaagttgcttaaaaagcttttttcatataaatactgaatacatgaaatttggtgaaaagaataacaacatgacattttagtttttctaacattttttaatccaccaacctatagtttgcattattttgagaaaataaaaatgaaacaaacaattacatacatagctttccccaattctttgagatataactcatccaatgagttctcattctagtttccaaaagaaccacacttcacccacaagcattatattcatgaacaaacctctatttgtgagacgaatccgttgtttacttcatcacttgtacgatggttcaatggactaaccaagttaacattgagtaaagtcgaacaggttcaaccatttttctatttcaatttttaaaataatcccatagaaagaaataaagtaaatccttagagtaatggctttataaaataaacaattggagcaccgaaactatcagagaagcagctcgtgcggtagattccaattggccaatcacacatatactcaagcctcgcgggttcgaatccatcttaaacctcgcgattttgtttttttccacgtcatcagaatagactaaaacggccactcgccggcacagtaagtgtatccttctctaattttcttcttaacctcaagatcacggccagattcgccattgttattgtcccgcgaccgctccaatctcgtatcaccaccactactccaatctcgttgttccatcttgaatctcactttatctctcattaccggtaatcttcctccgcttttagatttcaaactctccggcaaaatttcacggcgaataacggaatcagagttttcccacaagtgatcagatctattatcctttgaacaacgatcggagcagagactagagtcaggaaaaggcggaagccaagctggaactgacgtcacatccaccgatcgagtcaccgccacgtgatccaaatctcctccgaacgatccgtctctttcccgtctcggtaacggtttagcgaaaggaatctcaggagcgtaggtaacgaaatcggagaggttacggagaacagcggatttgatcaggcactgagattcaatatcgtgaaccgtagagccaccggggaaacaatcggaagtagataaagcgatatcttggagaccattgacgatgtcgaagagattaacctccgtgcgattagcggtgttagagaacgacgatgcgagttcggcgagggattgtaagaatttggtggtggttagggttagagtgttgagagcggaggcatcggtggctttgtatccaatagattggcagatttggctgacggcgattttggtgagagagaaggagaactctgccgtggatgtcggtgattggtcggaggtttcttcgaatttaagtttggagttacggcgtcgtcgcttcattggtggtggagagattttgagaggatcgagaaagagagaaggaggcgaattggagtttatgaattttttaaagaaccctaaattttgtgaagtatcgaaccggcgttgcattggttatcagtgatttttaatcagcactacaagccacgaagccaggatcttattccatcctaaatattaatctaaacaaagtatataattgaagggaaaaaataaactgttaaccgatacggatcgaccggtttgagcccatcgaaccgcgagtgagacccttgaccggtcatgtttatcatgaaaaacataagtttgaacatatgaattcttaaaaccagtgaaaaccggcgaaccggtaaaaaccatcccttacgaaattattgatttttcaagtttttaaattttgttaagatcacatatcgaattcaggatttggatagctttaccttaaatttaacatatctgaatccatagacctgaaatcaaggatttcatcgatccattttcatctataaatatgttattatcattaattttttacttaaaagacaaaaacatgacataattcgatgataaaataatgaaaaagaacataaaacaaaagtttgataatagttaaaaagtgatttaatttataatgaatgatgaaataagacaaattcttaaaattttaagcatctaattttattagaaggttgtcctcgattcaaagtgcttaataataagttattttagcaaattaaatattggaggcatgatagaacataactagggttcattgcagtcagttacaaagaaatttttagcataatttattttgggcaattgggcacaaattggctctgtttgcgacacacgcattttccatttacgcaacacgcccgacgatagtcaaagaatagcatacttccacactcaaggtatgtgtcacgtatccctgatccctccatgattcacatcgatgctttttgtattcatcgcttggtaacgatagacacttgcaaattccgctttcacagtatcgatcatcgaccttgtcacaactacgcatgctttggcactcaaggtctgtgttacattcccctatgtgattcacgtcgactcttttggtatccatcgcttgtaagttgtaacgtaagacacttgcaatttccattgtcgcaatatgtcagacctctcttacaagtaagtaggttgtggcactcagagtttatgtcgcatagcttgacttttgcaagatccataatcatatgaataatatgttagtcacaaatgaaaaaacttgaagcttgaagcttcaggttgtatatatattcttaggaaagtattatagtgtaattaattaacattagatttgaagatttatattgatatatttttttgtgagaagatagtatatattgataacctgacatttggtaactcttttgtacagctaaaattgtttgcattacattttaagatattcatgttaaattaaaattgtttgtaacacaccaccacaagttataattatccgtagattgtcatctgtctaaatcaattatatttccggtttttggatccatattctttggttggtcatatatttcaataataaaattaaggatttaatgttatacgattaagattaagcaacgtcatttagaaattgctttcatcactttcaaaccaaaacggggatatgatcctttttattaatataaagtaattatctaacaaaacatattgatttcagggttacatctagttcagaacataatattcatgtatggataaaaggggaagcattcggagggataaatttctctgaaggggaagggttaggaggcgtaagtgaaggggaagcattcggagttgttcctgtgggtctcaccgaaggagaagcgtaaggaggcgtaagtttcaccgaaggggaagcgttgggagttcctgcaggtctcatcgaaggggaagcgtaaggaggcgtaagtttcaccgaaggggaagcgttgggagttgtccctgcaggtctcaccgaaggggaagcgtaaggaggcgtaagtttcaccgaaggagaagcgtaaggaggcgtaagtttaaccgaaggagaagagttaggaggtatcgaaagagaagcgttaggaggcaccggaggagcagaagatccgtaacaattgcctatacatgctttgccttccctagcctcgattcgtatgctttgatcttcaatttattttaagaaaaaacaaaggtatcaaattagtatactgtatatgttttcaaaaactagaaacattaatcacatatatgatctgtagtaaaagaaaaattccaaatgtttttttaaatccaaaaatataaaagaaagatagattatagtagtaaaaatagcttaagtttaacttagaacatgtgagtttttttttactttgtttttaaaacggcagaatttaacatggtaaacataaattacatttccacacaacttgtataattggttaattatacaaaaatgtgaacaacttcactattttacgaattcgcaatcaaaaattcacatttacttacaagagagagacaagaagaggcaaagaagaaaagccatcctaaagtattggtttgccatagctaaacaatgttttggtattggaatgcttgatggttagcttttgtgagagaactagctactcttgcgtttatttatatatcggatgaaaaaacagcttttccactttatttggaatgtactttaagtttcagattgtgtctatattttcattattatgacacttattatcatgaaatttcagattttgtctatatttcatattggattttgtctatatttcatattagattttttctatatttcatattagattttgtctatatacagactttaattttgtcttcaattagaaatttatttcgtctatatatatagagcagactttattatcagtttgacccaacgatccaaaatagggagtatatcttccacagataaaattactatacagtttttcaaagtgcttttttctttctttcgtttgtacctttttgtattaaaaaataaaacagaaaaaattacttgatataaaatgtatatactttaactttaactatatcctttacactactgttgttagaaccatcataacatttgtttttgcatttttcaaccaaaaaaatcattctatgtataacttaagtaatgaactactccctttgtcccatattattatattttgttatttttacataaaatttattatttaatattatttttaaggaattaacaaagagaaaaaatcttcagaatacaagtggtcataatatactaaataaattatgcataattatttgcaaaaaatctaataaaatgaaacaagaaaaaacagtctagacttgggactgtgggaatattaaataaccggttactagagcttgggtcagactatctcattgacatatattggtatatcttcaactattaacatatatctcacaaacgcgcactagtagatgtacaaaaaagaagaaaataaagagttaaaggtacctttggcacatcataaaatccacttacccaagatggccatgccaccggcaccaagcaaaacagccgcatatgacttcatttgtagttattagatggagtaacaattactatcacaatttaaggaacctgtacttgttttttaactagtatagaatccaacttagaaagaaaaaaatgttgtgatagttaaaaaaaaaacaaatttgatcgtagttattagattgagtaacaattactatcacaatttaatggatggagtaagaaaaatttgagagagaagaagcgatcgagtgagcaactggtaacaagaatacaaaaatgtggctaggttttaaggctatttcgttgttcttcttgctgggaagcttgatcgtagccactggtacggtttgaatcacgaatacaagaacgatggcttcacaaaatcgctaatgctcgctacttaaatggctgtaacaaagctctttatcatgcttttgagtttctagatgtccatgcttcttttgatacacctcctatcaggggaaagtcattcgtcaggcacacacattttgttttctcttctacaagtttccgttgatctagggttttgtttgtgaattcgctttcaaaatagatatgtgattttgtagattttggattactgcttcttaggtactggtttttgtgcttttttgtagtgaaattctatatggagattacaacaatttatatacataagttactaaatttagttttttttttccaaactacatttagttttgttggtactgaattttgcgcgtttggtgtagtgttgtactctttacttcatgacatgtaatccggaacttgattgcaccaaaatgagaggaacggtttgttatgtgtctaaaccaatattcaattgtttaatgttataagattgagcattgtcatttagaaattgattccatcactatcaaacaaaatagacatttgatccttttaattgatattaattaataaagaaatatatttttacatctattttattaatagtattcattcatgggagtaggagctttagctttatgacatttgcaatgacattttcttttatgttgttcaatgggggtaggagcattagcttcttcggaatctattattgaaggtgaaggagtaggaggtttatgtttatgacacttgcaatgacacttgcttttatgttcttcaatgtccatatattcttggtcgactccttgttctgaatctatcattgaaggtgaaggagtaggaggttcatgtttaggacacttgcaatgacatttgcttttatgttcttcaatgtccctatattgtaattggttgacttcttcttctaaacctatcattgaaggtgaaggagtaggaggtttatgtttatgacacttgcaatgacatttgcttttatgttcttcaatgtcccaatattcttggtagactccttcttctgaatctatcactgaagaaaaaagattaggaggacatttgctgccaactcctttatggtccatgcattctttgttggctccttcttctgaatctatcatggaaggagaaggagtaggagatctataacatatgcctatacatcctttgccttccctggcctcaattattatgctttgatcttcaatttattttaagaaaaaaaaaacaaaaaatgtcaaattagtataagtttggtaacactgtaactagaataatcccaaagaatttaaattcatgaatataatggaaacatagattatgcaaaaaatggtttgagtttaacttagaaacggcataattgatcataaattactgaatagaaattacaattccacaatttgtataatcggtagaaaacttcacatttacttacgagagaaggacaacaagagggagagaagaaaagcggtcataaagtaaatgttggtcatagctaaacgatgtttgtatttggatgcttgatgagtatggattgtgaaagaattagctagtcttgagtccatttatacatgggatggaagaagatttttttagtttttttttttgaaaaatgtactttaaatttcagattttgtatatatttaaaaaaaataaaaaatatgacaataattcaatcatctaagatacaaagtctatttacaaatacaattactataatacattcacagatttttaaaataataaaatcacagctatagtatcctattgcgcattacttttatttaaacaattttatttttaatttatttgataatattatatttatcaatatagaatagattttgtatttcagtaataacttcatgtttaatatagagaagacttattttcagctatgatcttatgatatggaatctatcttctacaaaaataaaagaaaatctaagaccaagtccatcgatagtttttagtgggtttcttagttggtttctaagagaataatgggcctaaattaaataaaaattcaacaataattttaggaacgttcctaaaattaggtttttggaaactcattagaaacgcatacgtggctatttgtgatagattgtttgttttaaacaaaaggaaaattttctcagctctcttttgtttggtttcttcgtcggcgataccaaaggcgattcagcttgatttgtttgatccagcgttttgatcatgaaatcgggagagcaaccacatatactcaatatacaaccgccggaatgatgatcgacgatgagattgttcaccaaatcaacttcaaaccggatcttgtggttatattgttcaattctttgtaacaccaggagcttctatcatgtggctatctcatgagctcttaccaagaggtagaatccagctctgtctcaagtatatctcttttaatgcacttggagttttctgaaatttttgctcaaaaaacatggttgtggcaaaacagagcctttatctgacatagagatggcttaagaacaggctaataaatgatatgttgtcttaagttttaggttctatctgaatgttgcatgtttggtcagaatgtccttcaccttctagtatttcggctttaagttttagcttctagtatttcggcttctagtatatgtgtaataactttgagactgaatgtttggtctgaatgttttcagtttatgggttaatgagatgagtatttgtgtttggtgagtatttgtgtttggtgaatgtttggtctcaatgttttcagtttatggattaatgagatgagtatttgtgtttggtctgaatgtttgtagtttacggttttgtttcatctgttaatgtcatgatttgcttcattttgcaggactgcgaagaatagaaatggtgccaacatcaattgtggaagagaccaaatgctttaaatgtatgtattgttgtgagttttatcgattaatgagtttggtctgaacttaaccatatccattaatgactgaatgtgtgtgtttggtctgaaattaaccatattgatttatagatgaatgtgtgtgtttggtctgaactcaaccatatcgattaatagatgaatgtgagtgtttggtctgaacttaaccattttggttacaatcgagtaatgagttttatttcatgagtttcatctattaacttatgtacttaaccattttgttttccaaattttttttttaagaaaccctcttaaggattctaccattgaaccataaaaattacaaaaaactctaaattacaaaactatcaaaattaaccaataaacaatttgaagaaactcatattagaaaccaaccaatgtgggtgctctaagaagataagttaagaatcccagaaaagaagaaaagatacatatctcctttcaaaaaataaaaaatttctacatatctcgaaactgactacatgttcatataaagagataatcatctatttggatgaaatctctcacacaaaaacctaaaagaccctttctagtatgaacttcacatggcttgatcttattacaaatgtacgtaggcaacctccatgatgtgcaactatatcataaacaaaattccaattagtcaattctctcgtggtgaagctcgagtcttgttgaaatcatcgtcaaacccgacttgatttatcatccaatttatctgtgccggattcactcgcacaattgtcgtgtgtctaaaccaattttggtttttggatctcacattgttttctagaggtcggtcacacatttcaaaaaatttgaaagatttcatgttataagactaagaattgtcatttggaaattgattgtatcactatcaaacaaaaatagagaatagatctttttttttattaataataattatatgaagaatatatatttcagagttacatctattttaaatataatatttatttaggagctttagctttatgacatttgcaatgacatttttttttatgttttttgttgacatctacttctgaatctatcattgaaggtgaatgagtaggaggtctatgtttatgacacttgcaatgacattttcttttatattctttagtaccgtccatatattcttggttgagtactccttcttctgaatctagcattgaaagggaaagattaggaggacatttaatgctaagtcctttctggtctatgcattctatgttggctccttcttttgaatctatcatcgaaggagaaggagtagtggatctataacatttgcctacacattctttgccttcactagcctcgattgttatgctttgctcttcaatttattttaagaaaaaaatgtcaaattagtatacaactggtattatcatgacatacaagaatctaagaaaaaataaattcataaatataatagaacatagatttaagcaaaaatacgcttgaatttaatttagagccagcataaatgatcacaaactgctaaacataattggttaaattatgaaaaatcttggaaatactttcaccaatttttgaaataccaatgaaaattctcatttacttacggtcctaaagtaaatgttggtcatagctaaacaatgtttgtatttggatacttgatgagcttggtttgtgagagtactagctagtcttgaggccatttatatatgggatggaaaaacaatcttttcactttttaaaaaaaaatgtatttaaaatttcagattttgtatatatcttgatttttagtttttaatttagacactcattcaatgatccaagatacatagtctatttttcacaaatacaattacgataataaaatcacagatttttaaaatacaattactataataaaatcactggtatagtatcctattgggagttattttgtttttttttttgttttttggcaaaggggagttattttgtttaagaaacagttttattttttaatttatttgaaaatttactctatatattaaaaaaaaatcaatgtagaacagatttttttcagttataactttgtctaatatagaaaagactttgttttcagttatgagtcagtcttatgatatggagtctatcttccacaaagaaaaatattatataatatatatacagtttttaaactgtgttttaccttgtattatattctaaaaaacagcttttttatttactttgttaaaactacttgatttaataatgttgagaaggcaaaacaaatatatatcacactttctctattgagctataactcatatctaaagttttactttacatcataatcatcttatgcataatttaagtaacggattttagaacttggatcagatgagaagtgtgtgtactaataatttttattatttgcatatctacatatacatttttgcagcctttttgtgaaataaatcttggagttgagacttatttacaatggctgccactaacttttaattattggtttttttgggtaataaattaattaacaaacgaaaaatattccaaatatattctaatctcatatgtcacgcagatatctccaaaatttgaattagatttcagcaactatttaaaacaaaaaatgtttgacaaaccaaaatacaattgaaatcccttaaaatgagcaaaacacacctaaatacattctttatctatacaataaatcttatttctccaaaatttgagctagattttggcaactatttaaaacaaatatttgtttgacaaaccaaaatacaattgcaatcccgtaaaatatttattttaattatatatttaaattagcggtgtaccgcgggtttttttacgggatagatttggcgggacggtttgacaagacgttacttaataacaattgtaaactataaaataaaaatattatataaatagatttaaaaatttgcaactttaatatatactaatttaaaaaataaattgttctcacggtataccgcgggttaaaatctagttcgtttacatatttgattctaatatatctaacgcctacgatatggtgttatgtcagttgcattgacattttactagaacaatttaaattaaattatgaacaatagaaaagttatatggatgcccattatacggcaattagtagatcctagaagatttaatctctaacataaactctaatgttgtatttcaatgtatatgtcatatcttgtataattgattgataacagaatgcacaattccctaaaatctctttgttcacaacaaattagtatatgtatcttgatgatttatactgcacatatatgattatatatttaaatatttatatttaatatactggttcaagttggagataaaaaattttaatttacaaaaataagtaaataatctattaacccttaaaatgtacatgctagattctagaacgattaaataccatctagcgatttattaaatattggtaattaatctgcattccataaatgtcaagttaaacgtacgatatttactaaaaacttgtgaaaatggcatactacttagtaaaattttaaatgtaatattgtggaattagtattgtattagtttaccactatccaaattcaacttcgcatacgcttttatttagataagacagctttttatatacatttattagctagtacacaaaatatgtgcccaatatttgatgtgcaaatgagagaaaaagtcaatacatctatttgtaagctccgctcttaacttaaacatcatcaagcccacttggccatgacggacatgccaccagcaccaagcaaaacggcagcatatgactttaattgaagcttgatgctcctttgcattttttgacccataaaatcggcagctagaaggtcaactaaagccatgtagatgagtagtcctgccgaggaagcgttgagcaacccaactgttataagcgattcagggctattctctttgtatgttttagatagtgccatccctagaaccactccaaaaggcgtcgtcaccgcaaaaaagaaagccatcaccgcctttttaacccacccgtactccgcctacatgtattatcaagttctcatcatatatatgatttcatatcaattcattcaaaagcacgacgtttttcaagaaatcaaaccatgtggaactttttgtgtttaaaccaagaaaaggaagaaaaaaaaatcatgtggaatttagtttatagaaccagaatggatgggagtaattactcggtccgactaataaattaagtggaaaggaggaactcacctgaaggatgcaaccgccgagacccatgccttcgaacatttgatggaagcaaagcgcagcgacgagtcctttgatggtgcaagtattgttagtgtctcctaccgatagtcctatcactatcgactgcaccactattcctagctccaatacctattccattttattcatttcagctactcacttattaaatcataattagtgtaaatggttgtcactcaaataaaagcaaaagatgaaatataattagtggaataaattaaaatgaaaaattacttgttccttttttttttaacaaagaactgtgttttatttttatttttctaactaacacaacaaacagggtaacaattttgttttacactatgcaacctacaattaaaatttgagttaccagttaaccttagaaaaatggcatattaatgccttcgtatgtgataatgtgaataatcatttttttcctataaacgaaccaagttataacaatttcacttagcttttaacacaaatgtttctcaatgtgagcatttataaaaaaacaatttatctggtttaatgttaaaaaagcatttttgtaattaaatcaagttaagagagttttatttttacaaaaaaaaaaaaaaacgagagtgaaggaatactaacgattgcaagaatacgataccgcagaagctgtaaataagaaccaagctctttatcattctctccatgaagattgtgaggaagagtatggctatgaacatggccatgaacctgtacgtgccctatctcttggtcaggagtctcaacggatgctacgtcagcacgtagatctttccttcctgacttggtgaagacgctggtggtaatagagtcaaccatgagcgtgaacacggcagacatcatggctacaaagccggcgaaaggaaacttgtgccaggggttatcgttaagacaaggagatgaaagcatctcgaaagaatcaggcaagacatgcatgaaaccagtggaaaggatgattccggaggcgaaagattttacgatgaggaagtgagatttctcgggttggaaagcgggaattgatcgggcaaagaacgggaggcaaacaccgattagactagtgatgagaattgagaagattgataagagtttgagatctaatgctttgtttttgtctatacatgagtagttggattttgattggcaatctttattggattgagagagagctcccgggaaatgcgagatggagagtaggagaaagagagcgatggaggcagagaaaatgacatgagatttagtcatctttctatttgtttcttgtggagttttttgagtttgatacaaagtacattatgtcttaatcttcttatataagacaagacttgaaccctcgacctcaatcaaagtaagtgtcgacattactaattaatcaattgtcaacatgttttgtttagaagatattgaaatactcaaaaaaagtctaaactaattctaggcatacacacacatataaatttcttgaatatgttctcacttgcaaaataaaataaatcatgatagtagttcttggttataacttataaagataaagatatatatagagaaaaagaaattcaatttcatatatatagtcattaaatctttagtattaaataaaatgaactgtaattaggtgttatatttttctcgttgtatacgggagtaataaactaaaagtaatcaaaaaggttagatattattgtataggtcaaatttcttgacacttgatcaaactgtataaatatctatgttgggtttaatattacatgttgaaaaactttacctatcatcatgttacccacgttatacaaatatcggcatatggataagccgtcacactccacagtccatatatgtacttagtgtacgtttttaagtacatgatgtaatacaataatagtattcttttttattgtcaaaaaaaattataaaccctaagttgacttctaacttttttaaagctgctaatccatgtggatgaggtatcggaggaatgtttcaacaaatgaacattgatgtgattgtcttacaacgacatactaagctataaacaaattgatcagctttatcaaaaaaaattgatcatgggtagagaaggatacatagaggttttgagctcggcttgacgcgagacctaagactcgtacgaggaatgacagacttgtcagttttgtgtaaccaacaatatcataaatatgttaggatttagtaaagaagaacacaacaattgaagcgggaaaaagaagacaatgccagctcagcttgatacacgtggatatgcaggaccacaagacaaagaatacccgttttgcttgtccgctaaagcaatggtgtacggaggagacaactcttgtcttgtgtgtgaaggcagaagagccgttacgcctgaaccaaagcaggctacaagacaagcttggaggctactgcagaggagcgtgtagaggagaggaaccgagaaggatccagaaggagactaggttaaaatctcttgctctatttaagttgagcattgtagagagagaaaagttaagaaacacagaggcacttaatcgagagtaaacttgtattgggtgttcttggggaaacagagagtgaaagagagtgaatcttagttagctttgtaaggggctgagagggtgagaaatctctttgtaaatctctaaaggttgatatagtggattccgggagagagttcccggcccagacgtagcaccgttggtgtgaactgggttaccattgtgtgtgtgttctgttctgcatttctcattacaaaggttctgtttttggttctaagtcgaagttggttctaaagctgaaacgttcttggtttgtggtgtgttaatcttcacaaaatatataacttcaaactttaaaagaaggaaaaaaaaatcggtgaaatttatttgaaaaagcaatttggaataggtcgaacagaatgttataaaagctcgttgttgacatatatataattcgtacgaatgtacttcgctgactttacttctacttacatcatacagaatacgaatccttttgataaaagttattagtcgtgttgatttcgaaatcgcacaaccactgttattatacaatcactaatccaaaaccacctcattcgttgttaaagctaatataaattcatcctaccaaaaaaaagctaataaaaatttatttggaaattgcaacgaaagatcttaaaaagtttaatgttttatatattcggattatgttatgattggtatatgaatcgttttagttgaattggtatataatttggtggtcaagtaggtttgcataaaatttaaatactagctagctttataaacttacattatacataagcacatgcctctcataacatatattggattttggccttttggtcgtttgagtcaagcaattaaaattttatttgaagaataaatttaaactatcaatattcaatcatgccagacgagtcgttaaaagtcaatggaattattggttgataagatgagatattttcgatcgttcttatgactatctagatatgaagatgagtcatacaagctatgagttcaaaaacggtgtaattttgccttgtttgaaaggacacaacaattatgaaattgtgttagtttaataaaggtttatgagtctttaagtcaagacgacgtgcataatcatatggaatgaacaaataattaatcttgtaagcttaatattgttactttgctagtaagttctgaatttaactttgaccaaaactaaaaagttttgaatttgatattcactttgttatacgcatattttagaatagcaatgaaattggaaaatttaaaagtagtattgattttttttttttaatcaaaggtttgttttcattccattagagtagctaacacatacaaggataaaaggactctaagatcccaaaatttagaacaacataataaagggtataccccaaaattactaacatgaaaataagagagtagatagagttaatcgacaaattatcttttgagagctttgaaccaaaagctaaggggctttgtagaacatgtaaggtcaaggtttgtcgaagtttcttccaagagcgagtcattgggtgaacgaattgttaatgtcgagagatgaaatatcgttgatgagggggctaaagataagcttctcgccgacacgaggagaactacacaaaatagtgatttagcaactgttcgggcaatggtggtggtgtcgcagtgagggtttaagggcatttgaccaatgttgagcaagtaaacaaactcgcaacttacggtatttggtgaagctattataagggttcgcacatggagagagtgtaaagccgtaacataataggtggatcctctctcatattgattatgacttcgatgatgctaaatcacaatttggtattgtgcatccgttcacaaaagttaattaaatcattcgaattgtatgttctttggcgacccgtacgatacttgtttgttgataatccacacacatgggctgaggaaagttttaacctacggcctaagtactaatcacattctttaatcgaacttaaggcccaagtgctaaatcacgacacattcttttaatttcatcagagagacaataaccgtaacagcgcaacaaataacaaactttaaagacaaaatgtatttccaaagagcaaacgtgaaacagaaagatcgtggtcataaagacaacatcgtgggttcaagatgactagataaacatgagttatggaccttacggttttccaaaaatccattttttaaccattcattattggattctaagaatttttactaatttcttaacaaaatccaaaatctcatttcaatgggtttttttcaatttcctctacgagatccttttttctttcaattttccatttgattttttttttttttttttacttttgttacaaaatccaaaaaccaaaaactaaggccatgaatgtttgtaattttaaaaatggtttttggattttggtttttggtttttagtttttgattttcttggtttttgtttttggtgtagattttagtttcttaaaaacttgaatggtagtttgtttagattttggtttttatgttaatggataatatttttgtaacaaaaaaatctaaaaataaaataaaagaatgtaatggatggttttatgattttggttttctttgaaaaattgttaaaacactcaaacactagattctctattttttagaaaaacttatttttttcaaaatcttgaatggatataaaatagattttgaaaaaaactaaaccaaaatctagtttaaaaaccacacccattcaaggtcttaaaactaaaatatttatgtattagttttaaattacaaagataataaaattgaggacagttgaaaaagaagaaaaaaaagtttgtatgtatttggaagttatttttctcaagtagaatactgtgaaagacgattcaacatcccttattttacggttgtgtcaaggaacattcgagaactttttttaataactccttaagggacaagttctctctgtttttcttttttcaatagcttctctgacactttattctttctttctgatattataaacctccgatttggtttagttcaaaactagaagcagcaaaattctgaacacgtaaagctttgtttcactcagtgtttcccgatcagatccaatggagagaggtggttatcgaggaggtcgtggtgatggccgtggtagaggtggccgtggttatggcggaggcggaggaggaggagaacaaggtcgtgatcgtggctacggcggcggagaacaaggtcgtggtcgtggctcagagcgaggcggcggaaatcgtggtcaaggtcgtggtgaacaacaggattttcgaagccagagtcagcggggacctccgccaggtcacggtggccgtgggacgacgcagttccaacagcctcgaccacaggtggctccgcagccgtcgcaggctccggcgagttatgccggttcagtaggaggagtcgctggtagaggcgcgtggggtcgtaagccacaggttccgtctgattcggcttctccgtccaccagcaccaccgtggtttctgaacccgttcgtggtatatatgctcaattttaattttgttcgagaactctttgggaaatgaaattagggcaaattcatagaagcttataataaatgattagaacttaaattatgaaatcattagagagatttatgttagttaatcaatagcttttgatgaatgttttatgtgattattgtttagctcaaagttgtaattatatttttgaaatgtgacagtagctgaagttatgaatctgaagccatcggtgcaagttgcgacttctgataggaaagaaccaatgaagcgacctgatagaggcggagttgtggctgtgcggcgtgttaatctatatgtgaatcattataaagtgaatttcaatcctgaaagtgttataagacattatgatgttgaaatcaaaggagaaattcctaccaagaaggtttcgaggtttgagctagctatggttagggacaaggtgttcactgacaatcccgatgagtttcccttagctatgacagcttatgatggtcagaagaacattttcagtgcggttgagttacctacggggtcatacaaggtggagtatcctaaaactgaagagatgagaggtcgaagctatacgttcactatcaaacaggtgaatgtgctgaagctaggtgacttgaaagagtacatgacagggagatcgtctttcaatccgcgtgatgtgttgcaaggaatggatgttgtgatgaaggagcatccttccaagtgtatgatcactgttggtaaaagctttttcactcgtgaaactgagccagatgaagattttcgtttcggggttatagctgcgaaagggtatcgccacactctgaagcccacagcacaaggtttgtctttgtgtttggattactcggtgttggcgttccgcaaagcaatgtcggtcattgaatacctgaagttgtactttaactggtctgatatgcgtcagtttaggaggcgtgatgtggaagaggaattgattggtttgaaagtcactgtcaatcatcggaagaacaagcagaaactcaccattgtagggctgagtatgcaaaacacaaaagacatcaaatttgatcttattgatcaagagggaaacgagccgccaaggaagacgtccattgttgagtatttcaggataaagtatggaagacacattgttcacaaggatataccttgcttggatttgggaaaaaacggtaggcaaaattttgtgcccatggaattctgtgacttggttgagggacagatatatccaaaggataacttggataaagattcagctttgtggctaaaaaagttgtcactggtcaatccacaacaaaggcagaggaatatagataagatgataaaggctcgtaatggaccgagcgggtatgtgtacaaagaacttcacttttattgtctatctttttaaaattttgtcagtcttatatttttgtatgtgtgtttatgacagtggtgaaatcattggaaactttggattgaaagtggatacaaacatgacaccggtggaaggtcgtgtactcaaggctccatcattgaagttggcagagagagggagagttgtgcgtgaggaacccaacccgagacagaacaaccaatggaaccttatgaagaagggagtcacaaggggatctatagtcaagcattgggctgtacttgacttcactgcatccgagagatttaacaagatgcctaatgactttgtggataaccttattgatcgttgttggagacttgggatgcagatggaggctcctatcgtttacaaaacatcgagaatggaaacactttctaatggtaatgctattgaggaattgcttcgatccgtgatagatgaagcttctcgtaagcatggtggggctcgtccaactcttgttctgtgtgctatgtctcggaaagacgatggctataagactctgaaatggatagccgagaccaaacttggtctggtgactcagtgtttcttgactggtcctgccactaaaggaggtgatcagtaccgggcaaatcttgccctcaagatgaacgcaaaggttggtggaagcaatgtcgagcttatggatactttctctttcttcaaaaaagaggatgaggtcatgttcattggtgctgatgtcaatcatcccgctgctcgggacaagatgagcccgtccattgttgctgttgtgggaactcttaactggcctgaagcaaatcgctatgcagctagagtcattgcccagcctcaccgcaaagaggaaatacaaggatttggcgacgcttgtttggagcttgtcaaagctcatgttcaggccacagggaaacggcctaacaagattgtgatattccgtgatggtgtcagcgatgctcagttcgatatggttctcaatgtggagttgcttgatgttaagctaacttttgagaagaatggttacaatccaaagataacggtaatcgtagcccagaaacgtcatcaaacccgtttcttcccagccacaaataatgatggaagtgataagggcaatgtgccttcaggtacggttgttgatactaaagttattcacccgtatgagtatgatttctacctctgcagtcaccacggagggatagggacaagcaaaccgactcattactacactctttgggacgaacttggattcacttcggatcaggtgcagaagctcatcttcgagatgtgcttcactttcactcgctgcaccaaacccgtctctcttgttccgccggtgtattatgctgacatggttgcttttagaggaaggatgtaccacgaggcaagctctcgtgagaagaactttaagcagccgcggggagcgtcaacctctgctgcttcgcttgcctcttcattatcttctcttacaattgaggacaaagcgattttcaagctgcatgcagagcttgagaatgttatgttcttcgtctgaagaagagagtgagtttcttttgtgttttgggtctcaagctgaacttaaacctatattcgaaatcggaacgccccaataacgcagttttaactccttttttctggtagaaaggagtttgtgcgtgaatctaattgggtttttcgtagtgtgtttctttctttttggttttggtgtgttgaaacgaatttgtaatctcttttgagcaaaaactacgtcttcttctttttttggtattattgtatttcagactctgcattcagtaattatttcatattttgctaattttgtttctgagttttgttaaaatgctttagatctcggagattagaattacatgttcagtgtgtgtctgaaatttagtaagtgcattaaccatgatcatgttcggtcgctactgaagtatgataagctctgtatcattcaattacttcatcattccttccacttttgccccttgtggactaccacagatgttacaagacaaaacataatctgtaaattgctaatctctgaacctaagacttgatatgaaacatttatttttattcccaatcgttttataaagattctgttgcttgcacaatctcattcaccacactactcatgtactcccaggttaatcaatcaagtttatttgtgtccgaaaaaatggaaaaatatgagaaattcccatccaattttaaggattgtttgaatgatcaaagtatggttgttttagagaaatgaccttaaacacccaattttacgttgttctcgtccaaaactagcggaaaatttataaatttttcaaataccacaagatagtaagagtttgtaagttatggtaagttcagaagaaaagaaaaatacataaatgatagttttttgagaattgaatgcatatttcgtcttagagtcaattagttacaattaacatgattaattaatagttattttgttgttttgttatttgttgtttgtatgaaatggtgttgttatatatacattggatactcttatagaagttgaagctgcaatttcttcgttgcatgacttcaacatttgatactcgttagtcaaaatctttttcgttacatcagactcgatcaggccacataatcatatttagaactaaattacaatcaattacgtattgttccaaacttccaaaagataattgaccacaaacactcatttccaacagaacatgactattactgactgactcacaagcatacactaataactatatccatttctcaacatatatctttacatccatttctcaacataaaggattgaacaaataacttaatttttcatcaaaattaacaataaccctatccctatgaattctcaacaaaaaaaagtttaaaacaacactagctacgagctctcaaaatgtttggtcgtgtgttcgagaacatttatataattaagttttttctcaacttatataattccatttagtgaaaaatctatagatatatttatataattaagttttttctcaacttatataattccatttagtgaaaaatctatagatatatttaaaaagtttactatttctttttggcggtttagagagcaattgttttttttaataattgagttagtatgtttgagtggtcgaactacgtattcactaattaaagacattttaatcttgacatagtcataccattttacataagtatggctaaatcaaaattaaaatgatcttaattagcgcagtgcctaactaaagttattttaattttgacatagtaaaagtctagtttatacaatcgcctttatagtgtataatgtattaaataattctaatcaagcaagtgttttacgcaactgatgcttttgttgaaatacattattagaatttagattaatatataaaccgatgtgaacgttatgaatttaaaacggtgttggctagtgaatgttgtgaaataaatatcagtaaattatgcacaagtcacataactttcagagattgtgctacactgctacgcctatcattcagcaacatgattttttatctgtctagttatctcatgttatagcggtttagtcgaataatatatgattaatcaaaattttacacacaaaatatacgttcgttaattgtatcacatcatcaataataaaacaaaagatcttttgactcgagctaagtaaaccacgttacatacgtaattgattctccaatcttctttattacctttttcaaaaagtatgcgtatgagcgaaccgatgagtaagtaaaagtgatcgttgatctgttggagatgagagtttgtgtaattgacttcatcaatctcttaactaaaaatagcaatgcgtgagggaaatgtttttcaaaagatgaaaagacacataaaaaccaatggaaaatacaacatcaaaagattctttacataaaatggtaaaaagaaaaatttacaatcaaagttttctttttagaaaactggaaacccacgctaatgcgtatacaatactcatcagtatatgatatatcaaatatatagccacatataataagtccattattaaaaagtaccgttattatcatgaccaaaatttaaagacaatacacacgtacaactaatattatttattaagaacataacaagtattattattattagaagtagaaatttttttccaaaagaggaaaacgaaaactttaactttatttacttacctaaaaaccttaatttttgacacctctagtgggttattataatgtcgttttcgatcgaaagtgaaacagagagacagtggacgcaagaaaaaaaccgtgggtggatgaaagaaagtaaacatgagatttttgtttttctttgttaatggtttccttaaataaattacaaacataattataattaagaagagagtttcaaataaaataaaatgaaatgccacgtcttacagttgcatctgactctgttttatgttaattgtgacacaagtttaatacagttgtactttcttactttttggtggtttcgtggaagattacgacaactttacaaactctacgacttaagcttctctgttcctacaccttttgttcttctatttaaagccctctgatttgttacttcacattcacaagttttgaaagcaaacacataaagaaaattctagttcaatcttttgtcactcaagagtcttcccgaccgtatccagtcaaataccatggatcgaggtggttaccgaggaggtcgtggtgatggccgtggcagaggcggcggcggagatcgtggtcgtggttacagcggtcgtggtgatggccgtggcagaggcggcgacggagatcgtggttacagcggtcgtggtgatggccatggcagaggcggcggcggagatcgtggtcgtggttacagcggtcgtggtgatggccgtggcagaggcggcggcggagatcgtggtcgtggttacagcggtcgtggtgatggccatggcagaggcggcggcggagatcgtggtcgtggttacagcggtcgtggtcgtggctttgttcaagatagggatggtggttgggtaaatccagggcaaagttcaggtggtcatgttcgtggtcgtgggacgcagttgcaacaacctccgccacaggaagttcctccgtcgtcgtcgcaagctcaagtgagtcaaggcgttgcaccaggagacgtgggtcaaggcggcgtcggagacgtgggtagagacggcgtcggagacgtgggtagagacggcgtcggagacgtgggtcaaggtggcgtcggagacgtgggtcaagtaggcgtcggagacgtgggtcaaggcggcgtcggagacgtgggtcaaggcggcgtcggagacgtgggtagagacggcgtcggagacgtgggtagagacggcgtcggagacgtgggtagaggcggcgtcggagaccgtggacagagtcagtcgggactatcgtcgggtcactttggtcgtgggacgcagttgcaacaacctcagccacaggcggtttctcagtcgtcttcgcagggtcaagtgagtcaatcctttgcaacaggaggcgtgggtttaggcgcgtgggctcgtaagcctcaacttttctctgattcgacggtcttaccttctagttcttcgtctaacgtcgttgcttctcacaccgctagtggtaagcaccataactctagatttttctttgccatatctttaagcatttgctatttttctaacgttcaagtaactaaacaatgagtttgttttaaggtgattaatacagaatgagtttgagaaaaacttatgttctacattactaccttggagaattaaaattacccaaaattgcttaaatcaataattttagaattgcttacaagaaataattttagaacttaactaattctgaatattataagaatattaaacataaacaaagatatattatatgaataccttttttggtttaatgaatatttatgtgtttttgagctacagagattaacaaataagttatttgtatgttaatttcacaggttctcaagttatgactccgaaaccatcttcttctgataagaaagaaccagtaaagcgtcctgataaaggtggtaatataaaagtgaaaggcgtaattaatctctccgtcaatcattttagagtgagtttctcaacagaaagtgtcataaggcactacgatgttgatatcaaaggagaaaattcttcaaaaaagatatcaagatttgagctagctatggtcaaagaaaagctgttcaaggacaataatgactttcctaacgccatgacagcgtacgatggtcagaagaacattttcagcgctgttgaattacctacgggatcatttaaagttgatttctcagaaaccgaggagatcatgagaggtagaagctatacgttcatcatcaaacaagtgaaagagctaaagttacttgacttgcaagcctacatagatggacgttccacttttattccgcgtgatgtgttgcaaggaatggatgttgtgatgaaggaacatccttcaaaacgtatgatcactgttggtaaaagattctttagtactcggctagagattgactttggatacggagttggagctgcgaaagggtttcaccacactctcaagcccacagtacaaggtttatcattatgtttgaactcctctttgttggcgttccgcaaagcaatttcagtcatcgaatacctgaagttgtactttgggtggagaaatatacgtcagtttaagaattgtaggcctgatgacgtggtacaagaattgattggtttgaaagtcactgttgatcatcgaaagaccaaacagaaattcatcattatggggttgagtaaggacgacacaaaagatatcaaattcgattttattgatcatgctggaaaccagcctccaaggaaaatatccattgttgagtatttcaaggaaaagtatggaagagacattgatcacaaggatattccttgcttgaatttggggaaaaagggtcgggaaaattttgtacccatggagttctgtaacttagtcgaggggcagatttttccaaaagagaaattgtatagagattcagccgcgtggttaaaggagctttcactagtcactccacaacaaagactggagaatataaataagatgataaagtctagtgatggacctagagggtatgtggacaaaagatttttatatttattttttagtcttatgaccttaatcttatccttttatgtatatttatgacagtggagatatcattggaaacttcggattgagagtggatccaaacatgacaacggtggaaggtcgtgtactcgaggctcctacactgaaattgactgatcggagaggcaatcctatccatgagaaactcatgagcgagagcaatcaatggaaccttacgacaaagggagtcacaaagggttcaataatcaagcattgggctgttcttgacttcactgcatccgagagtttgaaaaaaaagatgcctggttactttgtaaataaactcatcgaacgttgtaagggacttgggatgcagatggaggctcctatcgtttgcaaaacatcgagtatggaaacactttatgatggtaatgctcttgaggaattgcttcgatccgtgatagatgaggcttctcataaccatggtggggcttgtccaactcttgttctgtgtgctatgactgggaagcacgatggatacaagactctgaaatggatagccgagaccaaacttggtctagtgactcagtgtttcttgaccatatctgccattaaaggagaaaccgtttctgatcagtacttggcaaatctcgccctcaagataaacgcaaaggttggtggaacgaacgtggagttggtggataatattttctctttcttcaaaaaagaagataaggtcatgttcattggtgctgatgtcaatcatcccgctgctcacgacaatatgagtccatccattgttgctgttgtaggcactcttaactggcctgaagctaaccgctacgcagctagagtcaaagctcagagtcaccgtaaagaagagatacaagggtttggtgaaacttgctgggagcttatcgaagctcattctcaggcccccgagaaacgacctaacaagattgtgatattccgtgatggtgtcagcgatggtcagttcgatatggttctcaatgtggagttacagaatgttaaggacgtttttgccaaggttggctataatccgcagataactgtaattgtggcacagaaacgtcatcaaacccgtttcttccccgccacaactagcaaagatggaagggctaagggcaatgtgccttcaggtacggtcgttgataccacgatcattcacccgtttgagtatgatttctacctctgtagtcaacatggagcgataggtacaagcaaaccaactcattattatgttctttcggacgaaatcgggttcaactcgaatcagattcagaaactcatctttgacttgtgcttcacgtttactcgctgcaccaaaccggtcgctctggttcctccggtttcttatgctgacaaggctgcttctagaggaagggtgtactacgaggcaagcttaatgaagaagaattctaagcagtcgcgtggagcgtcttcgtcttctgcctcggttgcctcttcatcctcttctgtcacaatggaggacaaagagatcttcaaggttcacgcaggcatcgagaactttatgttctttgtctgaaaaaaagtttgatcttaaaatatttatctaaataagaacgtctcattaacgcagttcttactcctttttctgattagaaaggatgtttgtgcgtgaatctaatcgttagatatgcagtttgtttgtttccttttcgttgttggtgtgttgaaaatagtttgtatttggtattgtaatgctctttagagctgaaactatgtcatgttatggtattttattatagttttcagactttggattcaataaatagttcatattttgctacttctctgttttgtgaagggcttgagaactcagacatgagtactctagttttgggtttacatgttctgccttgtgtctgaaattccttttttctaaaccatctattcatgtggaacattatctataaggttattttgtgtaatgatcaattgatcatgcatctctactttttttttttttttttttctttttttttttgtcgtcgatcatgcatctctactacatatgcattccaacaaaaaaaacataatggtgctcttgttttcgatataatatcagttatgggctctctgtttttattttattttattggaccttactgatatttcttgggttcatgaaccatagctataccaaatcattaaggtggattttgcacgatttctcaatgtttaatttcatgtattatatactcattgattggttgtttgcagaatcttatttactacattgactctcaagagtcccctcctatatttcatcaaatctatcttttcattttataatttttatgtaatgatagattcctcataaatgtttcttgaaaactataaaaaggtaactaacatttttttcctatatatatatatgtgtgatatatatcccatataaaaagtagcaacaagaaaatgattttagagaagtgataccaaaccaaatgaaaaagacatgatagtcgaagtgattcacacgaatcgaactataataatctatactctatcttattcacattttatcatctttttgtgtttcatgttattttcttatgtatatattcatttttcgtatattcttttgtttttatcaaaataaattcatttttctttttaccccactcattaacataagttagccatatattattataagatttttttcttgccaaataaatgtaagagtttctttttcccacaactcattaacaaagtttggcatatgtaaaaaaaagaatgaattttaaacctaatactagcctttaaaattcaacaattattttatttttattttcttattttcgtgcaacagctggagtgttttttttttttttttttgtgttcccagagatcgagtgttttgtgtttcttctctctatcgttcacatttgattaaagctaaagctttcttcttcttcaattgatgctacttctgatttaccctttctctgcttttttctctcactctctcagttttctcctccttgattcctaaagtcttctcctttgcgtgcatttcttcaattttcagattcttcctaaggtacccttctcaaaattcttccttgttttgcgattcttcatcggttcaatggatcctctttgacttcgattttgaatccgagcttcgttatccctcgattgctaatttcactcttttgtttaggattctttccccaatctaggtattgctttgcttctctgtatctatcgaatctgcattttgttagtttcgaaaattttgaaattagggttcatttgtgatttgttcatacatctttgttagattgcagaatctgttcatcatttttcgaattcacataactcagattagtttgaatctattgagattgagaaatttcttaaaaactctggatttgtgtggattaagattagtgttttgagattgatctctttgtcaatatggttttttttggtgtaggtggtagaatgatgaaatgagaatcgatagataagagtttaaagagcaccagaatctttgttatcttgcaatgtcgacgacgtctttgcaaacgattggtgctattaagtcttatcatcatcaagctcagcatttggttaagaattatctcttagctgatccttttattccttacacttctgtcctcaccggcattttcctttgcaaagtggtaagtttggatttttgtttgttactttcatgattctgtagatctagggacgattgattaatgatggttacgtttcttgttttgtttgcaggtttatgatctttgtcattttatcagcaactcacattctaagacttatatcatcctcacgaaaattcaaagaatcgaatggaataaccggtttgtgtttgatgattgttaactctttttcatgttgtgtgtgtgtgtgtgtctatttaggtttttgaatcgttttgtattgtttggcagtggtatctcgacagttcatgctatttttatttcggctatgtcgctgtactttgtgttctggtccgacctcttttccgataggtggcataatgatcttgttgttttccggagctcacgactttcttctcttggtttaggggtaagcactcattttagtggatccaaaaacgttaatgtaaaagtctatgagagaagaatttcaacattattacattaatgatttgcagatatctattggttacttccttgctgatcttgggatgatcttctggaaatatccttctttgggtggaattgagtatgtaagtacttgttcttgtccaaacactttactctatctagtgatttctctccaaagatattcaaaatcctccttatattctgcttgttgatgtttcaaggcttatatacttgccttgctacattgctcaacattactaatgtgtaaagatagctaacgccagtcgccaaaagcccaaaactaagatcaagttgacattttgatttcagattgtgcatcactcgctatcgggggttgcagttgcctactctttattttccggggaaggacagttatatacctacatggtcctcatctccgagattacaaccccagagatcaacttgagatggtacttcctcttttcttcgttataccatatacaaaacttatcacgttcgcaacctttctcctgacaaaaaagtggattgtctcggtggtcttatgaaggtacctggacacggctggtatgaaaaaatcattggcatacgttgttaatggcgttttcatcttcttggcttggctggtacttacaaatcctaatcaacattcgactcattttgatactaggcatttatgtgtctacttatcactcaaacactttcatgtcaggttgctagaattctactgttcatatacatgttttatcatgtttatctccactacaaccaggtaaagctcactatctagcggttttattgattatgctgatacccaattgcttcaaaaccttccccatgaaattaatacatcactatggtttcatttccggatttttttttatggtgtgattgaaatggaattactttgttttgtgggtaggtcatgaggatgcacatctttggttacgttctggtattcggcgtaccagctgcgctcggtgtcatgaacttgatatggttcgggaagattgtgagaggggtaaagaaaacattagcaaagagatgtgaatgttgagattggtgagtcttcctcacaccgtttcttcacttcatcatctccttacttcttcgtccctctgacatatgcctgtctctctagtgtaagtagtttttgtctgatgaagaaagaaaaacgaaaaaacaaaaatgataatgatacgatcctctgactctgtaaatgatcaaaattcaagtctcttctttacgttttctcattatacaatgtaattctgttttcattctaatagttttggttctagggttttgattcaatttctgctacatttcgtttaaccggagttcgatacagtactaccaaaatgatgaacaactgtttggtgttcaagttctatggaagagaaaacatttggtcaccggtttactatttttttgttcaatattctcagtaacaacaacataactattgcacatacatcaacatagggattgtaattaaatagttagataaagaatcaaagtttagacattataacagctagcagaaaataacatagtgtagagtttggtggaatacatgtatttaaactcggctcgtgaaggccattatatgtctagctgttcgtggttatcgtcggcttataggcccattcagtgaacacaactgcacaatatgtcacatgaattgcgtattcgtatgtcgacatcaatgagttaggataatgtacggatacaaacaaagctatgtggctgattctgtatttagtcttgtttactttaatttccattgtttctataagaaaaaaaaatagtgtttctttcttttcttttgttaaaaagaatagtgcttcttattagaaaaaaaaaaaaaatgtcaacactattcattctaccggttttgatccgaatagtgatagaataatgacatttttacacaaattattagaagttaatcggtgtataaccacataaataaaccatataatctaaagttttttgtttgtatatcagtcacagtaaaacaatttataatcacacgaatagatttttatagattggatttcaggtacaatttggtgtgtcataagttaacatagcgcaccagtctctatctagaaatgttttctattttcatttcattattattattggtcattatttcaacacagctcactttctctgtagaaaagctgcatctgtgaagggtgtgggggaagaaaaagagaagcacttttggccatagagtacaaacactatacacattacatacatcacttcttttttctttctataaacatttgtatatatgaaaaacattatattatatcatattatatttgcttccccaaattggcccattgtgatttattgttgtgacccctcatgggttccttttatttcccctttttcactaacaaataaaatattgaactatcgtgttcataagatggaccttacgtgtgtttataggatctgcattgactatgtatctatatgaagcatggttattcaagttccacttagtattttatttgttacataaggtttccacttttctttaactacattcttagttgttgaaatctagttatagggaaaactcgaaactgaaatagggcttaagttgttctacataaaccccaccaaggtaggattgttaactaagctagggttaaagttaaagtacgttaatatgttgcagaccatatctttttcttttataaaacggtatgccgcaaacttactcacttcactattaactacattattcttaaatttcaactataccatcttaaacttttgattaacaattagaaagtttgtgtcactaagcttttgatgcattgaagaaagagagagagaagaatgagaagggaaccaataatactcaatagaatggcctccacactcttccccttcctttgactgctctctctgccccctttgaccactttctctctcacttaaatgcttcccccacgcacctctctcttgtgcgttcactcacgctccaaatccaaaagtttcacaacttctttttttctttaattgcatgattatgtccatgattagctttcgactacgtccttctaacaccaatgctatattgagtaagttgcattacatttacgtgtatccgttcaagtcttttcataatctcaaaccgtctaaatcaagtatctctctagctaatacgatactacaatgtagtttgcgttcatatggttatgaaaactcaaacatatttagataacaagtaacaaaagatatggttttgacctaattaaaaaaagactaagcaccttaatttggtgtagttaaattctatatataggaacctaaaatatttttaaccacataaatattatgaatccatatctagtctaaacttattatgttgaaacatatcgcattaggtgatatgaaattgatccacagtttaaccatgtatattaatcaactttatatgatcacatttcaatttatattgcatggaatcaacaatttacttaagaaaacattgagagtgatgaaaacaagattaattaagacttcaatatcaatttatgtactccgatcatcacgctcaacaatttaatcacttccctaatcaaattaactacataataatcatttaaattactatggtactggacctccttgatgctaattattatggcgagaagaagaagccagagcgaaaatggagctagctagcttattaatggcttccactaatccattcatgccttctctattcatctcaacattagattcttcgatcttgagtctcctctcttgtacgttcatcacttctttatgtctccgatcttgtctctcctcactctccctaatcgcgtttgcgatcactgacacactccttgataacgcagccgctactgtcgtctcttcatctctcttactacgtccaacctcctccacatctacaccgccgccgctgggaccggcggttgtggttgtcggcattgttctccttctcttcgccggagatgtgtctgaatactcacttgtatcagaatctgtgctactatccttcttcaaccaagttatcaaacataatccaaaccaaattactagttaatataaaaaaatattaaagataatgtaatgtatatattatttgtacttcttcactgaaaataataaagtgtttaattaagagttgtatcaaacaaaagtatacataagagtgtgcattaaactgtatattaaagattttatttctcaagtgtaatcagacataaattacaaatgtatgtttttctttaaatgtcagattatttaactctcaaataataaaaactaaacttagaagttaagaagagagagaaagaaggtacctactgtgggcagtattggctgagcatgaaaagaaggcggtggaggcggtggcagtagtagtggtcgtggtaacggctgagacggtggtggtggcggcggtggctgaagtggtaacaaaacaggttgctgctgaatgatttgatgtactttaggaacaacaaatcctaaaccttgttgtatcactttttggatttgtccaccgcctgaaccgtttccactactaatagcagcagcagcagccgcaactgcagcggttacagcggttacggcggtagaagaaggaagcgttttactctcaacaacttcaaacaaagcttggtatgtttgaggtaacatattacttggtaagcttctctctttcctctcactcttctccatcttccagtacgacgccgtttctccagctggagctgaagatgaagacgactcaccggcggtaatagacgattctacccttcgtctctcgtactctctaacttttttgtagtctctcatgagattgtcccatttgtcattgcactgattctgacttctcatacaaccttttctccaacagtaatcttctatccacttccaccgtagctccgccggtttattactccggatatcttgttgctgctccggcggtggaaggccgatggaccgccgcatcctcctctcatcatccatcctcttggcctcaatgagaaccatcgtctcattcaacgtccagttgccttttctgtactctctcatcataaccaacccaccactttggtcagccatgttttcttgaaatcttgaaaaatcaagaactagagagagagagaggcttttggtaggtgttggagaaaggggagaagaaagggattgtcttgaggtggggataggtgtagtgttatgtgtgtttaagttttggggatagttctgattattattttattttgtgggtgtgtgattgagaagactggtcaaaatctttttgttgtagtactaagattgtcaccaagtgcaatgagaaaggacaagtattgcaatattgggagccaagtgaaaagaaaactatgtaatgtgtaacccattcattcattaaattttgtttgtttgttttggcaacattcattcattagtttattaaactgaccattttcttttctttcattttcttataaaatgttcattcattcatgtctctcttaatttctttggggacaggaaatcttaggtgaatctagcatttctaattatgtatacaatttcaaatagatggagttaatgtttcaatgtttcataaaatctacttccccactgtttcttaaataatcacaatggtgaacatttgtgatttgtagatttatcaaaaacgaagtaaatgtggtacgtataaatttagagaccaacattattggtcacaaatttgtgactatttagcaacgttattgtgactatatttatgaaaatcagatgagaaattagtaaatgaaaatcgagaagaacatatctattgattttttttcttgttgttaggtttttcaatcaccatttgctacatatttaaataccataagttttctatgttatgaaaggtaggcagagctagacgtgtatatatacacgacaaaatatcaagaaaaccacaaatgagaacaatgcgatttcgataaattttattagtttaggaccacaaatagttcataagcggtcttattcaacaaggcaattgcatgagtgatgtatctgttttcaaacttataagaaattggaagattttggaggcatcctatgtagatctcgtttccattttaataaaacaaataaagtgatgtatatacttttttcaaacttcgaaaagctattggctttgcatgatgattgcttctcatactttctttttaaaaaggatttgatttacgaatctctaattcatgtgcacgagctataagtagaagagtatagttacttttttaattgtctttgccttgaaccttatttatgcgcatgtatgtttgtagaatatgtgaatgcttagtttccttattaatataattgtatgacaattggactcctgtatagggatttcttattaggtttcttacacaaaacatgtttagaaatatatacacacatgaaacattcctcggactggaaagtctcatagctagatccaacatagaatgaatataacatcatgcaaattttcaaaggacatcaaacaaagttgtacataactacatatatatatccttcaaaatttgaaattaatttttagttaaaaaaatttcattttatatatcatttttggtaattataagatcttatatcaaatttgaatttttgtcatatctgtaatcaatatataaatttttgtgaaaagtaaaaaaggtttaatgcaaatcgatttttcatttcaactacaatttctagcaccaaacaattatttgttggttaaaattttatattatgtaaatattttagaaaatctactgcaatgtgaccttaaagtttaaacgcatacaaatatttttttttcataatttctcacagtaattagatgtatcaatgcgttgcatggtgcactcataacttcttcttttttcttaaacagtatcatttgctctaaagaactttctcactaatcaaaatagataaaataatatatggatactaatttgcgtacactacgtaagttgcattgcatggcgagggatattattacatcccatatgaaaaacacagaccgttcatcattgtctgcacaataatacgtaaacaatcaagttcccacgttacaagtctacgatacagagatataagtctttcatgaaagtctaaaaacaaatgatttcttaggaaatgtaatgtataagaaaattacgaccaactttttgaaatatatatatttatatccaaattttttttggatgatttatacgcgaaaatcaaaattgtattttttcatctacatatatatatatatatatatatatatatacattactccgaagtccgaacaaacaaacgtgtgtatcaaataagataagtcgatcagtaattccagtgccggctctaggggagtgctagaggagcaaaagcacagagtcctcaattattttttcaaattttttttcaattttctttaaggttttagggtccaaaattttcaaaaattaaaaaccaatattaactaaagtcagtttttataaatcagcacaaggtattcaaaaagtttgagccggccctgagtaattcctatcagttctgtactaagaacattgaactaatactagtggtattgctcatgttgtcatgggaagagccttgtctacatgtaatttatacatccgaaaaaaatgtttgatttcaaataacttgttgatatattgcaactctactttacaacatcacatatgttcgaaataaaaaattttcaaaaagctttcaaatatctttactttgtttttattaaattttaaataatttaagacgtctttcatgagaatgtgtgtgtctattctatacctatacctacatatttataagtatgatttgcttcaaagtcgatgatatatcaataaaataaataaagaaataaaattaaacaagtaaaggatctatcgaaatttgcatggaggagtggattgaatcatatgtagttctgcatgcatggatcgtgtatgcttttcgtaaagatcatatctcttagaccttcaaagtttatttgctttaaataaataaatcaaatctagtatcaaaagcatacatgaatcaataacaagaccgacgttacatacaaccttaacaatcattaaaatgctatgtctctatttctctctctcgtcttatttatgtttgtttgatggttgacatgcatgccactataattagtcacgtcaaaacaatgaaaccctaaggtaaaagtatatactttaaatttttaaaatgaatattcttttttgtcatgatatgatcaagctattgatattttgttcttcttaaaatagtgcttgttcaaaatatgaaatcgaaatctttcacttcaaaccaaaaaaagaaaagaaaatcgaagtctatacatgcaaggagtcgatagtatttgcaaggaatttgtggtttcaacttccagtaatcatgactcatcacgaccctataagtaataatatgcacaaaatcaaaatatacagtaattaataaaaactaattacgttgcatcttttttctgtactttttcgaagaaaacggaaagcgtgttttgtttcttctaaacggacgctaaattcaaatcttggatgtgcctaatcgattcaagtagctcagttttggacgtccaccagaatttttccgataacattttcgtttatattaatatgatttgctaatttctaagatttctcggatgatttgatgatatggttcacttgatgctaaattactaactaaaaacgaaaagaaaagttttgtggtgaaattggtgatggaagaaaatgaatatgaggaacttgatggatgctcagaaaatttaaaatagaagttgattaagacattgaaaaccactttaaaactatattgtaaggtttcttaattatgtgataatatatcgtacaaaatttataagaattactttataatagttttaccttaaaaataaaatttgatgtgtaaaattaagagatagttagttcaatatttcactaaagcaaataatataaattaaaacctgtcaaaactaacgatgagtaacaaaaaaattacacaatcgtcttatcactttgcttttacaactttgttttgcgtttttcagttgaaaacatctaaatattagaaatgatatcattaaacctttgatatacggtcttcagtttttttgggtgatcgtgtttttgaaatcaagtgtttctagatatgctgatgcgttgttgcttcattaataagacaaatttgttttcgacaattttaatattttgattttgctaaatctgtcgtcaattaagtagaaaaataattacacgaaaatatagtagctatgatggtgttaattaactgaatgggatgtgatgactttgattgaaatttacattttcatggttagaatatccaaaacaatgcgtgatctcaatattttcttacatatgcttgaaattttgttgtgaattgttttctaaaactacgaaataaagttggtaaagcaaataatataacgattgtgtttttctttttttttgaaatccaggaggttctggaccgaagcctctaattccccaggtccaaaaccacagcatgtaatattagtttcgtcccaagcgtcactcgaaccggcgacttctaagtttcgcgtaggatttttaccaattgagctaacgacacttggtatagcgattgtgttttgcttgttagtttttaagtgtttttctttttttgaattttgtcttttttatttttgcaaaaaaatttgtttactccaaccttcaataatggattgaatgtgggtaaagaggacaacatggtacatttctagccaatttgattttttaaagagaggattatatgagaaaactaataaacgagaaaacaaaagtccatttcgtcctttaggacaggacactgaaaagcctgcgtcgccacgtcagcttttttcaagtaatttaatagtgtgccagctaggaccccccaagtattccctttgaccaatcacttttgtaggtttgcaattgcaatgcgtctaaataacattatttttgcaatccttttactttggttttatattcattcacttaggtaaagtgatatcataaaatatccatacgaacacttctaacatccacgagctaaattgactcaactcctctcaaaatctaggttttggtcatttctttcaacttctcgttgcaactgtaaatttatgggacaatccataactatcagaacgagatgatttaagtgaccgaaggaccaatatgatacataaaaaggttcgaagggctttttaattcatgatagggctttttaaagggcttagcccatcaagtaacatatgaataccgaatatgttttttttttctatttgatttaaaattgttgatttatcaaagacagtagctgaactgaaccaatatcaattttcgctctgcttattttcataattttctttttatgtatggacaaaatttctttatatcaaatcaacaattttatataacaaagttttctttatacttgtttatttcattttgtcatattaaatctctgttaagacagtgttaatcgacgtctatcttaagcccataaagtttagagctaactttggacaatgcttaagagttaatacacataattattatatattctaaactatttaattatttccagatatctatatatgctcttcctcaattttgtttattttgtaaatttatggtttagatatatatatatattaatatatataatattttatgtataggggtgtgctattttttttattaatcaatgatgtatctttaagaaatataataaaaacaaaaatcatattcgtttatgaaattttttattaacaagaaaaaaacgaaaacataaatgtataatttaaattttcaaaattagttggtaaatcttactgccccatttaaattggacactaggtccccaagtgttgggcatgcctttatatggtttttacttttaatgaccaaaaagtgtgataacccctcttgggtcccaaacttccttaaacaataattatacaaatatgttaagaacataagtaaaataaaaaagaaaaaattatacaatctaaaatgttaataggtttatatgtaaatttaccatttagctagagtcatttacaaatttgtgatattcttactaaacattgtaaaattagaatacgtacgaccaaatatgaacattgaacttgtcacatatattgcctcattaagtaataatacgtatatactgtcaatctgtcatccaaagataggtatattacttttcttcgttttcaagtaaataaaagcctcatatagtactaaactaattaattatgcttacaaaaatatagtacttggattgagatatcataaaagatataaatatgtctttaaaaccttactctttaaaatagaaaacagaaaacgttcactagtcaagttaattcttgttaaactcgacaagacgtgaaagtaaataaggatatgtacatgcattgtcgtcgatcttatcgcatcttcttctttaataaatttcttgctcaagattacaacatatttgtcggctcgaccacgataattccccagataaaatttaatattttctttgcagttttttagtaaacaccaatggtttgcatcttttgaatattttaatgaattggtgaaattgagataagttttacgtatccgattaatatagaagttccaatggccataacaaatagttgcttcatggttgcatatttatactacatatatctattctatataccaacttgttttttaactgcacgttctattatatattattatttaggagttgtttcaagaaaataaaatcaaatgtcaatgtttcttattgttaaaaaatttctagttcttagaaaaacttttatcatttgaaaaattatattagtaacattttaaatgttttgacatagtggagtatcttatctagtattcttagtatgctgacataatcattatggtaattactttattgaattgggtttatattgacaaacgtaaagtttgataatttcatttcaataattgttgatatacttttctcacattacgcttaaacgacaaggcactaaactatccatgatgtaaccctccaacaaatcaacatttatatttccaaatttccccttgcggtcaccaaaagctaattactttccttcttctatttatttcaatactaaaacataaaaagcccaattccaaaagattacacttgtctttaaatattttcggcaaatacttaagaaataaatgaagaaaagaataaccggcgttgaagattttgggttttttttttacttagagagagtatatatgaattctatactatactcctgctgttctttattaattgattttttagaagaaaaaaaactgtttcaaaaagatttatttttaagatttttttatgcactatgtattagttattattgatgaatttattattgataaattttaaacttcaagataagtaactaaataccattggtttataattatagaaaaatgtaaattacaaagactgatacatttgtaatcaattttaatatattttttaaatttgtgtgttttttagaaaattaatttaaaaaacagatggagtatataattgataattttttagttatattagaaccagcaattttaaaaagcaaagttctggttttagttgagtgaagtgctgtccctgacctacaacagtacaacctaacatactagtgttttagacattaatactcattaacaaaaatatttgttttagacactaaaactggaccgggtttggatttgagtattatgtttatgtattttttgttggcgaaaaatcaatctttgtctgaaaagctacatagccttgactactatggaaaaagaaaatttatccacaatgttacatgtatcgtatttaacaatttagatataacaaaccaaatatataataggaatttcgatcacatatgtatagcactttcttttttattgttttacgaactttttttgctagttacccggttcatcaaaatttaatttgttgactgtgggagtcatatatcttgagtttgtttggccaataatctaaagctaatggatgaacgatcaggaagatgcaaactacattatccatcaattactccaagtcgtggccaaaggcaatattttctcatcaaagtaagaattcaacgtctaacaaatattcaaatcaatttctgcatttgcagggaaggagaatgaagaaaatgaagtggcaagcagtgtaaaactatatacgattagaaaaaatataacaaattttagcgaatacgattataaaattatatacccaacatattctttgtatgtatattttttaacataagtagtgagcattaatgttgtcgacgaaaatttcattgttaggtaggggccataatgatatggaagtgatcttctgcttaattaattgtagttttaaagtccatgaccagttcttttcattgagaaataaattcctctccaatctaaatctagttttagatttttgtttaccatttttttatttgaatttccatcaaccgaaagagcttttcttttggtttgctttatttcttttttcatgctctttcaaccgtcaaagtaacgtctctagtctctttgtctacttcagttaacagtcttctactctctctctttcttttatcttttctctttttgtttgaacctcttgccttgaggaacaaagtgttgaaacataaattaagagatgcaatttgtaagaattcatacacacaaaagatatagtcggaacattggattatgtttttcaatctaagtaacggaacataggttcatatactgaatttgttaatgatttttaaaaaaaatctcatacagtatatatcgtttgtataaaatttattagatttaagtgataatttgattgattaaagggaagctaatcatcaatatcatgctgaatacttttgatcatgagagttgctttttgattatattataactaacttcttgggatgattaacttaaaactatattaatttcatttttaaaatggtttagttaggtatactattaactcatggtttgattggtaatttttaaccgcctcgtctgtaaccgaaacgctttgaaagttatcaataaataaagcgattaaaagaagcggttggaataagtagattgttgtagagagatgttgggagagaaaaaaaaataagacggttggatttgttttttatttatttataaattcacatatattaatcataatttaatttctttttattatttttatttcaacgttcctattatttgaccgcttgttatcaatcataaccataattttacagctcattttaatttattcaccttctcttctgcttgctctaacaattttgttcaacaactgctaaaaaaactgttaactatatttgtgaacgatgttatcaatggaaccctcagtcgtttgggttgaggaaattagaaagtaacattattaagtcagggagaggttacaaaaagaagggacaataataggtaatcaatagggttgttgcattcttaatttgacaaattaactaccactgatttttataattacaacaagagttgaccaattgtaataataacactcatgatgtaatgacaaaattatatattgcatgagtagtttgtacattatatttcgtaaaaatgactaattcaaggaccccatataatgatatatatactctacttcttaagtaaagttacccaagttttgttccaaaaaaaaacgtatagttacctaagtatgactattagaagggggctatttaatttaaggattgtcaagaaatattaaaaacttttcaaacaagtgtttttttataatgttaatttatcctctttaccttttaattcaaatgttgttttatatataacttaaattttgtttgctaacaagtatagctttaggttttcaatatagatttttgataaaactatcgttttaatgtatgaataatgaaaaaaaaataaatataataataacttaataaggggtaaaatccaaagtttgttttagaaagaaaaaaaaatatgtgaaaattttaaatgacacttactgtggaacaggtggagtattactctttaattaaccacattttaggttatattttcctagacaaagaatccatagggataaggagtgaatcctgaacaaaacccaattgagcccaatgaataaaaaagacatccaaagtaggtttgaaggaaaggatagtccatgctccctccatgtagagtgagtgatggtaagtaaatgtgtcttatgaagctatcgacaccaagttggagataaacaaaattgaaaagccaatgtacgtatgatgttgattcaggattaaaaatttataatatggttataaagtaacatatatcgtggatttgaaatctgaaaaagtcacgtactgtatgttgaatatgtaaggtgtgttaattgtaaatcattatataataacaggttcaaagaaaacgagtagccacctgccgatgcaaatttttttttgccaattacagacaaatcaaagatttgggattggagaggagaagatctattgaaaccgacacattaggtccaaaacatttcattttaattattatgatttaacgaaatagtaaaatacatatatcaacctttttggtccggtccctgttcttacgtctgtgatcataaagtatagagtgattttttattttttttcattatacaaattacaaatgactaatttaattaattagtgaacttttaatttgtcgataaccaataagaatgatggaaaacggcaaaagagtcgactgttgaagtttgtcggaaagacactccaccaaaatataaatacaaatcttatcactagtggaaactgtcgagtgtgtgtagttctcttttccttctaataaaagaatattatctttctaaattcttccaaattcattttggaattttctttcctttttctttttgttgacatgaaattttggagtcttcttctatcgccaattacgactaaaaaaacgattttatatatatcaacatagctctaacaagaacatgataatcgcaaatatacatagatttgcctatttgtacacaagcaaagttagttttaatactcagtatattacatctcatgaaaagaatttacagttttttctattaaagctgtgggagttttcttctaaaatgtttttttttgtcgtccttgtaaaatgttctacattcgtcattttcaggctatctttgatttcgaaagctgtgggcgttttctttttttaatttttttaatttttttttttttttgtctttttctacgaaaataaaatagcgtgcactgtattgtttctttcaactttattttttgactagtgaaagactagacattttgttgccctgcccctatattttttgtgtttattttaaggttgttttttctctttttataatgaccgtaaaatgagtttttacaaaatctgcttcaaatatgtaatgaaaaccttgataatatgtaaatgtactaaaaacaaaatcttgatatgggtacatgtgaaaatagtatatttctgttctaagaatatactgttttatgttctaaaatatcaacaaatagatatctttgcatttttttttatacatcaatattagtattacctacattgtctaagagatgtaacccaacttatgtcgcaactagaactacatctcagaaatcaccgagccgagagaaaattgtaagagtcctcgaccagcaaaacgtaggaacatcaactcaaagcagtcgagaataagaaccactgacttgcatcaaaacagaagatctaaccacaccacacagaatccgaaaagaagacatccaccatcgtttaaactttcaacccttgacccaaccaccggtgataaagacttgtccattatagtttactaaagtttatgatcaaacttaaaatatctgttgttagattgatacctctaattcctttgaattgcttcttagatttccactttacccttccacgatttttaagcaatggaaaattaagtttcatttgtttcagattttaatattaatccccttctatgcaaattgagggaccacgtagaaagttgtgagaatctcaatacacaaaagatatagaaacaatgattacatgcacaagcacgaggccataaatttccttatcctatacacattttcaataaagatgtaacattccaaacagaaaaccctcttgtagctcactctacaaaaaaaagagtatagaattccaatattaaagtttataggtcgactatttcaaaaccaattgctataaagtaaattgattaatatttttatactttcttcgatttataatataagttgttttggaccaatttttttgttttacaattaaattgtttttaagtttttatgcaaactatatatttattttaatattttataattatttatattatgcagtctcttttgtgattggttgaactttttaaaagtaaatattcttaatcttcgtacttttaggtaaaacaacttatattgtgaaacggagggagtatatcatttacaatttctctttatttagttttgtggtgattccgaatattaattacaacttgtaccatttaattcaaccatattcgaagaaaacattaaaggcaaaacaaattaaggggaaaaagaaatcaaaagttaaaaaaaaaaattaagaccaatgagaatagataaggggtaaaagacaaaaagagaatataaaaaaaacaaatagcatttggcgccaaaagtaaaactaaaatggtcatgtcacgtgatgttaatttttgctctacgaccaaagcaaaacaaacctaaagttttccaaatctctgggtcccactctcagatgtgctgacttttattttttttacttttgtcttaaatctttggaaattttcagttttaatttaatttaattcatctctctttctcactctataaatccccacagatccgtcacacttcacctagagaccctcccacagctttctcgataactgacaatccaacggttgagattcagttcttctagataaattcacatatccaaaggacacgtggcggcgagagatgaaagaaagtagccggaagcaaggagctgcgtcaccgtgtgctgcgtgtaagcttttgcggcggcggtgcgctcaagattgcgttttctcgccgtattttccggccgatgagcctcagaaatttgctaatgttcatagagtgttcggtgctagcaacgtcaacaagatgcttcaggtttctttcttcttgttcttcttaagaatatctaaaacgtgcttactcatatgttgggttaggtttaattaggatgattttcttgtttcttattttagatgagacattactatcatttccataactttttattgacaactaccacatgggccgacccgtttatattataagtttagggatttaaaaacaaaattgttgaattttaagaatttaggaatatgttacatttattagctgatgttgaattttaaccatattaacttttgttagctaatgttaatgatatgatttacatttcttagctagctgatgtagagtctacatttgagatggattatataaattttatatagtcttgcgagattaattggtctagtggctgacaaaatgttttaaaaactcaacaggaattaccaatccaccagcgaggggacgctgtgagcagcatggtttacgaggctaatgcaagagtgcgggatccggtttacggttgcgttggggcaatttcgtccctccagcaacagatagatgtgttgcaagctcagctagctctagctcaagctgaggtggtgcatctacgtgtacgccagtcgactaatttcccagggcacggactatgcccggatagtccgagtagcagcgggtcaccgtcttcgaagcaagtgagtccacaggacaacaagggcatgtttagccatatggacattgtggatgaagccagtttgggagagtctatgtggtcttgctagtcaataatgctctctttctgctactgcaatttcctcttccttttttgggaaatttcgggattattatatattaaatttaggggtaggatatgaaaatgctctgttttgactacagagtgaaattattaacatgatatagatacataaaaatactaaatatatttatatattataaatctctctctatatatttattagtatttgtaactttgtaattccggggtatttgggatttggtgtatgtgtaggacctttggatcatgatccggtagggttattttgatcatttccaaccgaggagggatctttgttattgacctaatgtaaatttgtgagatatattatttatctatatctatatacaattatgatcatgtaacccatggtgtgtgcttgactctgtgagcatattatcgtgtaatggtcatctttgatactagctaagtctagcttagcaattagcactaagcacttgtatgggcctgaatttttattatgcaaacttatggcccatttgtctttattttttggtttccttgcaaacatttgccatttgatagtcgctgatagaatcgctcgcatatgaaggaaacagaaagaccggaccggagcatgtgcttgtggtaagaaatttacagtgagcttaagaagaaacacaagtaatttagtctattatagttcaagagcttctcctgcattcatgcaaatgcaagagtggtaaaatagcattatactaagtaaatttggttatgctcctgtgcgttatatcaggatattcccttcaagcaattgagcttcacatagcaatcactagaccgcaaaatcacaatctgtcaatcaccattttagccataattctttctacttgcgcaatccaaattttataaggttttcgacaatgcattgtttttcaataagtacaatggaaaacaaagagattagagagagtaacacaaaagcagaaaacaagttccctttttaaacatccttagcaatgagatcaccattgagaaactctctgtaggcagcaacgggccaaatgaaaccacggaagatgatccgactagccaaaggaacatcgatgatgatctctttcatcgcgggtttcttctcaccactaatagctattaagtagcttcttccaacccacccgatccatccagcaatgtagaggaaaagaatccctggagtaatgaactctccccaatgccgctggtctccgttcactatcaagtgcggtaaaccgtctgacccgcataacaatccgtacttcccgtagttgtcgaacctaacatacattcataagcacatcaacttcaaaccaatccacagttccacaagctcctcaatagatcatatcaatgatcaaatttaacatgtctagcaacttcgaaaactcactaactcaccaaaaaaatcatactaaagcaatggatctagcaagtaattcactaaaacagagaaaaactctgtttcagaacagaggaaagctctgtttcagaacagagaaaaagctctggtttaacgaagaaatagaaatggaagacgaacctgcgtttggttttctcgatctgagcattgagagcaagagcaggggcagattcaggagcgtagagcttaagagaagattcaagcttcttgatctgttgcttctctcttttagcgaactgttttgagtccttgcaaggagtcaaacctgagatatcagcgacagctggcataggagcagagaggaggatggaagagagggcgacggcggcggagaaagctttcatggattgaggtgtggaggaggaggatttgtcatcggagcagacgaatcttgcggaggatttaggtacggattgagtgagagatttgttagatctcgggttgagaacgagattcgccgggatagtgagcgacatggcgctttgtcgggttctttggagatttcgaattctagggttctggagttttgggtgaagtgtggagagaagacttatgggaggagctttagattcttgaggggattagtggagggagaggaagataagagaagtggtcttggggtgatgaggtggcgtgttgtgattggttgataagtaacatgtcactggataagagattttgccgcggattttaatagttttgtcattttgatgttcaagatatgtggactacacacgacttatcttttatttatttttaatatctatacatattatatatacactgaaaataatcatatatatatatatatgtagcaaaaaaaaaaagagatgtagttttttagtcctgattagttttttttttggcaaatagtcctgattagtaagactgcaaaattgagtcttttattggttaaccacataataagaaaatgggatcatgagtttgcaatatcaaagaattaaatctatatatgaccaaaataaacattagcagaattacaactccttctaccattccgccggaaggaggctacattttttgtaatgtttgtttgaaatgcttcacagatatcttctgataagatctcttgatctgtctctgaagtctcaacaccttaattagggtttcatctcttaagatatgcttttctttaaagttttaccattttttcaatgtattaactgtctatttcctggcagaagaaacaaatttcttcacatttacccatatatatattgtttatagcaaaaatatttcgtctttttttttttggtctaattatatccgagaggagaatttggttgtgttaccacatcatactttgaagtttgaactcgttgaattaataacacgcagttctgatatatattattcttttgtgaaagaagttctgatatatttctagatgttttttttccttttttttcttttctagatgtttcttatagaataatcaatgtgtaaaccattactagctttcttatttacatcaaagagataggaaaatacacaaataaagaaggaaattcatcccaagaaaactaaagacaatcaaaagattacaagttacaacaattcacaataagtcaaacaaaagcatcttccaatagagacaagcaagacagacaaagaagagaaaatgaaggaaaatcagacgttgtgagaattgtcgggcttggcgtgtggagacaacggcggagaggaggcggcgatagcaccgggaggcggagctggagctccatacacctgaggatttgtacggatctcacgacggccgcgagattttccgaggaagtagcagccaaatccgagaagtagacagaagaaaattagaggcagagatatgaccacaaccaaacccatcgatcttgactcttgagatctatgttcaatcttctttctgattgatttttattcttggactcttgttcttgctttgattctacttcacatgtatttatatgtatgagtttgtgggaggctctggaaggatccgattctgtccgcaacgtttatgtcttgtaaagctttaaagcttaacgtttaaatctcaacggtcatctttttttttggtcggcccatccatacgatttcttctagtttttataatcacattagtcatgtctcatgtgcttttctggctatgaaagtatagagaatcaaactcaagttgacaagttaagttacttagaaaattaaagtaaaaattgttaaatgtgatggacactcattggatttgacgatttgtaaccactatttcattgtaatgcaaataaatatgggactattgatggactcatgcaaccagcaatctcaatcggcctggtccgatcttacacatagctcgatcctattttcacatgtctagcctctttcttgaatgaaagatattcatcataaatagctaaatcccaaataaatatgttaaagtacgattcgatgttaaacaaaacaaaatgattcgatatttaacagattattggtaaaatgatccaaacccagtgaaacagcataatattcaaagtatcatatccaaattgcaatcacttttttcccatgaactccaacaagccatacaaagagaaaaagatatcttcaagagttacttctcagagaagaccaaaaccacccctaagggcaagaaccagatgaagaacagagcctccctctatgttgtagtcctttgccgttttgtcatcagctagctgttttccggcgtagattagcctgcaaacatccatgagatatataagcatcctagaaatactaatgagaatcactgttatatgagacagcatagattatcagcttgcacgcagagtagaatcgtttgatgccaaaagcataagtaaacacactcgaaaggagctgcaattttctcaagagggaagcagccagtcactaaaacatgaaaatcaagtcaatgaaccgcaacttatacaatcaagtaaaagagctgagctgaaaggagctgcaattttcacaagaggggcaagtcactaaaacatgaaactcaagtcaataaactgcaacctatcttatacaatcagttttgactcaaccacacaaacaactctaagagagctgagacagatatcacaaagagttaatatagttcaagactcaatgttcccaaggcaaaaactttgcgactcaattcttctgaagtaactggaaaaaaagaagttatttacctttgttgaacaggagggataccttctttctcctcaacacgttccttaatccgatcaatagtatcggttggttcgatatcaatctcaatttccttccctgtgagagtcttcaccttaatcatagtcccacccctaagcctcaataccaagtgaagagtcgattctttctgaatgttgtaatccgctaatgttctaccatcttcaagctgcttaccagcaaatatcaacctctgttgatcaggtggtattccctctttgtcctgttttcatcaaatcccatccattcataaaccaattagaagaagaccaaatcaaaagatcattaacaataatcttaatccaatcttcttaaactcagaaacaattaaccattctcaagcaattcacataccttcaagtgtaccataaaacataaacaaatacgaaattaagcaaacacatgaaggattaagagagcctttgtgcttactgttacacagaaatctaaagaaatcttaacatcgatcgctagataatcggggaaagaaaacctaaaaatcaatcaaacaaagcaaaccaatctgtgtctccaacaatcaaacaaattcatagtgcaaaaccctagaatcctaagaaaagcacgaggaggtggaattgggagacggagaaagagagaaagagaaacctgaattttggctttgacattgtcgatggtgtcgctgctttcgacctctagggttatggtttttccggtgagggttttgacgaagatctgcattttttttttcctttcttcgctgaaatggtgtttatgaatattattacggacgggaaaagtattatatatatacaaataaaatttgggatatagttttgaggattttggaataaaaatactttttgaaagatttggaataaatcctttgatagaattcgtaattagcttttgggctacgctattatttcttctccatttcttatataattttactaacaattttaaaaattatctttaaatcaaatatattaatgtggctttaaatatattgagatttttttgtttgtttgttattttaggatatttaacttttaaaaacaaaaattaaaagagtttttagattttgtactaaaattagttttcttagattttaagaaaatatggggacattgaattttttttttagttttagaaccaaaaacgaaaacaacaaattgttgacattcaattttgttggaatctagagcttagtgcaaaacccactagtctctacatactatggaccatgttgtggcagtgagtggtttgacgcgaaacctcttaaatactatggtcaaagagatcaagctatgttcaattttagacggtgataaacctgaaaggtcaaatggaagaatcttaaaagctcgacaacatttcattggacttgaatgggttgtctctctagctagcgttttgttattataaacgcagactcatcgtgaaagaattcaccctttcatgtaggtattggagacgcttcacgcttgtttggaccatatgtgtatcccaatggcatcataccaaaattaaagacatctctctaaccgttttcttctcaaccactaaaaagccttttcaccatctttattcaaacttgttcacatatagaacccatgtgattttaaaagtatgaaccatatgatagattacaagatggtccacattgacgtgaagagctcatataaaagatggcctttatttcttgtcaatttatcacaaagaggtctctcattaagcccaatggatcggataattttaaatccaacccaatagatcacttttctcaattctctattctaaggtttttaagctttggtttctacatataaattcaattaattttctgctgattttttattttcactgacatatgttagctttctgaaagttggtttcagtcaattgaaaattgaaatcagttattcaacaccacaataaagatgcaacgaaaaaacaaaaacaagttacacatagctaacgccttacaatgcatgagaggactttataaaataggtgattcttatccatatttttgtatgtctacatcttgagttgttgaataaacgtggtttgttctggtttactccaagttggtgagtctcttaacattatagcatcaccgatggcttttggtcagttttggtatgcttaatcaatctccataaaatagaacagataataggtaaatgaaccattataaatctcatcaaacttaaatattaacttaaaatcaaatgataaaatgaatcgactccccaatgtatatatgaataaaaggtttaaatgcatgtagcggacgaaattcgctaaacgattagcgaattagattattatatttttgggatagataacaatctattgtataccaaatttatttctatgtacaaacggatcatagttagtccgcatcagatttgttatattttttgacatgtactactataaattatactagaggttcactccataaacggattcgtccactccaactatcgtaaccattcgtatccaaaattttattttatttgatatgtgaaatttctaataattgtacgttgattcataaaggagagagagatattccatatttccacaaccaaacagatttttatttttaactacgagttgaataaaaattatataaagttgtataccataaattaagattaaaaaattctgacgtgtattgtcttttcatttgcagtgcaggtattaaaaaataacgacaagatgacacttttccaccagaaaaacgggaaaacagaaaataaaaaaagttccgtatactaaaggaaaagaataataataataataataataatatcacaaaaaaaatacgtcagcaaaaattcggttgactcattcttggtaaaacatgaaccgaaaccggttcaagtccatcaggaatctcaacattccaaatcttcgccggctccgccgcaacatccaccacaacaattttcccatcaccagtaacaacacaaagtttaccggaatccgccgttacttgcgtagctcctttaagcatctcttctccaccttcaaccacaaccacttctctccactctctcttctcatcatcgtactttctcactgtccctctcctctcatccaccgaataaagaatctcctcctccatcgccgcaaccgggcctctccatccaaccaacatctcctccggcataggttcccaatcatctttaacgacgtcgtatatagctccttctttaaccgcgtctcctttaacatttaccattaaaagctttcttctatatccaacagcgtctatagcttctcgactaaaccgtaaatctctcatatctctcaatttctcccaattaaaccggtggttattccggttttgttcggttagatctaatttctcgacagatttcgcgacggttgatgagaactgagaactaattccgcttgcgatgtagatagctccgtcgcaagctccggtggcgcaccaccgtcttggagatccgattcgaggaccggagctccaggatgacgaaattggatcgaaaattaacgggtgagagatcgccggagagagttgttggttacttccggcgatgagaatgagttttccggcggcggagacgcattgaatcggtaaattaaaggagataaacgacggatgacggtaaagaatccggtgaagaggcgggtcaggtggtggaggaggaagcggataccattttgaagaaaccgggttgaaacacataaaccggactgacgggttgacccgacccgtatccgatgttgaatcgacgaaaagagcgtagagtgacggaaacgaaggaaattccggcgagtaaagaagacggcgccaccgtgtacacacggcggagagtaacgacggacggtgaacgagagacagacagatctctgagatgtgatcgggaagtccttcgattaaagcggagttttcatttccggtgactgttcttcttcgtttcgccggcggtgattctgcggcggtggttgacattgattcacgccgtttcagttttttttccatctctctctttttttgtttttgtttttttttggagttattaaagagagataaaggaggcgtgaagtgtaatgaatgagagggaaaagtaagtaaaggcgtaggagccatacatatatcaaaatcgaaaaggccaaagttggaaagtgttaccatctctatcataaatacgtaaagctaacttataaaattaaaattatacatttatagcatcacatatgattatagtattcaagtggctatagagaattttatcagtaaaataatattagttatatttgattatcttatacagtattttagtttcagaagcctatcaagtatcaaccattaaacaaagacgtgaagactagagatttttagtaagaattgtggttggtttccatcgagatcaatttttaatatcgaaaaagaaccggtgaacagaaataaaatttattttgtaaaaacttagttttgttggcttaagcttttaaaatatgtgacttcatcctatttaaaatatactcatgaaaaaaacaagaattaactatattagggttactttagcctttttgcggatgagataaaaaaaaaaaagcagagaaaaatcaccataataattattattttttaactctatcaccataattttttaattaaaaagaattctcataaacataaaaaatagatgaaagaaaaaaagaagaagctgacaagtaagtaaagggtaaaggggagaacctaatcttctaattataaaattctattggcatttagtcattattaacttatttccattttcttcattgtcaatttgtcatacaatgcaaatctatattataattatatgttattttctacatttctatatgaataaatttacaaagtttccactttcatctttgtgctagtgtgtataatccatattaatattatgtgcgcatcttattggataatatttttgttgattcattgataattatgataaggtccaaaatctccctttttagagcaacttctattattattttttatttttctggaaggaaaaaaaaaagtgacagagacatccgtttggtgtgtgatccagatccagccttcttttcccaatcttctcaataatggatatgcgttggattttaacgtacatcaatcgtttctttctcctgaacgatcaagttagtttgatgtgtggtgcactgctgctaaatattaattattcgatgtgtttataatctctgtctaactgttcattgttcaagtcttccttttatataagtcattgaattataacataaattactataatttttttaaaagaaaactatccaaactaaggcaagaagttattcaatctacaattttatgtacttgtgggtttagctcgaacactttaatatagtatcccgattgcttaaagatctttacagttcaatatctagtgtgtggcagtataagaaaataacttcaactagtagaatagtttaagaattgaaaaagaataccatgtaacaattttatgtttatgcataaacttgaataaataaatttgcatcgcatatgatacggttcattaaagatattggtatagcattttttcatagaccttttgacgtttaaattataatgtttttgaaagaggttaaatgattcatcatcttagaggtggaaataaataatgttatgttttttttaaaagtgcattaagaaaactctccctttagaaatatagacgagtttagaagttttgcttgagaaaaacaaaggattgatttcattttagttgaattggcctatgatgttagtaaagtggatttgtggtggcggccaccgggcacgtgataatccacgtggtttgcgtgaataatccggcgagagaacttttcaatacttatattataatttaagttttttttttcctttttatgaagatttaaattttgtgcttataaataaataacttataagtttcactttcggtgcatttgtctcttctagttagaggctaacttttggtaagacttgcaaaaaagtaaactactttttcagcttaaactcaaactcaagaacaaagaatttatctcattttagattaatgtatatgtttaccaaatgagtttaacactgaaataattatttttatttttcaatgatagtaaattacatgttctatcgattggaatttcattttgccatttatgttttagtttgagctgtagttatcaaatgagttaactgattaaatgatcataaatggagaaaaagaaagaaagaatgtgagtatatgacttttcaaaacgtgatattgatcactcgtcagaaatgtatactacgtgaaaaaggggttgtgtaatagttttacaattatatatatatatatatatatatatatatatataggtttagctcttaagtctttcaaggcttagaaacttcttttggaaaacttatcttcaaaacggatgtgcctttcttattgctaagagtgttactaatgactgtagactacaatcgtatgttgcgagtggtcatccttcttggcttgaaggggtactcttcgcagaagaaagggtttgtcctctgcttgaatttgagtttttgggttgtatggttccgggtgtggagtgtgttcttttgtaatggcccttcttttggtagtaagaggcttagtgtataggcttgatgattgttgagttgttgttctcactttcagatgtgtgacctcttggggtttatgatgtgaagttcaacccttctattaatataattccagatgacaaaaaaaatataggtgggaggcgtcataactatatacgagtgatattgactaaacttgaaaaataccttgaactttgtcaaaagaaaaatcttgattatttgattttattatgtatgatataggaaaacacacgtatatacacataacacatgtaataatcacattcacatatagttatctatatatatgaatacgagagagccagagagggctctggttgttcttttctcgagcggtgcttttgcaaaggaaccaagttgggttcattaagctttgtgaaaacgtttcgagttttgttttcgattttcataagcttgccttgatcatacccctgactattgttagatcatctaacatctatagtttcaagaggtgcgtgtcactttccacatcgacacttattgtcaattcgataaggtctaccactttctttttacttgtgggtttgacccctagttatacatcactagttaaatcgtatatctagcaaatgagtataaccttcaaaagttaatcctcttatttcgcgatcctgcttttcgagatgggaagttgagactgataactaatgttttcataacattttgagtgacaaatatatatattttttttctttaatcaataatcattaacatgttcaaattttgacatattgtgttcgtcaaaagaatagatatatggccagagattcttcaatatgacctagaatctcggacattggaatgatatttcatactattattattaagggaacgcgtaattagattttgtggtcctcctttgacattagaatgtcaagctgcccaaatcaaatccgttgaccaattggattagattgtctgataaattataaattacgggaaaatcatctaatactattgtttagcaaaaaacaaacaaactaatatttcgttattctaacccaaatacatgcatgcattaggaatttaggatgcgtctcaattattttttattttatttattaaaagacaagttttctggtgaagtttgcaaaagcattaaatgtagaaagctgctccttccatgggacagcacgtatttaataaaataagataattgaataatagaaacaaaaaaaattgattattatagtttggtgtcagtgacaaagacaaaagagtgtcgtcgtctcttctaatttattatcatcaaagctagtgattctaaattaaaatgcttctctgtcgtcctctcttgctcttaactaatttctcttcttttcagaaactaagaataatttgtatttttgtattttaggtagatattttattttctttctctttaaggcaaacttttaatcagaaaaggaatcctaaaatactacacatgtacatttgttaattgttattgctgtcaaaataaaaaataaaatcagtcttgttattaatatcgaaatcacgtgaaagataattgaagagaaagtgctatttttaacaaaaaaaagaaagagaaagtgctattaaatcacacttttatagtatatgtataaatacgataaaagtcgaaagcaatagttgtacttgtacatattagaatacgagattgtaagagttaatcatttatagacgataactaattggtataggcgtatagttattgaatttctaaatatgtgattcccggctttaacttttaagaacgttacttgaatattggtttggaattttgttgtgatttttgatgaacttgtaaaacgtaaaagaagaaaacgatattgaaacaaatcgtcttaatgttagggttttctattattaagtttatgaatgagttatttgaccaaaaaaaaagtgtatgaatgataaatacaacttgaaggcattgtatttactaggttgcttatatatatatgtcccaaatatccaataggacacatgaattttttttttaatggtaaattctatgttcactcgaataggggttttcagtggcatacctgaagcatatttttaaccccaatatatatatggtaaaagatcatataattgggggaggggtattttggaaagttcaaacaaaaaattaatgatgacatacattattccactaaattttgttatatagacactaaaaccaaaatattttaatatatatctaagtgcatgcttcagagtagaaacaccaccacaagtgcttaataatatacggggccaaatgacacccttaagctctttctttgcccatggtccccctagctaacactacattatacagtacatgcattgagatcttaagtcaacttattattatagtgtcaaccctgacatattatatactttatttgaaacatctagatgtaagtaggttgtttcagagatgttattgaaaggatacatgaatgaaatggttggatttacatatgacttatgtatgtgctttaatagattccaaagtctacgtacataaaaccaaaaaagagagagaaggtctacgtacaacgtacgtgttgactagaaaggaaaggtttaaaaccgtgtctaaagtatgagtatattttttttgtgaaagtatttgagtatatactttgagataaaataaaacatttgttaaaaataacttatattcttcaatgttaatttcaatcgatttttgatgtttgcatttttactatttcggaactttgttataagtcaacttttgttggagtagctaaactttacttctggatatcaaaagctaatctcaataaatcatcacagctcgtcatggaaatatataatgcataatttttcttttgtaccaataaattttaactaccgtcatatataatacgaaaaatgttacgtattggtaatgtgtattactccattatataaaataaattgttacgtattgggccgtgtaagtcgtgtttgtattcaaagagaatgtgtggaggagagatggagatatgtagtttcatgcatgtacgccatgtatagtgatatgacgtccaaatcgaatcgtgaaaacgaagaaaatcttagactggctggtgtagtagttaattaatagagtaaaatagagaatagtacgagttatttttctcaaattttaaacaaaattcagtgtggaacaatgaaatgtacgtattaatcaaaagtcgtacaatatttaaaatgacatgttcttcctcttcatctcaaagttgtaaaaataagtctgttcgtttcgtcgccgcatgtagttgcggttgcggcagacgcatatcgaagctgttcgtttcactaccgcagatagatgcggtaaaacgctgcggccgacgcaacgttatgcggcgaaaaaaattaaacgcggattaaatttagcgttagaattaaaaagctgcgattaatatgccaaatgacagaaatacccttaatatatttagaaaacaacgataaaacctaactctaaaacctaacacattcacgatctgaaaattttcttctcttttacacaatttcgatctgaaaaagtaaagctcagcgatttcgaattaaactcggcgatttcgaagtaatgggttttgttttagaagttctctggttgaccctgaagaacaagagatctgttcgcgagaccattcaggaagaagggttatattctactctccacttacctcataaccttcaaggtcggcgattacgtcaatgtcaaggttaatggagctattcacaagggtattcctcataagttctaccatagtcgtattggtcgtatctgaaatctcactacgcgtgccgttggtgttgaagtcaacaaacaggtttcgattactcaaaattctcatctgtttggaagagttttgattgttgaaattaggatttgaacgttattttgattctttgatttggggtttaattcgtctttgtgtgagctatctgttttgaattttgtgatgtgtgattagtattggtttgaaagcttcaagcttttcttcttgggtccttcttttgctacttgtataatttgcaatcaatctactatgattcttagtgatgttttcattttgactttgatgtttatcatttagttgaatctcttggagagctaattttgagttttgggttgggttttagattaagaacagaaacataaggaagaggatacatgtacgtgtggagcatgtgcaacagtcaaggtgtgatgaggagtttaatctctggaagaagcagaacgatgtgcttaaggctgcaacagtcaaggtgtgatgatgagtttagtctcaggaaaaagcaaaacgatgtgtttaaggctgctgctaaagctaaatgtgaaactattagcactaagagacaacctaaaggtcctaaaccttgtttcatggttgaaggtatgaccttggagactgtcactcccattcccaatgttgtcaacgatctcaaaggtggctattgagttgtttccattttcttcattctcttctaagaatttttgcacttgctttgttctttttatgatgtttttgtatcaaacaagactgaattctatattgtacgagttcagattttgttaggaaagatggtttatcccaatcctttacctgttccatttgtatttaaaatcgtttctgcatttttcagaaaactgatactttgggaaaagttgagacatctaatctctttcagtgttagcaatttataccacacaaaaataaacagagagagcaatcgaaacaaaatctctttgtaaagttgggaagtgcagacagaccttttaattgcaaaccttttaattcctttgcagcttcacacaattgcctcctcttcattcattagttaaatgtttgagtttgctatttttgttttaactgagcttatgatttatcacaaaattttattgttataattatatatatttaactaaaaattattactccttaccaaaaaaaaactaaaaactattactagctaaacaaatactttttattgatgtaaatatatttaaattacatttttttatattcagaatataactaaaaaagtaaataaaagaattacatgaaaattatcgtagcggcgtcgaaacgaacaaagaaacctgcggttgcggcagcggctgcggcagcgtctgcggcaacaaaacgaacaacaacctgcggtagtgtttgccgccaccgctaccgcagccgctgccgcaaccgccagcgttaatgaaacgaacatgctaaatatatatatttttttccaaaagttaacggtaaataactcaatatatatagatatatataactcgatcaccttacttatttatctaataaatttataaacattactcaatatcctgaaaaattgagttaaactagtcatgaactagtctttaacagtaacgtaacgtatataagtagaagcactcaattttaattagttctattgaatttgttatcttcgttctatccattttacaccatttatcttactcgttttgttttgtctttttataaaacttactcggtttttttgataaacctaactcctttggttagtagttaatttccttcgttttgcttttccaattctatgcatattgttttaaccattttattactccgtttccgtttgtttcactacaattatttggagctacagtactacagtagtatatagttctatgttcatatcaagattgtcttcttgggaaacacttgccctttgactggatttgttatattaaaaattgtgcaagcacgtgtttgctaaaatttaaaatgagaagctgtgagctaaaagcttcgctgttaggttcatcaactagtctgtctggtgcttcaaaggaatgatgacacaagcaatgatgtaattggcaaaaaggtagttttgtcgtttagtgcttttaaatcgagaggcaggggatagatcagagtgatccggtatgggtcgcagattttgttcggtcccgacatgtttttagttctatttaaatactttataagtaaaaataattctattgtctcgtctctattatttacataaattgtatgtacattaattgtaagggaagtatgtatataactataaatctaaaaatcttagattaataaataatacatcaaaatgcctaacttacatatatgtatttatttatttctataatgaatacagtttttaattaagaagtgaaaatgtctcgtcacacttttcaaataggtcatttggagatatatcacatatcgaacgaatccatgatccctccaggcttcatccagttcactttgacctcactcactcttcttctttctttcagaaaatgatttatataacttttcttcttcttttaaacatatatatttaacaattttttataataatttctatagaattcttttaatatatatatccacaaatccacatagttttgaataatctttagataaactagtcctctccttcgatgaatacttcacgcgtactagttttttttcttcatgaatacttgtcgttgtgatgcagcattttgaaacatgaatatcttaaagccttttgcccaaaaaaaaaaagaatatcttaatgcctaatacttggattacgtatttatgtaccagtatcgcgatcaaaacaatcaccttttattcagtcaaattaaacataatttatgattcatatatcctcaaaaacatattacaaaattaccaggtatctttgtatgctatacaccactattctaaatttaaaaattaatatagagtaatatatactattaagttttaaaaatcgagattcatattaatataaaacatcttactaaaacaatgatcaaagttttattcatatgctcaataacatttttatgattaaattaagcatacgtcgagcatcattagttaggttccaagtacaaaagcccatttagattattttagcccgtttaaggcccaatatgttctgcttcacctcttgcttaggagccgttgccgacttctgggagcgacgccgacgacgaaagggtaaacacgccgccgttgattcagccggagaatcaatggaaagtgaagcaattcaagaggatcttcagaatttagacgtcgagttaaaggatgttcaaggttaaagcatttagattcttcgttttgtttttcttcttcgaatttgtgtttcggttgcttttggtgtatatataactttagaaaatcattcaaagtctccattttttctgctttatgtaatatacattgaggttttaggttaattttagacttcatagccatagataattgtctctgatccttgatggtgttaggaaccagaatgggttaagtgaaagttttagtttttttgaattcgtgttgaatctgttgattgaaatctctttgcaggtcagataagtgctttgattgagcatcaagataggttatacgagagaaagtctgagttaaagacattgttaaaagcattagcagcatcaggaagtcctgttgcatcatctggtggctctagtgctatagagaattggtctgagacatttgagtgggattctcgtgctgacgatgttaggtttaacgtttttggtatatccaagtatagggctaaccagaaggaagtaagtgactttctgtattttctgatcctaaatatgattcttgtgtccgcgtttgctagaaattcgtttgatgttccatttgttgattctttgaatgatatgtcaagattattaacgctataatgacgggaagagatgtcctggtgatcatggcagcaggtggtgggaagagtctttgctatcaacttccagctatgcttcgtggtgggacaactcttgttgtcagtcctctactttcactgattcaggatcaggttagtactaaacttattgaaaatagtctgtgtaggcaacctatttgcagaatgattaacacttgatcgttagatattctttgattagtatgtgtgttatgaccaattattgcttatgattgttcaggttatgggtttggctgctctaggaatctcagcctacatgctgacttctacttctggcaaggaaaatgagaaatttgtgtacaaggcacttgaaaagggtgaagatgacctcaagatactttatgtaacacccgagaaggtatcaaagagcaaaagattcatgtcgaagcttgaaaagtgtcacaatgctggccgcctctctcttatatcaattgatgtaagtctctcctagttttagtttcttactcggaaattgtgctctgccacctatcttctcactctctggctttagtttatttggatatatccgcaccgttaaacagaaaacctactttatgaatgatcaatttcctatgtttggtttctttgcaggaggctcattgttgtagtcagtggggtcatgattttcgccctgattacaagaacttaagcattctgaaaacccagtttcccaaagttcccatggtggctttaactgtatgtttttgttttcatttatgggataccctgtgagcttaaattagacagcactagggagcttgcttcaccttactgtgcttatcataaggaccaattttcttctgatttgagctcgttgatcttacgtactcgctagtattgtttagttattctgcttcagtgggtgcagaatgtcaaattctataacaatcttttaaatattttgtggaaggttgaatatttcattttttcctaattctttatgtctctattgcaggcaactgctacacagaaagttcaaaatgatctgatagagatgctgcatattcctaaatgcgtcaaatttgtgagcagtgttaacaggccaaatctcttttactcggtacgctttagtaatgatttttattagtatacttttctcatgctgtagacagtttgtaggcttgaacatgaaccagtaaattgtcttgcaggtccgagaaaagtcggcagttggtaaattagtggttgatgaaattgcagaattcatacgggaatcatactctaacaatgaatctgggatagtctattgtttctcccggaaggagtgtgaacaggtttgtaactaaactgaccatcatattctcattgtgcacatttcatttctgatcataatattttctattgaaccttggattgggggaaaaaagcttacatattctgccttacatgcaatggtgatagattgcaggtgatttacgagagcgagggatttctgctgattattaccacgcagacatggatgcaaatatgcgcgaaaaagttcatatgcggtaagctaatatttcttaaaacatgtagtccgtggtgcttacttgaacccgagattcaaaaatccagctctgatgcagctcgactctgctcttgatgatcttgttattgatgtgcaatttaagcattgcctgactttttgctgtgtcatgttcacagatggagcaagaacaagttgcaggtcattgttggaacagtacgtatattctctgttatcattccattatttagtggtacaaggatctacgttaataaactctaattagtaaaataattgctttgcaggttgcgtttggtatgggaatcaacaagcctgatggttagtacttaagtagtgctaatttttgtttagttgatatttgatataccttcactttcagttttccttagtgcagatttctttctcttggaagctattattcttccagttacataatactagtagctactgatttcttaaaatcattatatttctaaaaaccaccatccttcgcgttttattaatcaccattcttactatcttctctaactgatacatggggcattgctgtagtcaggtttgtcatccaccacagtttgagcaaatcaatggagacttactaccaggttccagtctcttgtccactaaaactcgatatagttataaggctgcctcttataacttaaccataatattgtaggagagtggccgtgccggtcgtgatggcctcccatccgaatgtatcctcttttttcgttcggctgatgttcccaggcaggtatgctgcaatgttactgtaccctggttatctgtcctgtgtatatatctatatatttcttagatttagttgatgctttccttttctcctcaacagagttccatggtcttctacgagtattctggtctccaaaatctctacgatatagtaagatactgtcaggtacgctgattcatttccatttcctgaagcattatcgttattgcacctgtaaatatctggagcaagctgtggcaatcagcaccaacttccgagagaattgtgtaccttgctaaggcttctttagactgactaaattgttttactctctatcttgtcacgttaaagaatcatgatcttgaaatattctaaattgtacgctatcttatgaaaccttggtttctgaactaccttcttgcagtctaaaacaaaatgtcgtcgaagcgcatttttccgtcattttggggaaccatcacaagattgcaatggtattcttgtttacagttagttgtccactactgatagattttgtactaggtctattgattctagattttctgatgtgctgatcgtttggtaaggaatgtgtgacaactgtgccttgtcaagtgaggtcaaggaagttgatgtatcgggtacgtccctacattcgcttgttgtttttttgaaatacattcccttgcaatttgtttggaatcagcttgaaagtttcatcttctgccaaaacaatttcagcttattttgtttaaaggacttacagttcatttcactttctcatcaactatcagagtatcagccatatgtcgataatatcataattattttcggtgtcatgatttttgcagacctgtctaagctcgtggtttctatggtgcaagaaacgcaagccaaggatcaaagagtaacgatgttacagttgggtgacaaactcagaaataagcacaaggatctaagttagtcgtgtttttttcttcatttccattggtgtcaactgcattaaaatttttgttgttaatttttacctctgtggttgactttagttgctgagttaaagagagacgaggtagaacatctcgtgataaaactgattgttgactcggtattggtaagatcattgtccatgtttatagttctctgttacaatctgacacgtgataaacccagctcaagataatagcatgtcagacaaaaactctagtatctagcaatgccttataatctctgtgattgtgccattagtctctttaggctgtaaatgagtttgtattttttgctgcagaaagaagaatttcagcacacaccatattcgacaaacgcttatgtaacaatgggaccattggccaaccaattgttgcaaggtaaggagaaaagaaataccttctcttcacgatcaaatgaacactatgtaggcttcgggatatggaatacccttttttctcggtttggacgaagtcaaatcaaaagaagtcatagaagcagtaaatattagaagcatcatttatcggtttagtgatggacaaaactctgaaaacaaaaaatacctccttgtattctggaacaggaagaaagacaatcaaaatggaaacctctagcaggcaaaccaagaaattgaaaagaagtattacattttccgggttggaactcaagctcgacgagctacggaaagagatatctgcagctgatggaagcatactccctcacacagtcctctcaacccagcagattggctcgataagttcccaaaaaccagtttcattacaagaggcgagtttgtgctaataaaattgggtttcattattatatgtctataggctttcctttaatctttatttggttggatttgcagttggagagtattataggaaaattgaaaacagaaaagtatggagacaggattctagaagaagtgatgagacacgaagcagtctctgaacaacttgttgaagatccaacaaaggaagagacatgtaaaagcagattaagaaagagagctaagacacagaaggatgttgtattggtagagagcagcggagaagaagaagcttgatggatcaattatcttctaatccaatcatcgtagctgtcaaggttccacatttacactattcttatgtcagattttaaccaattctaattaagaaattcctgtactaccattttctgcataagcttcattgtctctaatcaagaaatcatcatcaacatgaataggaacaagtgcaataaaagaaacatagggaaacctcaatgagaacaagtctcttgatgttctacaccaaagagtaagaggactctgttttcaaaactaaaactaaaaacaaacagactagaacatcaattagatccaaactcttaactgcctcaagtcatcaaacaacatcatcttaagaattccagcagagcctccatgtctgcgcacttttgcttcatgtctttcaactcttcctcaatatcttgcacccgagtgtctccatgtctgcgcacttttgcacttttgctttataagtaaacacgttcggaaaacgtagggtcaattttgctttaaaagcatcaaataggtttgaatgataacgagaactcgaggaatgggaaacgctttggcttctcatagcttattggtgggctgattctttattgatacttacactaacgtattaattgagacactaactacatttttaaattccttttccatcaagaaacatagtgaaattataaaaacttaggtaacatcaatgacaataattctcttttacttttccaagattaaacgacattcacccaataagacccaaactcctaacttgttttaataactcaagtcatcaaacaacattcatcgtaagaagtctagaagagccgtcatgtctttcaactcttcctcaatatcttgcacccgagtctcaccaacctctttcagtttcttctccaatcaatccaacttgaacccagcttttgtcaaacaaattagtgtagaatacgcgttggcaagatcatcaatggagagttcctcaggggactgacagtgacacagaatctcagtcaagcttagtagactattcaaggatgttgttctcagatgtgggttctttggacggaatttcgatgcaatgtctgggtgcttttcaaacaaactcttcacagattctacctacaagtgaaaaatggacgaataaagtaaaactatatcagataggagttcttggtgacctgaaaacaaatccaaaaaccatatatgcagcttgaatagtgagcaactcgtacgatatggatttaaaaattcattttatacctgtgaaggaagaacttgaaacccattgacatcgatgctttccatcactaatgaagtttccactaacacatctgatttgcgaacaacttcaagaacaccaacctcggcaacaatcttgacttctccattcaccataaacccgccatttacgtcaagaagttcgttaaggggaagcattgatcggaaaccacagctgggaagcttctgatcaaaccagggttgccctactataaggtcataatcaacatactaactgctaatcatattgcttaatcgtccatgttatcctcttttcatattgcttctccattgatcttgatgagagactactcacaaccaaactaccagaacacagtgaaaaaatgaagaacaagagttttgctgaataaatccttttattgatttcactcgattgaaatacagaggatacatggtgcttatactaatactacttcaagaacattctggaacctttcctcctaatgatgggatctgtttacacttgtcttgcatctagccactatcttctgaagggatatgatcaaaccggtttgatagtacgatcgtcggagagccagctggcattggtatcttgacgctctccatatttttgtctctttgtgttgcgcagaggagttagctctcttctttttgctcctttgtcgtttgtgtttgtgagaacaactttccacattatatgggccattaacatactaagcccacttaacaattgtttttggtgatttagctaaaagatggaacaaacaaagaagaagaggaagaagcaagtgagcaaggaaggacaagaaaagaacaaagttgtgttgtgttggttaatggctagctaaacaaagttaatggctaagtcaagaagcaatgagtcccttagtttaactatcgaaataagaaagagtgtcttgatggttaatgtctagctaaacaaagtgttaaaagttgttggtgttaaaagtgatgtctagtagtagtagttgagctagagtcttaagtgtgtatgtgcgtgtgtattaagtagaagaaaattctataagtatgtttgtatgatgttatgtaaaaatcatccaagtgatcaatattaaaatgtagcctttatgttccatacgttttttgtgcttcatcaaacaagtagacacaaaacataatgttaggtgatttctgtactttatttgacatgattgtttgattactaattatccgctgcataaacatatcattactgtctcaaatcatcttcatatgcatcatcagcatgaattgaagtactcatttgtgtgctaaccaactgtcacagttcagatttaaggacactaacacgttttttttattacacaagtctcttgatcttctactcaaagattaagaggacattgttctcaaaactaaaacgaaagagaaacatcccagaacaccaattagatccaaagctttaacagactataatctactcaagtcatcctcatcgtcagaaacccagcagatattttgtaaaaacaacagtcaaacaacaaatttaaggacaaaactatataaaaaagcttgatatgactctttattgataagggcacatacgtatcatcagcactgattgagacaggaaagacatttttaaattccttttccatcaagaaacagtgtgaaaataaagaaaattagggcaacataaataacaagtctcttttacttatccaagattaagaggattctattccaaaactaaaacgaaaacaaaagagaccaaaacaccattcatagcaactcaagtcatcaaacaacattcatagtaagaactccagaagagcctccatgtctacacacttatgcttcatctctacgcacttttgctttatgtctttcaactcttcctcaatttcttgaatacgagtctcaccaacatctttcaggtccttctccaaccaatctaacttaaacccggcttttgtcacataagagagcgtagaatatgcgttggccaaatcatcattggaaatgttctcaggggactggctcagaatctcagtcaaggttagtaggctattcaagtatgttattctcatatgtgggttcttcagatggagttttgattcgatatctgggtgcttttcaaacagactcttcacaaattctacctgaaaatatcgtatatataaagtaagcatatcagatagcaacttttggtgacctgaaaacagatccaccaaccatagtgagcggctcttaggatatgtatttaagaatgatttctcttacctgtgaaggaagaacttgaaacccattgacatacatgctttccatcactaatgaagtttcctctaacacatctgatttgccaacaacttcaagaacaccaacctcagcaacaatcttgacttctccattcaccataaacccaccatttttgtcaagaagtttggtaaggggaaccattgctagggaaccccggttgggatactgctgatcaaaccagggttgtcctactgttttgtcacaaaacatactaactacttcagtcaaaacaagaatttcacaacacatacattgaatctcactgcaacacgtcctacgtcctataagtccatgacaagtggaaccataaagtgttttcctttgtctgccttagaaacataatcaagcaaatgtagaaagaatcacctatctttttggagagtttctccgaagtttgattaacaacagttaggcgatactttgtgtgtcttttccatccatcaggcaaagatttggaatcagcaacatcaagaaacagagacaaacttttagtttcatgatccacacatcccttgggataggccagaagacgcgtgcgagtaaaaacccaaaaccagtaaagcaaaggaacaatatcacgtaaacctaaaataaacgaaacgttggagaacacgttttcttaccatttggagtcaccaactacgaaattatcagaataaatagaatcaaaatcggattagtttcggttaaattatgggtaagtcaaaccggatgtataattatcggttaactggtcggttcaattggaggcgtagttttaagaacaaatccgaaagtacatgtagttttatcgagattaaaattgtttgggattgtgacacgtttagacactttttgataatattattacttttaagacacttatgagggagtggtcactttgccatctttttgagagataattggaccaatttacccctgaagtagtgattacgcaataattttaaactcattattgttgagatcgtttgggtgagaaattatcctctttttatcatctctcttccatattcttttttttccatcattttcagttctctctttcaaaatcaatgtcgttctctataattcttacaaaatcatggtcgttcccattaactttctctcctttccataagaagtcaccaatcttcattatatcatgtataatctcctcataaactttcgatttatcgtctcctcataatctcttcaagaagttcggtaaggggaagcattgctggtgaaccccagtagcgagacttctgatcaaaccagcatggtgttactactgtaaagtcacgaaacataaaacttaagtcaaaacaagaattgcacaactcataaggacttaagtttttagtcctatgagtccatgaaaagtagaaccataaaatatgtactttcctttgactaaaagtgagaaaagtgtctaatgcttctgagttctaaaattcgttatcaactcttttaaagttttttcctcagatttcgttcctgttttttctttccccaagtctaataaaataccacttattcacatcaataatgttaggttattaatgtattaggcgatttgtgtagtttaatcaaagaaaacgtagaacaacagacttctttatctattttgttcagttctctttggcttgctcaatctatcttcaactttagcatatgaagtattgaatgcacgactaatatatagcatgaaaaaatgcagcatcggctcttcataacacacatgttaaacttgcacgtgaaattgctctatgtaattatacaaaaacacaaattattttatgagtctctcaaagtcctaaaaccacccaacacaaatagaagcaataatgtgtcctgtagtttctccacaaggccaggtcattgtgtttgcttccttatagagaagaattactgattatttctgtataagcatcactactgtctcgtatcatcttcgcatcatcaacataagttaatttgactacctttgtgtgccagtggtcacagcagtttagaatgaagaataccaacaacatttatttaactaattccatcaagaaacaaactaaagtgcaataaaaaagacgtagggaaacctcaatgacaacacaagtctcttgatcttctactcgaagattaaaggacattgttctcaaaaccaaaacgaaaaacaaacagaccagaacaccaattagatataaactcttaacggactaaagtcgattcaagtcatcctcatcgtcagaactccagctaaaacttttccttcaagtccgtcaagtccttccactcttcatcaatttcttgcacccgagcctcacaaacctctttcagtttcttctccagccaatccaacttaaaccccgcttttttcaaacaagttagtgtagaatacgcgttagccatatcaccagtggagagttcctcagaggactcgcacaggatctcagtcaaacatagtaggtcattcaagtatgttgttctcataagtgggttcttggaacgaaattctgatacgatgtctgggtgcttctcaaagagattgttcacagattctacctgcaagggaaacatggacgaaccttctcagatagcattttttcgagacctgaaccatacccacaaaccaaatatgcagcttgtacaagaaagtaaagttatatagttacaggtacttttcttacctgtgaaggaagaacttgaaacccattgatatcgatgctttcatgaactaataaagtttcctctaacacatctgatttgccaacgacttcaagaacacctacctcgacaacaatcttgacatcaccattcaccagaaacccaccatttttgtcaagaagtttggaaaggggaagcattgtttggaaaccagagatatgaaagtttttataaaaccagccttgtattactgtaaagtcacgaaacatagaactttagtcaaaaccagtttgcacaacgcatacatagaatctcactatacaacacaagtcccatatgagtccatgacaagctgaaccataaaatatgcactttcttttgtccaccttggaaacataaactagcaaatgtagaaagaatcaccttcctgttcggaaagtttctccgacatttgattaacaacagttaagcgatatttgatgtgtcttttccaaccattaggcaaagattggaaatccgcaacattcagatacagtgacaaacatttattagtactttcaccatttcccttgggataggccacaagatgcctgcaaccataaaccaaaaaccaataagcaaagggtgatgtcaggtaaacctaaaatgaaatgtaaacttacaaaacattagagaacaagtttttaccatttggagtcaccaactacgaaaatatcagaatcaattgcttgagattgcacaaaggagaaattcttaatcgtccatgttatcttcttttcatattgatcttccattgttcttgatgaagactcctcacaagtcacaaccaaacgtccagaaaataatcctaagaaaagaactagaagaagatgaaaagagaataaatccgagaaccgagtggcatgtacaaaactttataatatcacacaacaacttttataagtagagtcacttcactgtcaaataggtttgaatgtgaatcgtgttgattacgaaaacttgagaattgtgaaaacgcttcggctcctgatagctcattggtgggctaatagtcccaagtaaatcattttcaaaaacacttgactttcaccaacaaaacattcactaacaccgttttagatgacttatactgagagattgttaagtgatgcgagttccgacgttctaaatgttttctccccaaatttccttcctttatttttttaaaccaaatctgataaaattatgttattaacctcatagatcacataatcaggctaatggccaatacatttaataacgttgggcgatttatttactttaaattctacaaatgtttcaccttctttattccttttgtcatttctctttggtttgactttggcatctaaagtgttgaaactaacgactaactagtaacataagcaaatgcgatcagcctcttgttcttcatgacatgatattttgttataaagtgagagaaaacttgtatgtcaaatttgggaataatcactgtaacatagacatacgttttgcaacaggaataaagtcgctgctacacccaacagtgacccaagattaagaggacaaagttctcagaactaaaacgaaaaacaaacagaccagacaccaattagatccaaacagctaagtcttaacagatcgactcaggtcatcctcatcgtcagaactccagcataaactctccttcaagtccttcaaattttgttcaagttgttgcatccgagtcttaccaacctctttcagtttcttttccaaccaatccaacttaaaaccggcttttgtcacacaagttagagtacagtgcgcattggcgagatcaacattggagagtttatgaggggactggcacagaagctcagtcaagcatagtaggctattcaagtatgtagttcttagatgagtgttttccagacggaagtttgatgcaatgtctgggtgatttttgaagagattgttcacagattctacctgcaagtgaaacatggactaataagtagtttaaccatatcagataggagtttttcgagacctgaaaacatacacactaaaccatatatgcagcttgtgcaaggaagtggattatatagttacaagtacttttcttacctgtgaaggaagaacttgaaacccattgacattgatgcctccattaactaacaaagtttcctctaacacatctgacttgccaacaacttcaagaacaccaacctcggcaacaatcttgacttggccactaaccaaaaacccaccataaagttctgtaagtggaagcattacttgggaaccgaaggtaagagacctcgggtaaaacccgccccgtgctactgtaaagtcacgaaacttagaaatttagttaaaacaaggattgcacaacacatacataggatctcactacaacacaagtcctatgagtccatgacaagtagaaccataaaatattgactttcctttgtccgcctaaattagaaacataatctaccaaaggtagaaaaaagttgaaaaactcaccttcctgtttggagagtttctccgacatttgattaacaacagtaagacgatatatgatgtgtcttttccaaccagaaggcaaatcatcaggatcaggaacaccaagaaacagagacaaacatttattaatgctatcaccatatcccttgggataggccagaagatgcctacaagcataaaccaaaaaccaataagcaaagggtaatatcaagtaaacctaaaatgaaacgcaaacattagcaaacataagagaacaagtttttaccatttggtgtccccaactacaaaaatatcaaaataaattgcatgagattgcaaagaggagaaattcttaatcgtccatgttatcctcttttcatattggtctgccattgatcttaatgaagtctccttgcaaccaaaccaaaacagaaataccagaggatgaagagagactaaatcctagaaccgagtgtcacactaccatacttgatagagaaaattatcacacaacaacttttataagtaaacagaatcgagaaaacgcagagtcactcactttaaaagcatataatacgtgtttgaatgtgactcgcgttgattacgaaaacttgaggaatgtgaaaacgcttcggctcttcatagctcattgttgggctgatagtcccaagaaaaagaacatttaactttcccttgttcattttcaaaacaaagcattcattaacaccgttttacatgatatttacctcttagatggccaataaattaaataatgttaggttatattaggcgttttgtgtagtttaatttaatttatacacttgttttggcatctatagtgtttgaactaacgactaactagtaacatgagcaaaggcgatcagcctctggctcttcatgacatgatactctgttataaggagatagaaaaccccttatgttaaccaacatgaagttgctctatgtaatcatacaaatgattccatttccacttttgtccgtctctcaaatgttcttattcatctcggagtcaagctt

SEQ ID NO: 70 - DNA, 103443 bp, Arabidopsis thaliana
gaattcaacgcccttatttatcgtacgctgtcttatgaatcatctagaaaatttggaagattatatttcagctttaatttcttggctaaattattgatttctcagttgataatcgcttggtcgttttcaattattttgcagttgaacataatctggatttaattttcttacatatggttttcaaatgcatgatgattatgatttctttttaagaaaaactcgagttctgttaatctggttatttttatttcctacaccgtcaccaaaatctttcttcgaacaatggtatttttgattgagtgagatagtttgttgtgctatcaggtgaaaaatctttagagaaaaagagcaacgagtcatctttcattagagactgatctaaaaaaaaataggaaaacactcttttgtttctctttcatcacttttttgtatttactattattttagtataagtgaatttgggcaaaataaaaataaggtataaaattagaaaatagatattagggatatttgtctaaaaaaaagttgaaaaaggttttagttttgccaattattagagaaaaccgattgcatattttatcgaagggggaaaaaaaaactgacatttaaaatagggtgaattaagcgtataaccaaaatccaaggtttaattagaatatcgcatcgtgtttgaaaaatttaaaaaaagtaatataaagaagaaaggaaaagactaaactagtgtcgctgaagaaagagaaattcaactgaggtggaaggaagagctccatcattggtggttcgaagctgagatggcaggagagaagctcttttctttttataactctttttcaattttcactcacaacgtttgttttaataattcgattcaaatatatgactcttctataaaaaaactatatatttttttacatgtactatgatttaaatttttcaaaacaaacataatatgtctaaatagaacacctctgaaatagtatatatatatatagtaaaatgaatggtatagaactaaacattcttacttagtatgaaaaacttatcgatgataaaaaattaaatggtaaatctaaattgttaagttaagctgacgtatcatagattaatcataagggtttttctaatttatacagagaatattatcttttaaattaaatctaaaagagttctacaacaaaatttgtccatttatttctttttatcgtagattaatcataagggtttttctaaaaaaatttaatcttatttaccatcactttaatttataatttaaataaaattagaatttcctaatctatttacaaaataaaaaatagaaatagaaaaaaaaaacaaatactctaaatgaattagagtctttcatacaaccctatttttcttggattttatctacttattctttctctatacaactaaaaaaaaaaacacagagctcaaatttccggcgacccaacacttattttcgccggtgaatcttttgccgtctctgggattgtcgccgacgagtttcttcgtcgtccctgtgttgacgccgcaacttttccactttatgctttggaaaccttatggtgaaataaaatggcatgttttgacagtatttgttcatgttgagttctgtccaagtagagatattagaactcaaagtatttatctccctctccacgcagcttcttctcacgtcttcttcatcactatcacttccttatctctcatctcaatctcagccatcatcatcatcgttgtgacaccggagttgacgtcaagttgtggtcgtgattgttctatgtggttggtttcgtcacagttcatcaccggattgtttggtaaagaaaacctatcatggttataaactatactactgaaattgtttcactcagcaattggattcagggattataacttcaactattcgatttttaggtgaatatacaaaggattttaagtacgtttcgaccagaacttaaaatcgtcaacggaaaaaatcgagtccgaggaatcctcgatccggaatcgtcgagaaaattttaccgggtccgagaaatcgtcgacagtggttggaatcgtcgagaaaaatctaacgagtctgacgaatcctcgaccggacggccggatggtcgacgaatcctcaaaccggacggccgggtgatcaatcgggcacttagcaattgtttcacgaccatccaacagaggttagacaagggttcacatttcgttcatcacccttagccgatcatcgaatagccagactcccatcaaaagatggttgccaagaacatcttcgttacagttagctaattcttggaataacatcaacacaactcggaaggattaaaaccccaagagtagtgagcattgctactcaaaatctttgctacccttcttgttccagttcatagccgcaaggtatcgatgcccatgagcgacactcacacctagctcacaaccgggacagcctaggcggatccatgctttccaacgaagcacggccatccaaccgagacgggtggaatcgatgcccatggggaaatctcggtatttcgtgcgcaattgaagatactgccacccaaacggcctaggagaatccatgtcggcccatgcatgacacgctcattctctttggtgacgaggtgaaacgagatccgtggggacatctcggtatgtcatgcgccaaatttatataccgccacccctaggcctcaaagaatccatgtcagcccacgcatgacacgcccattcttctcgaccactcaacaatttttgtccgagaattgccaaaaaaactccgatccttttataacgccgccaccctaacgcctcgaagaattaatgccagcccacacaagggaagcccattcccctcgatgattcagcaatttttgttcgagaaatgctggaaaaactcgggaaaagtcaaataaccgatcgccagaaaacttttcaggcgaaaatttcgacggtaagacggtcagccggtcgatcggtcattcctcgtgtcgatatccgacggtatccctcgttcgcaacccaagtccggaacaaaggagggggttccctcggactgctcagactccctcaacacccacccccctatatagctttatgtctttttttcaacttggcaccacaaggagttactggtgccaaaaaaaaaaaacttggaatttgaaaattatttttggcaagtttcataaggatagtgaatcctattttcaagtaaatttacgttattttctgacacctctagctaggtcatttgacctgatacaacatcggattttcatagtttagtcggagcccggtgggtatatttgatgaacctttgacatcttaaactctttattgatgtattttaagagttttgatcataaaacattgcatcttactcgttgattttagaaagttattcgacactttcttttttcctagactattcggacgtacggatcgaggattcctcgaccggacagattttatatcgagtattccaacttctggtcgatctaaactctttattgatgtactttaagagtgtcaatcacaaaacattgcgttgtactctttgaatttgaaagttattcggcactttcttttttcctcgaccacccggccgtccgaatcgaggattcctcgaccagatagattttttatcgagtattttaactcctggtcaacctaaactctttattgatgtattttaagtgtttcaatcacaaaacattgcatcgtactcgttaatgtttgaaagttatttggcacttttttttttcttcgaccatccggccgtccagatcgaggattcctcgaccggatatattttctatccaatattccaacttctggtcgacctacactctttattgatgtattttaatagtttgcatcacaaaacattgcattgtatttgttgagtttagaaagttattcgacactttctttttcctcaaccatccggccgtctggatcgaggatttctcgaccgggtagatttttttattgagtattccaacttctggtagacctaaactctttattgatgtatttttagagtttcgatcacaaaatattgcatcgcggactataacttttgaaagttattcggtacgttctttttcccacgaccatccagctgtccagattgaggattcctcgaccggatagatttttgatcgagcattccaacttctagtcgaccgaaactctttattgatgtattttaagagtttcgatcacaaaacattgcactttcttttcgaaagttattcagcactttcttttttcctctatcatccggccgttcagttcgaggattcgtcgaccacccgaccgtccggttccaggattcgtcgatcacatggccgtccagttcgaggattcgtcgaccatacggctgtccggatcgagaattcctcgaccactcggccgttcggccgtggattcgttggacccaatagatttggctcgacgattccaacccctggtcaacgattcctcggacccggtaaaattttctcgacgattccaagtccaggactgatgattcctcggactcgattcttttccctcgacaatttttttccatctactgttatagctaccaacataactcctttgtatttgcttttcagaaacgtaccgtcaaccacaatcacttttcgaataggcttgtaaaaccctttaatagactgaccaaaagatataaatagatatctgaatctatcctcaccatcaaattcgtagtttgtaaaagtaccagggttcgcttgttctagcatgtacaagtattttagtatcttaccataacttttctcaggaattcctctaacctcgttaactgtatactcatgagcctcccacacctgatgataagttagctcgtgtccgtattgtgtgcgaataatattgctgatatcattcggtttaggaccttctaacacaccttcataattatgcataatgagacgtccaattgttttggttgaaggtgtgcgacaaaatttgtttttttctgaaagaagcacatgaatggtcatccacaaacttgttgactttaaaatacagagatctctctaaacgctccgctcgaagactccacttgcagaccacatctacgcatcgtatacaccaaagttttgtatcagactttgtaatcttgttgtcgcagttatacttcatcgcatacaactccattgttgcctttaaatcatctttccttctgaaatagtgctcctttcttagaaaaaaagatttcgacgatgatcccactccatcacttgcaccgtgatgatgctttcgctattttggacttttggccaaatcgatgacagactgtttgtcttcttccaccactctacctaatacttttttgtcggctttaaaataagcatctccatcacttggagcatctggttccttattcaaatcgaatttttctttacctcctttatcttcaactccaccattgaacgtcacacataactttaccgtatttttctttttgcaatacgaaagaaaattactaacctgtctgttattcatcataacaacaggaagacaatcaacactaagatccgtggataagtagcttaactccacatcgtttgtactacgttctattccatagtcttctctgaccatcagcttaagctcttcgaaagttgtagtcaattccaaaaacagtaatctccgacgatttttttcatcaacaataaatttccactccttgttatcatacaatctccacatgccactcctcacatagatatgtataatgaaaaacagaacacgagatggaaaaagaagaacgtgaagaagaaaagatcaataatagggcacaaattgactagggcacaaatcgtttgtttacaaatttttttggtgtttttttctttctgtattctaaaaataattagaatttgttttctaaacccagtaaaaatcgtaatcttaacagaaaatatatcattaaaacgtaatatttaataaatatttaatttcttttttcaaagattcgctttctatatttaggaattctaagtaatttagaaacaaaattttaaatatgttttaaatattaattctaaaagagagaaaacgttttctactgttttcagaaactatagaaattcgtagaaaacaatttcgcacataatttagaacatgcaggaaatcttagaagacatgttctaaaatttttagatattgaatttcctattttctaagattgttagagcgaaaatagtctaaatatcgtagaatatgtacaaaaaattagaatagaaattctaaaataagtatatcactagaaatcgttttctaaaaaattttagaaaaaattgtatctttcaaaatatcaccttaatatatacaaaaataggggtattttaattcaaatttaaatcaactatattcttctagatctacatgttatcaaaattaaactttttcaaaaatacttaatatataaaataagagtatttttgttcaaattagatttaatttctcccggttgaattgacctttacgaagcaacaaacaaaaactagtgacagttaaatgcgaccggttttaatttgaaaaaagtaacaaaaacgtatgggcggaaattacaaaatctaaaccactaacctagttgcgtagatatctattactaaatgtagtactctataaatcgatatataactctatgaaagcgtatcgacatgtagctaaatttatagttaactattaattcattaactaaatgggacatgcttatccaaaatgaatgcatgagccttgtatcgcccatctacgcttcttaaatatgcatatacgctttgtatagatctatatgtggaggtccaaagattgttttaaatccatatttgtatcgtgaaaattgtttcttttaacgaataaatataccatttaattctctggtaagttagtgtgaatcttatattataagacaagttttttttgtaaagagctctattatcatgatatttggcaatatctttttacgacatgtggcatatacaataattaaatatttatcttctacaaaactttattagtatgacatttaatatatacactaatatctcaacatttaaccaattaaatacataagaagtttaaatacaaaaatatatatagtactataaaaaatcttagaatttgtttttccatataatttatcatttacactaagctttttgaattagttttttcataagatttattatataatggagctctattatcatgacatttggcaatctctttttacgacatgtggcatatacaataattaaatatttattctctacaaaactttattagtatgacatttaatatatacactaatatctcaacatttaaccaattaaatacataagaagtttaaatacaaaaatatatatagtactataaaaaatcttagaatttgtttttccatataatttatcatttacactaagctttttgaattcgtttttccataagatttattataatatatatatatatatatatatatatatataaatgcggttgtttgaggaatgccctattccccttctaacaatatctatattttattacatttacccttttaactttgtaaaatgtaatataatagatgattaaatcaaatctgtatttttattattttacatttccaataatatctgtattttttaaaaaagaaaaatccatcaatgtaattaatgaataatgattaaggttaagaagaccagttgactattgtaaataaaaaagtaaaaaccatagtaatgttttttggtttgaacattctagtggttacaaattagaaatacattaagttgaatacatttagacccacactaataatggggacaacaatacaattttataaatcttgcttacatatttaatccaaatggtatattatatagaaaaatggaaaattgcatatggaactaaagagttatattttattccaataatcttattggaataattgtttggtgttcaatttttccttttatgtttattacatttggcatattctccaatataatcttattttttctcttcactttaaaataaataattcacacaacatgattattacattattatgtaatgccatttcaattgaaataaactgaataagttttcttccattatatatagcttataaatatttaaaatcattgttaacactacattttatccaactgatattttttttttgtccatgtatactaaataaacgtacaaatattatgctatataatgttacattaatagtccattagttatactgaataaatgtaagaaacggaaagccatgttacaaatgtttatattgttttcaaaacgttttattttttttgtgtgttagcaatgtcaaaagaacacacataatagataataacttagcccattaatacaattttcataactatataaaaatgaatgaaacaataaatcaccccattaatatagttagaccaatttgaatggcttttccattcatatttttctaacggtcaaataaatatcacaatatcataaaaaaagttttagagttataggctgcgctacctatttatttggtgtttaagttaagttgtttgtcttttgagcagacacttttattttgagactttgtggatttttagagtttcatcgatccaacaatgattagttccaatctctgtctctctgaaattttatttcgtgattaaggtttcgaacattgtggttgtaatgtctcgtcatgtgaatttataggcggatatggaaccagaggttgttgcggctggaattgtgaaaaagagaatcttcaagaagttttctttcagaggagtcgatctcgatgcgcttctcgacatgtccaccgaagatcttgtcaaacatttcagttcccgtattcgcagaaggttagcttctttctttgaaccaaacaaaacgcttttgtctaattggttttgtgagactgatgatgtgttttgttatctttaaaaggttttctagaggatttaccaggaaacctatggctttgatcaagaaattgcgcaaagcggtaaaatcataatttctcacatcactaattagatgttacgtttgttgaacaacatattcaattatccaaatctaggaattgtgtatcttgagtaaatacggcgatgtttctgtttggtttgaatgaattcgaacaaagttgagagagagaaaagatagaaatgaacatgagagaaaataaagatccaaaaatcaaaaattaaaaacaaaaaaagaaaactttaggtacataaggttaaaatggataaaattatcattgtcttggatttagactaataataccaaaattctatttcatcagatccattgtttcacccaattatcttttggaaaaattacaacatctgccatattttttccaatccttatgcaatctgccataatttgttgggccttacaattcatgccacatttcatattgaaatgtcgattttgtctctctacatttcttctctattttatctctccttcctcgaaatctgtgcgctttaaccatatattattttcccgaagacgaaacgcttttgtctctctctgactttctctgacaatctgcacagattctttacatgtaactttcaattaaatttgtctcccaattttattcatcataatatttctgttgtatctatatcttgtccccgatctaattctattactcattcgatatgaacttgtccccgatataacatattattaaaatatgttaacgtgtaggtgaagacaataacgctcaactaacctgtggaccaaaatagatggcgaaaatctaaataaaattcaaaattcttaaatgagaacaattgcatataagatgtaggattcataataatagagcaagatgatggaatcgaggacaaaacgtagatgcaacagagaatttctattcggggataagatctggagactaaaacaaaagtattgcttcaattgttctccgctaacaggtaatcatgtcccctaatgcattatatattacgttgtccttcgctatcaggtaatcatgtctctaaatgtattatatattacgttttcccccgtagaattttgaataatcaatttgtttaaacaagtcattttaaaatacccaataacaacagtagaagccagttgttctccactattctgtcctctaatcctttatgcttccaccatgattttttgtcctgtatcatcacatcagccaaaaactgttatgtcaccatcttcgtcagagcgctgacccaccttaaggataatttcatccacggaattccacatgtagtaaaatatggcaaattctgtaaaataactggaaatataacaaagattgtaaatttttgaatgaaatatgacagattttgcaagattctcttatctcttttagtattctaaattattttaagacgcccaccagacataccgatggacatggcctaaaaagtcgtctttctcgtgttgatttttgttttagataaacaattcttttattttgatatgtcatttgagtttgtctatgtgtattgtactagtgtaaataattaacaattaagtacgaataagtacgaaaagatcttcttttagtagcatttgtgaactgttcctaaaatattttagatttgtcattttcttatatacacatctacacattattacgagagtcaatcctaaaaagtcgtctcactcttagacgtttcttcggcttctggttcgtttaccgtgtccagtagttcaacatatattatacacacaatctacgcaaattaattaactacactagcacagtacacataaacaaactcaaatggcacaataacattctacggaaattaattaacaatactagcacaatacacataaacaaactcaaatggcacaataatattctacgcaaattaattaactatacactagcacaatacacataaacaaattcaaatggcagatcaaaataaagatattgtttatctcaaacaaaaatcaaaacataatgttgggcaggtaatcgtccatttagtcttgaaatgtttggttcagtaaaagcattgccaatggtaaggaccattaggagttcttaattacaaacatttataacttaactttgcaaaatcaaaagtttagaaacccccatgagttcttatgtttacttagtccaatggtagaacttctaatgaggttcttaaaatttaaatttgtaagaatttgtgtttaaatattttggttaaaaaatttatgtgttttggttctcaaacttgtggttatgtgttttggtttttaaacatgtggatatggttttgaaatgtgtgcttatgtgtttaagtgacagtcacaaggaacataacagaggaacaagtgattagggttctcttatttccatacatattgttttttttttctcctttttatatataaatatcttagtttaaaaactattagaatttttaaaagaaaaatgtatataataagtttatccccgtagacttttctcttttaaaagtcaacatattcgaggcagatgtttactttataaattctaagaaccttacactttaacttcacggcataaccagacccaaaaaaaaaagcatatcaaaacaaaactgagagagagtatccatatttggaggaaaaagaaaagaatgcagcagccctatgagtaccgttacccacaaggcactggcccttcggctcctccgccgcctccaaaagccggagtgatagtggatccaaagtactgctctctgcaccctgtagatttggcgatcgtacggaaggtgttgaagataacggacggtaacttcgtgataacgaatgcggaaggaaacttgttgttcaaggtgaaggatcctttttttagtcttcacgagaagaggatcttgatggatggttttggaactaaggtcttgactttgaaagggaaggtacaaatttattaaaaacagagcacataactagatatacaataaaaaatagagctagctttattagtataataaagataatttggtgattgcagataatgaccatgcatgacaggtggctagtgtttagaggagggagtacggaggaggttgatctgctatacacggtgaaaagatcaaacatggttcagataaccaccaaacttgatgtgtttttggctgataacatagagcagaagaaatgtgattacagactcgaaggggtttggctcgagacttcttgttttgtctacgctggcgattctgacatcattcttgcccaagtaaacaaactctatttccttttcttagtacaagtctaactgtatattgaaaagaagtttttttgacgtaatttaaataaaatatgaaaagaaaacataagatttatataaaaggaaaatataaaaaaaatgaaaaattgtaactttatgttaagtttgagacatgaaaagaaaatagatgattatcagttaccaattataccaaaaatatagcgttacaaaatgttacatagaaaataaacatttttatttatgatgatggactgggtttaagtgatgagtaggtgattcgtgccacggcttctttctatattctataattttctgttttggtatggtttagtttctttaaaataaacttttttcttttttttcacatctggaataaacatgtttatactatatatacccatctatatatattattatgaactgggagttgctaatgttttattaattgttaaaacttgagaaataaaaacatttatttatgataaaataaaaatggtatggtttgaatggcagatgcgcgagaagaaaacgatgcagagcgttctctttggaaaggacaatttctgcctcactgttaatccaaatgttgattatgccttcattgcctctctcattgtcatccttgtagaaatacaaataagtcttagaaaattaacaaaacaactcttgcttttagaataagatgttgtattatagttagtgggctacatttaatttgtttccattaatcaaggtaatgtcgagtgcattttggagtttcatcaaaaagatgatatatacccaatcgaaagtttatggaagagggacataacagatttcatctgttagcctgtatgtaaggcttcccaaaggacagcgaggttatattccactcttgcatcgaaattgtttcagttttctttatttgcgtacaatggttgtattgtatttgattctatactttgtaagctctttgtgatataaaagtgtttgatttgtcgttaaaaataaaagttgtaggctacatattgtatgctgcgcctagtcgactcataacttacttggtcggcaagtcttgtttagggttttggagttaagtcttgtgttgtgtatatatatcatcgtattgaattgaacttgagtgcccaatggctttgctaatacatctgccaaccgatccgttgttagcacatgaactgtagtatttatgagatttcacatatatagtgatgataacattaacataatgttaattaacataatgttatcacccacataacataaggtttcctaaacaataaagaaatagcttgtacaacaaataatatagagacttaaaatatttttcggtttgggtttcacgggctttactttatgaacggattttaacggtccatattacttggtttgcaaaatagacattttgctatccaaattttattacattttgctctcttgttgctttagagattgccaaatattcttcttaagcagaagaatgtgatactacttcgtacttttccgtttcccagagataggctagctgccaataagagaaacatactcctaaaaatttttagtcgtcaggacatctacaaccctactctataattgactaaaaaaatatagatttttgcagattgactctttatatagagcaactatattctctacactattttggagtttaactttttttatatactttactccctcaaatttaaactttttatttaatacatataatcattttacaaacaacagttacaacacataattttataaacttaacaaacaaacaagtattaaatttaaaataatttatatacttaacaagaaacaaatactaaatttaaaataaacaacataagaaaactaaaacataaaactagtgatttaatagtccgagaaattacttttacataatatgattatcgaagatgaacgtgatctcaatgcaccaattcaagttggaagagaagctccacctcccgaagtcgagataacagaaaatgattatatccggtttccagagtttcttggtagattttaaaaaatcaaagataaagaagctcatttatcactgcgaaatgttttaattgatcatatgtgggaaaatattttaatggtgttatttaaaataaaaattttaatgttttattattgttatatgatgtaatttttttaataaataattagtgtttaatttaaataacatcatattttatgggaattttgcaaatctataatatataggatcaaattgtaaattatataattgaaagtattagtatataatttagaaatataatattcctaagaatatttttttttaagtagaaaatagagatatacattggaaagaaaccctcctctaaactaccttttttaagtagaaaaatgtattagttactccattttagagtaagatatagaactatacattggaaatggtcttaggcaagcagctcaatttttgttgcagtacacagaaagctcaagtttgagtcagttcacaacaacactccttgaccagctgttcttttgagaaaacgcaccactcttatcgaggcctccacgacgcgtttgcataaattgagacatgaacataataagaaatatcaggtcttgcattagcaaaataaattaaatacacaaccaatcctctataggtcaatggatcagagagaacgtcacttgtatccaaacccaaacgatggttttgttccattggagtatgaactagtttagaaccgactaagcctgtctccgctgcaaaatttaaggcatacttttttgtgtcaccatgataccttcttgacttcgagcaatctcaatttcaaaaaaatatatgagcttgcacaaaaatcacaccccctttagatggctataggttataattactaattaaagtcaatgctcaaaagttgtctctcactcctcataaagttgtcttggcctttctgattcctttaccgtttcttgttccacgttatatgcataatattgtaacacctaaattaaccacactagtacaaaatcataaacaaattcatatgacacataaaaataacgatatagctgttttcaaagccaaatcaatacaaaatgtcttctatttagtcttgaactgcttcgttgattagtttttacaagatcgtgagttcccatttggtgtagtctaccaattaactttttcttctcttcattcttcattttaaatatctatttgttcatgtataatttatttgtaatactatggatccgtgcagaaaattagcaacgtcttggtggttttcaaattatggctgagcaggaatgccccgttacaaacttacttctcctaggtcgtagcgaaaatggaaaaagcagcaccgggaacaccatcatcggtgaaaaatatttcgaagtaaatttgtttggaagagatatggaccagagatgtaagatgttcagagctttaatagaagatggcccaataatcaatgtgattgacactcctggtatatactccattaaaacttcatataaagtcttagttctaacattatatacaccaaactggcatttaaagtcatttgggaattgtttgtctaaaaatagtcctattacagctgtgattggcggataaaatacaccattgccaaaagaaaagttgaaatcattaaagtcagaatgtaacattgtacatgatacaggtttgctcgagtcatccgtgtcaggagactatctcagtaaggaaataatgaattgcttaactatggcggaagaaggaatacatgctgtattgtttgttctgtctataacgaatcgaatttcacagcgggaggagttcacatttaatacattgcagcagatatttgatgataaaatccttgactatttcattgtggtgttcactggtggtgatgagttggaagcagacaaccagaccttggacgattatttacgtgaaggttgccctgaatttttgacggtctgctagcattcgtttcgatcttagcatatatatattttttaaattagtgcaaccattaatatttctgtttttttttaacttggattaattacgaatttctagagagttctcaaactatgtggaggacgaaaggtcctgtttaacaacaagacaaaggataaaggcaagaggaataagcaacttaaccagcttctagcacatgtcacggatataagacagcaaaatggtgggataccgtatacagaaaatatgcaccgtaagatcaaggtaaaaaaaaaaatgtgtttgatatgtgcataaattgatcgtgtatgcttttcctttatatataagttatatcactaatttttgcacacaaatttttataactacacttcccatgtttaaattgtttatattaaaattgaacctcttcaccagctcctcaacggaagtaaaaacaattaatgatataattagtgaaacggtcatttccatctcatttaaacatatccttaagctttcatgttttcactaacaaactattttctagaaattgttactatttacatttttcactaacaaactattttctagaatttgttgtactacatacataataatggtaaatgttctcagtaaagtggacaaatctgaatcaaagcattaaattatatgttacttgaaccttccaatgagtaagcttctaggagaaggttgaaaaactggatagactttttttgaggggaagggtttgtgaaacagcccagtttaagaatttaaaatactcaaatgttaaactctaaactagaaaaatatcgtccaaatgaaaacattttttgattagaagtcgataaatagtttcaaaatgcctgaatgctagtaccattaaatgtgactttaaaacgaagatcatgtgggttcttttgctattcttcctttgtaacaaaacattcttcttgttgtaatatttaagctttcaaaattatgaaaagctcaaagcgtttaagatattgaaagctttggtgaaagttattggatgatatatatagaacctctggttcgatagattcaaattcattcactatgttatctattttatttctcaagtgtatgtctagtgtctttatattgtaattcatgttaaatatatcttgactcaatttcaatagatgtaatagaaacaacctatgtaaagatttaaatattgaaaatccttggtttttcaggaagagaatgataagctgcgggaacaagaaagtaatatagatgctaagaaacttgcagaagaagactcagcaatgatgaagcagaaattacgagtggatcatgatcaaaccatgaacatgatgattcaaccggtaaaactatacacataaaaaagctccatgctaatattgattacgtaatgcatgcagttaattcaatattgaattgttatcatgtatgtgaagattatgttaaaacaaagtacaacgacacatgaaagagagatgactcatatcgaagacacacaaaccatgaaaatgatggtacgtatggtaaacttgaattcataaactttgaaaacttgaatactatttttccaacattcaattaatttcttattctctggcttccatataggtggagaatgctttaaaacaaagtgctatggcacatgaaagagagatgagccagcttaaagacacactcctattgaaagacacacaaaccatgaacatggtgaaacaaatggttaattcgtgttcataaacttgtagacgtcaattcttattcttatctccatgattttttttagtatttatggttatatttcagatggagactgcattcaaagagaatgcgatggtacatgaaagagacatgtgtcaactaaaagacacactccagctgaaagacacacaaaccatcaacatgatgacgcaaatggtacattcttatttataacatttgttagtatgaatactttttcatttcacgcagttaatttagtattctttggttttatttctggtcaaaatgtgttaatacatgcagagtgcagaaacatatgaacgacagatgcgtcaaatgaaagacattattcaacagaaagacagactaaccatggaaatgatggaaaaaatggtaatttcatatagattttctgtaatcttgaaatgtttatctttcactggatactattaacttgatatattttggttatctttcagatggaaaatgcattaaaacagagtgaaatagcacatgaaagaggaatgcatcatcaatccccccgaaagggtaagacatgtggatgcaacattatgtgatgtcgccaactctattaataaatatcaagaacaaagtttctgtgtgattgattcaaaacttccagtatccatactttcattttgtgtgctatttttatataattctctacaactctctcatattgcaagaaacgaaggacatatttaacacatgtgcaaaacgtttttccaatattgtgtgtataaatgtagttatacattatttctcttaataaaggaggaagacatatggatgatggtaattttgtggtatattgtgtggtgagcctagtgtcacagacttttcttagaataccatgagactgtcgacactctccacaattgaccatcttcgactagttttaccctactttgggttcatcaggtgatcggctccaacaaaacagacttacccttgataacttagtagctatgttcgacatttataataataaactcgcaaaagtaaaagtgaaagaacggaacctaaatatattcatcacagtggcatatttagtcatgttcatcgtaaaccctaaaagtcaaatgtcaactctttcctcgttgcctttttaggctcttaaaacatgcagatgcatgagataagattaaattaaaaatttcatataatgcaacttgaaatacagattcgttttgtttgagaaaataatcggacttcacataatgcaacttgaacaaagtttttaaaatagggtctatagctatccagtagctagttttaacattcttacaatatatatgtaatttcctgaccgcccatgctagtgagcacctacgtcctttctcgggtccatgggtcctatcctgtctgacattcggtccgctacgtccaaaaggttttaaagacttggtttcagaccctacaaatcaatatatgatttttctttgtgttttttcctcacttacacagttccgacaatataatcgcaaaaaaatgattttcttttgaaaaagatgatttaatagtgccgaaacagttagtacaaatttacgaaatggtctatatatacatatttatgtttaaacttagttaacaacaaaaaaaattactttaataaaacagtagataaatatttttgcgaaataagaagatgaaataacagaacctaaatattcaatgcagattcattaagagccatgttccttcatgttcatcctaaacccttaaaagtcaaaaatcaaatgtcaaccctctcctcgtggccttctcagacacctaattgatatgccgatcaatatgtatgtgacgtagtgtttttagtgttttttaattgtttttaagattacaatagtgacatatccatataatgaatgcaattggaaagaaatattcattctttttctttgaaaataaaataatataatgcaacttaaacaaaaaaaactcatacaatgcaactgtcttttggccacgaaaagttctacatatggctagcccatgttccaagttagtttaataactaaatatattactcaattggaaacaaagtaggagcttattgacatttctcgagcagctatttaattgataaataaatttctttgtatttaaacaatagctcttagtaaatactgattacatactttttcgataaattactggtgtttcggacttttggtacataatctcgttcattatccggagctaccctttagtccattcctatttaatgaatgcttctccgtcgcaaagaggaattgaacccagacaaaaaaaaccaactcccttgtactactactaggccaccagccttttggtatccattacatacgaaatagatagacatagatatagattttaagggagattaagaacacaagtataaagaatatctctctttattagtttatgaaaattctctcaaaacctaaactctcaatctctcttaaaacccataagttgtatcacaccttgatacctccttatataataagcttttaaccttatcctaattattagataactcctaataatataagataactcctaacaatatattctagattatctcctagaataataaaagcttaatttccttatctcttttgtacaaagctcgccttgttgccaaagggtatgtacaacaatatggagtggactttgaagaagtttttgcaccagtggcaagaattgaaaccatacggttactcattaacctcgcagcttcacatggatgggaaatacaccacctagacgtcaaaacagctttccttcacggagaactaaaagaaacggtctatgtgtatcaacctgaaggtttcgaaagaaagggaagtgaagacaaagtgtacaaactcaacaaagccttatatggcttacgacaagcaccaagagcttggaacaataagctgaatcatatccttgtggaactgcagtttttaaaatgctctaaggaaccgtctgtctatcgtaaagaagtgagcaaggatcttcttctcattgctatatatgttgacgatttgtttgttacagggacaaatctagacatcatcaacaagttcaaagaggagatgtcttctaaatttgaaatgagtaaccttggaaagctaacatactaccttggaatagaagtcattcaacacaaagatggtatagctttaaatcaaaatcggtatgctctcaagatcttagaagaagctggtatgatagattgtaatcgtgttcatacaccaatggagatgggcttgaaattttcaaaagcagaggaagaagaggaagttgatgccactgcgtatagaaagaatgtgggttgtttaaggtatctccttcacactagaccagacttatcatattgtgtgggagttctaagcaggtacatgcaaagtccgagagtctcccatgcggctgcaatgaaacagtgtctaaggtacttgaagggaactacatcacttggtctaatctttaagcgatgtgagaagataccaaagttagtagggtacagcgatagcagccacaatgttgatccggatgatggtagaagtactgcaggacatgtgttttatcttggagaaagtccaataacatggtgctcgtcgaaacaagatgttgtggctctgtcatcgtgtgaagctgagtttatggcagggactgaagcggcaaaacaagctatttggcttcaagaactactaagtgagatcaccggaacagtgtgtggaaaggttactatactcattgacaacaaatcggctatagctctcaccaagaatcctgtttttcatggaagaagcaaacacattcataggagatatcatttcataagagagtgtgtagagaccggacaaattgaagtcgagcatgttccggggaatgagcaaaaggcggacattttgaccaaggctcttggaaggattaagttcaaagagatgagggatcttgtgggagttcaagatgtggtgaaagaagatttcaagcttaaaggggaaaatgttgggataagcttgaaagagaagaagtgacttgaagagcaagttactaaagagataaggaaattaagcttttattattctaggagataatctagaatatattgttaggagttatcttatattattaggagttatctaataattaggataaggttaaaagcttattatataaggaggtatcaaggtgtgatacaacttatgggttttaagagagattgagagtttaggttttgagagaattttcctaaactaataaagagagatattctttatacttgtgttcttaatctcccttaaaatctatatttggtatcagagcaaaatcaaaagtgttttgagatcataaaaaccctaaaaacaaaacgatgtctgaagttgctgttacgatcgagaaaccgaaagaaggaggagcatctacatctattcaatgtccaatactcaacacaacaaactacacggtatgggctatgaagatgaaggtggctcttaaggtacacaaaacgtgggatgtcattgaaacaggagcgaacgatcccgagaagaatgatatggccatgcatctacttttccaagcaataccagagtctatggtgctgcaaattggagagttagatacagcgaagaaagtatgggaagcaatcaaagaaaagaacgttggagcagagagagtaaaagaagcaaggttacaaaccttaatgaatgagttcgaccgcctcaagatgaaagactcagagaatattgaagctttctccgggaggttggctgagatagcatcaaagtctgctgccttaggagaaaatattgaaacagagaaacttgtcaaaaagtttcttaagagtctcccacgcaagaaatacatacaaatagtggcttctcttgaacaagttttggatttgaagaatacaagctttgaagacattgttggacggattaaggtttatgaagaaagagtatgggatgaagaagatgagactcaagatgatcaaagcaagttgatgtatgctagttcagattcaaaccgagattatcatggtagcagaggacgtggtggcagaggaaactacagaggaagaggtcgtggaagatatggttcaagagatctttcacaagtaatatgtttccgttgtgataaaatgggtcactatgcatctcaatgtccagatcgtcttcttaagttgcaggaaacacaagaaaacgatgctaaaagtacaaaagatgcagatgaactcatgatgaatgagatcgtttacctgaatgagaaacattgtgtgcctagcaaaatcgaaacatgtggtgatgatctttggtatcttgataatggagctagcaaccatatgactggagataggagatatttcaataaacttgatgcttcagtcactggaaaggtgagatttggagatgattctcggatagatattaaaggaaaaggcacaattgctttcactgatatgaatggaacatcgagaatcatgaatgatgtttatttcatacccgatttgaaatccaatatcattagccttgggcaagctacagagtcggggtgtgacatacgcttaaaaggaaactacttgacaatgtttgataaagatggtaagctacttgtgaaagctgagaaatccaaaaacaggctatataaagttcagatggggctaagaaacagagaatgcttgtatctaacaagcgttagtgaagcaagtctatggcatgcgaggatgggtcatatgaactctgcaactttaaaacccataagttgtatcacaccttgatacctccttatataataagcttttaaccttatcctaattattagataactcctaataatataagataactcctaacaatatattctagattatctcctagaataataaaagcttaatttccttatctctttagtaacttgctcttcaagtcacttcttctctttcaagcttatcccaacaatagacatagacatagacataaacatagcgataaacatttggataaataaaaattttagggacaatgtctaccatttgttacctatatattttgagaaaaatatgataaagaacatctacatatatatttttgtagtcattttagcaaataaatcttgtatttgaatttatttacaatgtcatgccattaatattaattattaataaataaaaatgtttaatcaaaaatgtaaatcaaaataggtttggcaaaaattctggacacatctttcctactattgcggcaatgatcatttagaaatctaatattattaattaatttcaaataaactatcacattatcaaataatcgtgcaaggtttgatattatggtcatattttgtattatttgtttggtttgctttattttgtattattttcacataaagaaaaataagttaaggtggtcatgtttcattttcctgaatattatctactgggttttgtgatatcgagtaaaaattaccattttacgttcatttcgattttaatgtttctatgttggcaatgtcaattagttttgaaaaaatattcaatggattaacccaaaaattttaatgatatcaatctagagttatatgatgggatgggtttggattgatattattacaaaatttataatatcattaacccaaagttataacacagtttaaatctaattttaatattttatcagcatcaatttcttttttttccagcactaatataaaattattaagtttaatactaaataaaaattttgtaaaatctaatatttatcatatatactaattaaaaaaattgtccgtcgtaccacatgttaaatcctaaaatagagtaattatacactaaataatatctatatatatatatatataaggtttgtacattgagaaaaatacaaacaatagataatataataatattaatcaattaagcaaattacagtttgattttttctaaaaaatatagctctgcggtacaccggaggttaaaatctaatgtgacgtatttctataataaaatataatttatattttaaatatatataaattatgagatttacaacaatgtatttctaacattacgattaaacaatgttcaagaatgtttttaggcactaaacggatgatagctaattcataacgcctaaaatgcttaacggggtccaacaaaaatattacgattttccaaaatcccggtgattaaaggtggtttaggttggcaatgcttaaaatttacaataaaaaaatataagatttaattatatttttaataatgaatttcagaagttctatttaagcatgaaaactagcgtcgtcgattaattacttcagtcgtctagcatcagccaaaaattgacgatagcaccctaaacactttcctctttaaaatcaagtttgtccttttctcaccatttttttctttctcttttgttgttgtaactttgcatctattaatttttatggtttaactatttctgtactcgagttcagaagttgcctaaaatttattatagatctgttagtatcacatatgctataattaacgaaacttgtttctttttctcagatggtgaaaaatattaaaatagctgcggaggcacaagagaagttctttgatgaaagagaacaagctcgtgagaatgaaaaacatgaaatgaagaataacgtggatgagttgaaaagacgtatgcatgaagaaaatctgcaggaatgccgcattctctaatcaatcattgacaaacatcttttatattcacaagctttcgggctttttctgagtgttatgagtctgcttttgcttatgttttgaattccatctattttatttcccttaaatgatttggtgagtctacttacacagctcatatgcttcttgtttgcactatgtataagtgcatatgagctttgtaaggagacgcattttgtttgacatttaattaaaaagagtcgagaaagagttttattctcaaatcccttgttttgctttttgacttggaattttaaaaatatttcaagaggttcatcgtagtccgatgattcatagaatcaacggcttaattggagctttctattttggctcttgttaggtattctggtatcagagtgttgggaaatcaatcctgcaagttaaggaaaccttataagttcatcatgtagtttcattatacaatttttttttctttctctgtgtctttatcgaaagtagtaggccaagccttgatgtgtctatatatcaaagtactaaataaatgaaaatattaggcctgagcacaatacccaaaccgaaagaaccacacagaacccgacccgaaaacccaaacctgttctacttcggttcttgtaaaatatccgatcggggtttgttctcaagtaacttcaggtatcgggtatcacccaaaccgaatctgatccccgtaagtacttattattacccgaacatataaatacataagaaaacatatatacactaataactttagtttgtgacttgtttaattattggattatgcaacaagctcaaaacaagctttacttcttattttatgttattgtcataaagaaaaacttgttataatttcaggtcttcccggttttatgggtactttctgtatatttgggtatatttagacaaggtttgggttagtactcaaacccgaaatagttttggttatttatcgggttcttcaaccaatacccaaatcatgcagatctgaagtgtacccgacccgaaattgtacatataaccaaatgggtcctaaacttctaaacctgaacccaaaagacccgacctgaacccgacccgaatacccaaacgtccagaatggtctatttcttcattctcaattcaggatggtgtctttcttcattcatctagtagaaaatgtaagggagaataaatataaaatttgacaattttaatctagtcattcacttcttattttacctatatgaatattaagttttttgaattctcaataaaatgtctaagtcaggaaagagtaaagaagggaagacagctattgtctcttcttcggaaccttaagctgttaacaagaaaagctatccaaataaggcctaaattaggacaagaaaagaacagctcataaaagagctagaaaaccaaatccaaaaacagaattgttaatataattctttcaatcaaagtgagcacttgtgtcatatgtttctcttatatttgagagttacgtaagaggaacaatacagaaacaaagaaacattagttatttcaaagaaacataagttaacacataggaaatagaaacattttataaatagccatattacatgacatatatgcattcatatgggagatcaagatattatttcttcaaagattggctagttcttggatgttgattgggtaagtgtaagctcgggagtaaaaattagatttcgccagcagtatgttagcagtctccgtcggatgaaacgcgtcccaaaagagatacttggttcggtcagggcacggggtctgcagcggcaaacatgttatctgaccattgttcctccccaccccacaacaacctttgtccacaacctcaaatcctgtaggatcaatgtaaataactagaagacattttaaaaacaattagactaatatattttcaatgtatgtaactcaccgtaagcggctccattgacggcgagatcataggtactcttgtaggaatcaaggtaaacaaactttgctcccttcaactgacctttgtttaaacggtccactagtttcttgacttgagtgttaaacaccacaattgcgttgttaatcttttcgttgcatctgccagtactattgttacgattattgtagcgggcgagctggtaaggtatgcaaccgatctgtcccactccagtcacaatcactttccgagctccaaattggtacaatcgctacgaaaaaaagaaaaaaaaaagaatcaagatatagaaaatctattgagatagatatatgcattattgtcttactgatcaacccttaccgtgagctgttgtgtgtagttctttatcagagactcagcaaaggttttgtcattgtaattggtactggttgagtaaaagtcaggcatgaagtaattgttgagataatcgttacttcccattcccgagtaaaagatacaacggcttaagtatctctggagctcatttgtgtctcctctgaagtatcgaagcatctgttgaaccgcggtcgtgtatagctctacctgctggttcatagaagtatgtgcaccctacaaaaatatttgtaatagaattcggttaaggcttacaataggattgatggtgttttaaattttttggcgatggatcaaaaaaaaaaaatagtgcgtctaccaagttgtcaccggtctcatctctaatgccagctgcaccagatgcgaaattcgcacctctaagtatagcctggccacgaatcctggaatatggtggaatatagttcctaaatccaagaatttgagctacaaaaaaaaatgtgttaactcattagtaaacaaattgtcagtgtttgcattgtgtttagaattgtaagaccgtttctagttagttctaggcatgtgtaaaagggaacattttgcacagaggaccaatgacaatatttagaatttgtttaaaagttttaggtcccaaaaaagttgacatagtatgacttgtattgaaataataaacgttatctaaaatattttctaattaaacacgttggtatatatgtacaagaagaattttacaaagcgctcggtacatataaaattcgccgacaaatatacctagtgcatcaacgtaggtgcgaccgttggtgaaccgtcccgttgtaccttggggaaagtcaatgccataaggtcggtaattagccctcgcaagagaaagcaacctacacataataatacaaattactatgaatttgtgtaacacataaaaaatcatattaatacagagaaaagaatgcaaggttaaacctattgttgtttccattgtcgactaaagagtcaccgaagatgaataaacatgggacttgtgcctgttgttgtggctgtgacacggtcgttttaaaaccaaacaaaaccagattcaaactaatcaacaatacaaaacggagaatgcccattaagttataatttagtgaaataattgtaatggtttttaagaagaatgagattgaaaattgatttgagtggagttcatagttatataatgaggaaatgtagttggttggtttggttcggtatgttataattggtttcatgtgttgataattttgtgacagttggtttttctattttaattctctatctttctctctcttaccaaacttctttttagctgcggctatattcacaagtgtctcatgcatgcagtctcgtgagggtctcagagtctaatgtgttgctttccagttgtttgtgtcacaagtcacaaaggctatttttgtaacagttggaacagtactcgaggacagtaaaaactattctaggcaaaaactaagatacgtatgtaattgttattaattgtaaagtttcaagttttagaattccaaaactttcccacactggaaaaatagtatttttattcatatctgcaattgtggaagattatgatcgagcatttttttttactgctttcttggtgatatgaagcaattaaatgtaaactagatgtttgccactaagaaggacccaattttttggtgatgtgaagtcctcgcataagcctagttatcgagtagatatagcatactccgaactcatatgtatagtagtaaaacatagatatgagtagaagttaagaaacatataactaatcaccaattactctacttctttgtacaactataaaaactgaactagcatttcacaaaatttctttagttccatcccaagatcattatcctagacaaagacatagcattttttattttattttctgaagaaaacatagtatttttcttggctcttagtttttagctttaaaaattgtcgtgtaaaatcacaatattacatacttacaagaacagaaaaattgttctccaactaataagttctaaataccacattactttttcatacctagaagaggttaaagagaatggcaactaagatttaaaggttggtttggtgtaagagcgtgaactctcatccagagttaacagatgtatctttaaacaggtgaggcatcacatatggaaccaagtttgggtttgaatcaaagtaagtagtttatgttgatggaaacagggaagcctagtgctaaaatggaacttggaaatttcattgtacttaggaaaattcatacaaaacatctctttgaggacatattttaatcaatctaacagtgctgggtccattcacaagattgaaatatggtcatatttcaacgaacacggcgagctttctcttcctgccccaaccctagagacttctgtgcatttgcaatgccttcaggatctgcattaaccatatcaaccgttaaaaccgcataccaagacaataaatcaagggtcattgaggagtataaggttttaaaacactgaggatgtcatcacaacttttaccgtacgacaagaaaacatttgactatataatccgttgcattaacaaggtattcgaaaaataatgctcaccaaagaattgagtgaaaatgcgggtgaagaagctcaagttgcgagagacattgaatgccattgaaggaggaagaggcttcaccaaagtgtctatagtgaatacactttgcaggaactgtaatagagaagcagactttacagcttaggaaaagcgttttaacaatataaaaatataaacacatgttacaatctatcgaaaggaaatcaatggtattcaaaaatcgcttgtatgtgaacactttgtgaatgcataaaacatgtttctgtgtaaagacggttcgagatgcatgcaatgtgtcatgattcaagttgttccatacccaaggattataacaacatgactatataacaaagcagaggctataaagtacctccttaaccaagatactaaatcactaagtagtctatggccaatgtgaccatgaacaatagtagaggaatttacataactgactaaccaactattcatacgatttccagaactaataaatatactatagtcgaaggggaagtaggtctacatcgaactacacagagtgtttacaggaaagtataccacccaataacgaaaccaatacatgtgaaaatacaaagatccctttaaaccagttttacagttacggtatagttctttaacaaatgtgaatctgctatctgagattctatccaatgtgcaaaaggctcaagatttcgaatttgaatgatgtatagacaccaagcaagtgtatcaaccattgcagaattttccaattcattcaaaactaaaactggatacaatgtgttaaaaatcaaagctttatgtaacagagagagctaaaaatccattctttgcagctaaaattacttcttctcaagcttcacataagctttcaatatcttaagacacagaacagtaccaaagtggtgcagaaacataaaagataaaatctttttcacatttctccaatacccaataatctaaagatgtgtgaacaaatgacagaagaaagattgccacaatttactagtaatttcacaatttcctaagaacagagcagagaggagcaaattcactatatgaaacctagaattacagtaatgagagaagggtagacctgatagttgcgattgaagctgtaacgaagctgaggatcaatctcaagtgaatcatcatcatcatcagcgagacttccttttttggttccgcggctagggacgtgcatcttcgacataccatcagaatcctttgtgactttaagctttgcgttgctaaacttatcggaatcatcttcgtcgtcgcctctccacggtgcttttgataacagttccttcttcttcgccattgttagccaatcctgagttcttcgtgtgtggggttggtttatatgtgagataagaccttaaagatgctgtttggttgcagagttaaacttgttactaaacaagatatgagtttaggcataaagtaaacaaacaagcccaaattgaaaaagcctgattagtgatttatcaaatgtcatgtttggttatcgagtgagatgtattaccaaacgggatatcaatttctgcataatactaactaggatcaccccgtgggccgtgggcccgtggtaattatttgatattttatgaatttaattgtgtattaaaatgtttcttttttttaataccagaaattctggacagaaatccgtaatctcgtaagcgaaatttagaggtcgttggttcgagtgacgcttgagacaaaactaatattatatgctatctattaatttttttttatattgtgaatcgattttttagttaataatggacaaataaatttaagcttgtatttcttctgtttagtgtcaagcttgtataatcgttaattttaagatttcatccgtgttataccgtctcgtattcaaatcaacccatctcagcactcctcgtaaaactaaatattattttattattattttttaataatattttaatttaaaagtttactttcaaaatttttaaaaatttactttcaaacattattttctcacaattttagagtttacctaggcgttgtggtaactagtaatgagggccacaacagaacgacatgtgatatcgcatataggtgctgttcgtttgatcagttaggtagtgcatctgggtgatccatccagaagatccattcagatgcatcatttggatgatgttcaatcctgaagttggtagtgcatttggatgaatcatctgaatgcagatgtgttcgtttgaattattttttaattatgtacatctgcatctgaatgcatagtgtatcaaatgactaaaaaagacatatatttatcttagtcttatttttatgatgtaaatgtattattcttttattaaaattaggaaaacactaaaaaaaattgtaagaaaatatggtactaaattaaaaatttacaaattagttttgttcaaaaatattcattaattaaagttaaaagaaggcacataaaaaaacaatgaggaatataaaacagaaatacatcattgtaaacacaatatttttttgtctacaataaccactaatataaaagtcgatatcttctaactatcttttcggtgatagaatcacgtacatctttcatcactctatcaccaaccggtacgtacagtacatgatctgtgtttggaacattgtcttctacttcatcattctctactacttcatcatcatgatgttcatattcttccactgcttctcaatgtacaaaatctgcatcctcttgacatgaatctctgataacattatggagagtcatagttgttgtcacaagtttcacccactttttcaactcatattaagggtgtttgcgatccaatatcctccacttagccttccagactccaaatgttcgctcaattatcgaacgcaaatcagagtgcttgcggttaaacaattctctagtattaaaccccgaaatatattacaagtaagaatcaaaaataaagagagagatatgtatacctagaaccgagctagcgctaatggaaaagaagatcgagagctaacgctaatggagaagcagatcgaagagtgagagataaagggaagtgaagaatcctaaagatctctttttcttctttgtccagaattgtcgagaaccgtagggtaagaaatggctttttgtagttcttcaatttttaaaggtgtattttagtcatttgctgtttttgactgcagctgatgcatctcaatgcaccgatcaaactcagctgaaatttttgaattttttggatgagtttaataaactcagctaactgatgcatccaactgttctaccaaattgtgtccaaacaaacatcagttgtcatctgcacctagatgaatcagtcaactgatcaaacgaacaataccttaatcaattgagtttttcaatcgaaagattctctatgttttgttgttgaattttatcaaaacttctgttttgttatcctttttgtatcttggagcacaagcactagtactgtatatagtagacatgatattctgaaccgaaccgagatttaaacaaatcggttcgatctgaacatgagttttttttttcatttttttttcatttttttttcctttagactgagtccgttactcatttagcctcatattttggctttgatttacctttaaacaccctaatttgacaaattctaccaatgaccttatgaccaattatcagttcagataaattccttatttgtattcattaatcaaaagggataatgaaatcacaaataatcatgcgaatactagtatgtatcgatttcagtaaatgcactaaaatcttgaaaaacgtatttaaatcaagcaaaaacaaaacaaaacaaatacaaaatgccagctaagcaagtccttcaatgtccactaggtaaaacaatttaccagccctgagtccgttgaccgaccaacgacggtgaactaaataaatctcccaccacaaaattaacggcggcgatcaacttccaccggacaaaaaggtcgtccagcacgagcccgatgactaggaatagtaaaatgtctaagtctcccattttgctccctcatataacctttacacaagaaagtcgccgagaactcatcttccaccggacggttaacgtcgtgaacaaaaacgtcagtttcaccatcttcacggttacgagccaaaagccccgccgtgtaaatagcactcatcctccccggagcttcttcatggtaaccagttggtgcatcaaccatgatcagatcccatttcgtctcgtaaaagtccgccgggaaatctttcaacgcaagatcacatttggagtttctcggatcagacacagatctacactcttctgatcttcctagttccatcagcttgtctgaatctttgacttttgtgtcgtaaactacgtggtaagattctaagtttgggaacttcttagttactatcgcaatccaagcttggtcttcttcaataaacactgaaatttaaaaacttccttaatgagaaatcagaaagttttcattagatctgttgaaacagaggaaaaaacagagtacttacaggtacgaccaccatggttaagagatgcccacattaaactgtcgtgacctaagccaaagacaaggaagttacaaggagacttcttgtccaagactctctttgagacagagacttcatcaaatgtttgttgtggagtgacgttactagtgacgtaatgaaccaatgcatcggataaagaaagtggcatctttgtgcattgttgtgttgttggacatccttcttgtttatgctgagtttcttcttcttcttgggagagatttgttttggagattggctttgaagaggaagaagagatgtttgatcttgctaagtagatgatgatcaagatcaagattgaggaacctatgaatatgaccttgagattaagagaagatggagatttggtcctcattttttctgactaaagaatcgatttttcgatttgggtttttggatctatgaatgaggaagatgttttgataatgatgagaagtgtatataatatagagaggttatggcttaatcattgaggaagttgaggaggacatgaaagctactaaggttgctgttcttccaatacaacagaagttggtgatgaatacacatatactaactaattgttttttttcatattgtatagtaatattttatattcatggtaattggaagatgtgaaacgtaatggagagatttctgattttaaaattgatgcttgaaagagaagaagaatttgatagtgatccaaaaacaagacaggtgttaaaaaggaaccaacatggtagttgcaactttgtgtttccttgtattttaaacaacccaagttgatttaacaactttttggttctttgtttctggaacaataatttttgtcaaacgaattaacatcaccatttgtttgtctttattcggtataaaaaaagctttcatttgcataatttcaagggtgtccaatttgtggtttaactaaaccaagaagttggcatgtctagtaataactttggagtttggagtaagaaagttagtgatgcgtaaatttaagagttaagacaaagtgagcatcattagtcgttagtccaagtctgatgagacaaacaaaatgatctactttaaaattacatcctattcctagaattaatgttgtgtatgcattattgcaatatgatgttctattccaaacagattcatatatacaaaaataatttaccgcatagtttttatatttcattgcccaaccagtttgtttaatatgttttcaaggttctacaaatatttagacgttttgaataggaactagtcgatcaccatccagtgtatgcataaagaaactttaaatcggattgaaaaaatcctgctttattacatgacattgcagaaatgaacgaaatacaaattaacataggactagcagacaatactttataagaaaacttgtagctcacttaagattgggcaaatatcactagatgggcatgacatataccccgagctgatgaagctcatgactagatgttccgtggaaccctacaattttgtaaccttccttcccgagaacaaagtttgatgttgtttcgagtccaaacggcggagaggttcgtttgttggtcttgaacttaagcatggttataacgccgcctccacttccaaatattttgtcaaaacaaccttccaccgtggtgatgtattcactcggatattcaagcttgaactgcgaaacatggaaaattaaaaagagattgaccatcttgactaactaagactagaaacgggtgatctattagccaatagtttctcttgatcatccaggaccaagtaatacaaatatgaatataatgaaaaggtgaaaggatatatatagtcacctcctcgtatccaagaagtgttggtttcccatgatcattcccttcagccacctgagagtctttatcatacacaaacttgacggcactgacaccattttcaccttgtcctacatatatattcctcacaccgttgaaaacaccatcgctccatggatctcctccttcacctccttttgcttgtagtgtttcagcggaaggaggaagaataaaccgggagaaataagctccgatggcatctactgcagcagcagcccgcccatgaaacccgataagagcactaccattgctttcaaacacgaatttacgagcagcaacctttccaaatatcggagaggttctcccttttgacgttttgaacatcagcgacctcacacggtttttactagcatcgcttacaatatcgcatgtaccctccatatatatgatatattcacttggatagtcgaccacaaactgaagtaaaaaataagcaaaagattatatgtcagaaaatataagggagggagaggagagtatttaaatatgtcagaacttggacctcctcttgtcgtcctacgttacccccgtactctcgtctttcaattaagccacctttgtcataatcaatcctgatttgccttatctcattggcatctaacgcaaaggaaatctttctcacaccattgtagttagtaccgtcatcccaaagttgggctcctgaaccaccttggtagtcaaatttagtaggaggagccgttacgaaataagctccaagagagtttagataagtctgagcatatccatggaagccaattatcttttttccgttaacttcaagtgaaaacttcaaaccattttcatcgtatcctatcatgtcagaagtcttcttgttggttttgaatttaagcccttgaaccaaacccttagattcatcatagtaaccctcaacggatacaagatgttcattggttggatcaatctcaaactgcaattaaatggttgataccaaatgattacaaaatgtcaataataataactatacaatgaaaatacttaaattgtcatattttgaagacatacataccgtttgcgtgaatcctctacccaagagaccatggactgatccactttgtggttgaccattcttgacataatcaaacttgacgtattgtataccttcctgaccaccttgtacataaatctttgttacatgatcatggtcagctaaatcatcccactgattgcctccgtttccaccttttgcttgtagtttctcggcaggtggaggcggaggagcaggagcagaaagaatcagcggagagaaatatgccccgatggcatctacggcagcagcagctcgcccatgaaacccgataagagcactaccattgctttcaaacacgaattttctagcagcaacttttccaaatatcggagaggttctcccttttgacgttttgaacatcagcgacctcacacggtttttactagtatcgcttacaatatcgcatgtaccctccatatatatgatgtattcagtcggatagtccagcacaaactaaagtaaaaacaaaattcttcatatgtcagaatataagatataaatacataaaaagagagagttagagaattttattatgtcaagatatgaacctcctcttgtcgtcctacgttacttccgtactcacgtttttctactaagccacttttgtcatattcaatcctgatttgccttatctcggtgtcatctaacgaaaaagaaacctttctcacaccattgtagttactaccatcatcccaaagttgggctcctgaaccaccttgatagtcaaatttagttggaggagccggtgcgaaataagctccaagagaatttagattagtgtcagcaaatccgtgaaagccaattattgcttttcccttaacttcaagtgagaacttcaaaccattttcatcgtatcctatcatgtcagaagtcttcttgttggttttgaatttaagtgcttgaataatacccttagattcatcatagtaaccttcaacggatacaatatactcactggtgggatcaatctcaaactgtaatcaaaagatgataaaaacaattacaaaatgtttatactaaacgcggagatgatataaatttttaaagaatttgatattgaacaattcttgggttcacccctagggatgaacctctttcattcacccctcttaattaaccaattaaaatttgctatatcatttaattaactaaattaaaacaatttatactatctaaataaattcattaaaatgcgctaaacttatttaattattaaatctaatccctaaccactttttataaactcaaaccgatatataatctcatttaattaaaaatctaaatgagggtttaatgtcagtgttaagaattatatatcggtttgggtttattatgatagtgttataatgatttatgttatatctgtttaaaatagaaaaatttattaatttatagaggttattaatttatgaatattaatttatagagatttcactttataagctatagcttggttggttactattcaagtgctgtagaaagaagtaaggttgtctaaagctctcacataaaaactactcttcgacccaaatttctcttttaaaaacatgtattattaaatatatttttaattttagtttatattaataaaaagacttttagaagtcacatttcattactttctagttaattaactaagtaaaagaaaaaaaaaagagaatagattatgagaatgcttttttctaaaatgaaaatagttaagtagactgaaaaatagttaatttttttttttttagaaacacataccgtttgcgtgaatcctttacgcgagagaccatggattgatccaagtttgggttgaccaatcttgagattatcaaacttaacataatcaaacttgacgtactgaatcccttcatgaccaccttgtacatgaatctttgcgatattgtcatggtcaagtaaatcatcccactgattgcctcctttcccgccttttgcttccaacttctgggccatcgcaaactgatttgattctctatgaactgaaataagtgtatatagtttaacttccattgtcataccattaaaaccattaccttatcctttagatatattttttttcttttgttgtaggatgacaacaatgttaaaacaatatgcttatataacgtttctaaggtgatttatataatatatataaagcaagtctgacggaagttagtagtgttgaagaaagatctaacctctgatgaatgttgaaggaaactttcctctctgatgatgctggagaaagaagatagagatggtgattaaaagatgggaaacgaagctgagatttagacaccgttgtctttggaaatactgaatttatatagaacaaataatttttttaatttgcatttggtggacggtgtgtaatcatataaagcaacccacttgtcattttggtatatagaacccctcgtggtttttgcaagatgcaatataatttgttaaccaatgaataaagaaagactctaaaactaaccattacaaaaatcagccatactttttgtccaccatctcaatctattttaaaccactcaccactagagtcttttttttttaaaaactactcattatttcataaatcaccatcctatattacggaaccttttgatttttcccttgccacaatcaactttttgttggttgacgattcaagctattatgatcttaactgaaatcatttcctgttgagggtagcctcatatcccaaggagagttttcctaagaaatagtaaaatgataatacgataaaaataacatttaatgagagattacatataatgtcctactggtaagagtagaaatgtaaccaaacagaaaccgataaaaacaaaaaaaaaacttaatacagttggttgtggttccgaatttatgttataaagcgagaaattgtgataaacaaaaaaacgaaaacaaaatgaaaatggcatgtttggtacttttcaagtaataaagttaattattagtaagtttaactgtttatgagttaagttaagacaaagagagtcatccatcattcattagtcgtcagtccaagtttgatatgaagagatgtacttttaaattgcatcatactcatgcaatgttgggtattatgccgtatgcaatatatcgtttcatactcattcataaaatgctcttggaaaaatcttactaaaaactttaaataagattttagtaagattttagtaaacctcacgaattaatttcggttactgatgtggttttgggtgtattgaccgcatcttttggtgtaacaagttattctttacattaggatcaaataggttattgccttattgggcagtaaaaattgtaacatatgtatttgatgctattccggtaataatattacctcttgtagaattattacgcagaagtgttggatagtccattttgatctttagggatgaacctttttcattcgccttctcttaaggaggagaatataaaggttcacccctaaagataaacccaaatatttttttttttgcttggtgagttatagtttacatatttttgtattacctttttttacgatcgtttttaagttaatgcatttcctaatgatatgtaagcaaggtattactatcctttataaataatatagattctaagtttttgtatttatttattacttgatacgatagtattttattgatagaaatatggattattagaaaaataagcaatgtatttagatactttctttcaactctataatatttattattgttttgacataaagagttgaagaaaattctatgaaaagataatggattatggaaatgtgtgatttggactattgatgcggaccgtgtagaaatatgactttatctgctcatttatctctggcatcgataatgggaaagaaaaaacaaaagataatatataaatatgtgagtatatctctgctatggtctcccatatagcgaacaaaggttgtctcttgcagttcacaaaatctgagaaaggtttgtcttgttgtgatgatttatgcatcaaaaacattattactagtataaagtaagaaaaaagggtcgacgtacaaggtcggatcttggattcacaataataataaagaacaaggttctgcgaacttcgtgctgctttccacttccatagctcgtacactaaatccaacatcattagtcaatgtcggtgttatcttctaacgaaacagttgtgagcattgattccacgtaagggatatggctggatggacaaaaaattatccaaatatagtactaattaattagttttctattgagtacgttactctatccttttaacgggtacttgaaatctaaagtgtctactatcactaagatatttggagaacatcgataattttatcagaaattcaatgttaacgtatgttcgatgtttgttttgatgagattttaacatatccattgatagtccatgggctctcaccaattttttactttaaattttttgatatttcaatattgagaaacttttgaagagttgttaagaaacgtgttcaatggtagaaacatgaggggttcacttataattttgtttgaaaataaagtttggattaagtgtattgagataaagtaattggtgtaatatgtgtttagtgtattaacaaaacagacttatagaaaggtagtcaaagaaagctgtggtgtaatatgtgtttagtgtattaacaaaacagactcatagaaaggtagtcaaagaaagatggagaagttaattaactttgagataacttcaatccaatttcgggtgttctaaatgtcactttagtttctcttaatctacttgttacttcattgtccacatatgaaatagactaaagatcatcatcccatagcaaaaaatgtctttcatatcccaatttcttgtgtcataaaatgtctttcaaatcactaaagatcatgtaaatctacttggtttctcactgttcatagatggaaactgactacagatcttgatctaatagcaaacaatgtacttagaacagtatatatcataaaaagggatccacaattttttgtaaaaatcagatcttttgattagctcattaccgaaaagaaacgcaatacttcttttaaaaggatatttctcgtcctaggtaatccaaaagcagtggcgccacgagctaaattgtcgatgttgtgacgctttgcaatgttgggaacaatcacatagctctaaaatcccaccatcgtcttcttctacttctttttctccgttctcttgcttcctccatatatcatacggaaaacaccaattccaagaccgcttctctagtagatttttctagcaatggaagctgaaaacagagttcatctccgaaggatctacggatatacaacatggctcaatctacatgagaggaaacattttagagcaaagaaacaaatattacgcattggagtaaaccaaagaaccttcagtgttatagaaccaacattgcaacacacatagagacataatgatccagaaaaaaacaagggctcaccgaaattgtaaccccctgactgcccctactagcaggctccacgtcctttcttgggcccatgggcatatccctgtccgacggtcagtgcgccatgtccgggaggtttttaaaaacttgttaccgatcctacaaatcgccacatgatcttttttcattctttgtcctcactcgcatggttccggctatcacttcccggaaagtcacccatcctgaaactactacagctcaaggatgtttaactgtggagttcttttaggacctttgaccgaaaagataagtgcactttggtgacataggtggtcaaattaattcttataaacctctttgcatgcaccaccatattcctgaaatcgaggtgttacagaaattttctcaaaataaccaatgtaagcaatcttgtcattcaaaatcggaaatcaaactcaagtatgttgaagcataatcaaatctcgcatcatatcacatttacagaaatcagctatttgatcaagaaacacaagttgttctgttttacaggtatgtctttacatcaaagagtcatgtcttttcttattacacaaacacaatgtttcgtttcatataagtataggtcgagtctctgtttcctgtaacaacaatcgaaagtgtaatacaatcaagtcaataagattgattaaatccataccctgtttttctttcattatcgcaaacacattcaaaacattaacaaaaaaactatgcaaatccaacggaatcaagcttagtatgttaatccttaacatcaatgaaatgcaaaaattgtggtgtgtactaacgaatttcgcatcagaatcctcaaatacatggttgaagaaaagaaacaaataagtgtgagtaataccttgccggcttgagatgggcggcgtaagccttaacgaactcatgcgacgagacatccttaaccgttcttcccatcgccaatgttgtttcctgactactatagcgcgaccgagcttttggtggcggtggggacaaaaaagaattaaagatgatgatggattcaattagtgtttgagatgatgatgatcgccagaagagagaaagtccgggaattttttttgcaaatgccactgtcacgcgtttatttatatttggagaaaatgtcagaaaaattcccaactttcaaaaatgggacgaaaaaatctccaactcatgagacgtcgtttatatcacatacttttggttgacttctccaaaaaatacaaaagttttgttgaccgagccaaattaatcatcgcgttaagtctctgttagtacgcgagaatcggggttaatactctattaacgaacatcgttaaacctacacgacttcgtttgattcacaaacaaaacgagccaaaaacgagagaaacgtctttgattcacagtctgctaaaaattcccaaatcgattcccaaatcgattagaaaccaatccctaaccctaaaagagaaaattctcaggtgccaaaagctctccagagaattattcagccagtcacctagtgccacgtcagcaacactctcaggtgccaaaagctctcgggagagagtcgactctatataattaggattttgatttaactaggttattagctgctgctacacataggtttgtttctatcgattgtttaatgtagttttaggttaagtaatcatttaaatagttatatattgacatatagtaatgcaaaaaatactataattttttttaattttctattcattttaacataattttttattttttattttatttatattttttgaattatttaattttgtttaaaataaaattaataaaaaaaaatttctttaggaaatattttggtataatattgaatatttgaagtatgatgtattatagagtttttaatcactaaatatatttttccattcgaatttagtgagatggatattttttatgtatcccaacaataaaacttttatttttcttgcttcactttagtttttgtttttcgcttttataaataattcattaaaaaaataaatctaatcaagccaaaataaattaaacattttagaactgagtcttgtaagacacttagtgttttatcaaaactgaaatgactcactcaaaattaagtcaaaataaacaaaaatgctaacctttaacatgaaatattgataactttagtgagactaataatgacatatataaccttaattgtgattaaaatgaaatttagatatatctagtgagactaaagatgatattatttccatatgttgtattttttatagaggttatatttttattgtttgcatacatattgtcttccttttttttttcctttttgttactatgtatattaacaaaactctaagtcaattatcaaaaattaatgattgattatttttggcatatttcaattttaataagaaaaacttatatttattttgttttcaattatttttaaagaataacatatattttttgtttttaattcttttcaaaactcaagaatattaattagtgggatagctaattgtgcttgagagtttaaaatcatatatgtaagtaaacttataaaatggataattataaattcaagattatgtcaccgaaagtatgagtatagtcgtgatcgaggaatatatgaaagtcaaaactaaccaaagtcgtgtcatcacaaaccaaaaattgtttaacaggtccaccaacctctctcacagcttcttctacgtacggcacacagaaaggcctttttcttaaacgagatttttccaaaacaattaaccgtagatatgaaagtaaaagaatccaacttgtccaacttatttaaacgccagtttgatggtttattgtggctctctcgacgatttgattagcataattatttttctccactgtccaacttgtttctaaagacttttagtatatgtcaaggttctattgttagacgttattcaaatagcaaattgtcgatcaatgattttaatatattattcttttgccaataagaaaaatatgatattttaataaaagaatctgcttcatttgaaaaacgctggaaatctttaaaacatttcaaagtatcatttaatctagggtgaattactcatatagcacataaaaatttgtttattactcacatggagttaaaaaatttgttgttcatatatgaccattaacatttgggttgtagttgtaacaataactttattacaaaactgccattcaaaaatattgttacgttagtgagagaaagtgagtgttaagcgggaaaatttctcgccagaacataagtctaccgtggcagtaacaacatagttaataggttttggtagagtaagtaggatgacaaattaacatggctagttgtatttagttaggagttttagagaagttaacataaaagatagagctaggtggtagagttagtaacaatggtggtagagtaacaaatatagtagatttaaataacaaattaacctttttggtggtagagtcaaatgttaaatagagttagtagttagagtaagctataatgacaacagacttgatgaagtttgacaaactataagatggcagatattaacttagtgacattagataacgtctcaatataaagttaatgatataaaacagttacaacagacttgtttacatgaaacaaagttaatcctaatgaaagagttatataataactctactagcgacgtgtcagggttacagttgactcaaatagcaccaaatattttatgtgctagtgagtttgtggtgataaagttacaagaagtggtagaatttaacaattgtgacgtttttacccgtaaaaggatttcatattatgcctgaaacctcacaatgttgacagacttactaatagtagtgaaagatctatatattagtgccagaattaattatctcataattaggtcaaaatgagttcttaacaatttgaaatgatggttttggtcttataagaaaacaagaatagtgtgaaatacctacatcaagggagggcaagattggaaaagaaaaagaaagacgaagaagtaatttgagttagggtttcgtgtagcttataacatgtcggtttcagaaatatggcagtatatgctcagagatttaaaataattgagttagggtcacctataccactaaagtgtacttatcttttcggtcaaattaacatcctctcagaactccacaattaagattgcttaagctagagcaatttcaggaaagatgatttttcgggaagtgattgttggaaccgtgtgaataaggatacaacactaagaaagatcatgtggtgatttgtataattggtaaacaagtctttaaagcctccaaacatagcggactggcccgaaagaagacgtgtgtgctcattgatagggacggttgaggcgttacaaagttaatctcgtcgaacaagatagacttagatctcgaataacacatgtttgtaaatatcaaagtgtcaaaattttacagaatctgtcgaagccttactctaagttaaactcgataagttatggttgttgcttcaaggccaagtacgtaactccataatccgtcatgattctatgcgaagtagtttgctagtttgctaatttcacttttatgttttaggaacgtaaatcaaagcaagatgattatcaaagaaagatttgatgcataatataattacttgtgcgagcacaaagtgttccactatggattaataagtttgataacggagtcatgtggagccattccagctctaccttcaagacagtacgacgaagcgaatgtggtggagatgattttagagacattgctagggtttttcttaattcgaaggtcgtcgatgttgctaatgtaaccttagcatgatccaacatgactagtactactcaaagttcaagatttcttaagaaagttttatattattttatttttttttttgttattttaaaagttaaataacataattgttagataaggttttttaaatatttttcaactatgttagatgtggagtttttatgttaattaatttggttgttaaatatatatccggacgtaccccggacttaatccctagtagtaatagaaaagcaataaaagtataacatagattatacgagtaaccgagattcatatcaatcccaagctcttcacgcaggtccggcttagtacatgtgctagagcacatagttctaaggtccaaaatatttttaatttttttttttcatacaaaaatcccaactattttttacaaaataaccactaattcaagaattataccttaaaaatccctaattttattataaaaaaaaacaatatgaaaagatccaaacttttaaaataatatttctataacgaaaaaccacaattatttgaaaacaaattggtatttattttttaaatataacaatataccaaaaaaatttttgtctaaaatgtccttagctattatggatcgggtcttccaccgggtctcgccaatatttgagtcgggtctgtctccactcatgagaccatctagcatttccttgatgtgggcaattgatgcaccaagctcattcatgatatcatgaacaccagttaacaagggtatttgatatatccttgcattaacatactcatacaatttattatttaaataatttattagattgaaaaagaaacaaatttaattaattacttatatcagtaggtgagggtgtcccccgtaaagctcacaatgaatctcgtagagttacatcatatattcgtcagggtccaagtgtgtcacgatcatcttacttgagagtatcgaagttggtctcattacggaccaaccatggcaaaatacaacgacctaaaattttcaaaaaaaaaatatctaatatatcttaagaaatcaagaactactcgcaatttccaaaaactacctttatatactcgaactcattctaaaaatgttgtcactcttttttattaaaataatatatacatatatatatatatatatatatatatacttcatatgagtttttttaatccaaaatgtacataatactacccaaccttatactctaaattagcaagtctaatatattgtataaagcaattatatttaattttaatacatatttttaaatcaaagttacataatatacgtgtatatattcttcttacacgatattttatagaactcagtcactcaaaggaactaaatttaaatgagatgaaaataaaatagaaaccatcaaattaaagctaaccataactcatgatattttggtgaatgatttgattcagtttctagtaagataaacaagagaaatgcaagcacttagaagaagatgagctttctctcatttcattcaaacgttttttgcacatttaatgctccgaaagtaacatattgtcagtcattagtttttatttttgtacaagtttatcatacttcttgttttatttgctccacacaattttccttttatgtttttcgtagacgtcacaatgaattagaaaaaaataatcttaaattattcaaatgaatatatatatatatatagtatatactaaaaaatagttaaagatatagtatacctctttcaaaacaaagcacaaagtaacatatacttattatacatcaatttgataaaatacctagtggacatgactaatcactaataccataaaaaagaacaaaatctggataatggatccaaatgatccatctaaatgtatccattgtatgttgtttgtttttgaatttggcaatccatctagttgaagcatttgaataaagctttgttagtttgagtaaatttgcatatgcatcacgatttatgttgtattaaaatgacttagaaaaaaaaaatatcttcatcttcttcttaatcatagtttaatgatttaaaattacatttacaactaaataaattttaatactttttttgttacacctataaccttttataaaatagtaaaattagcatctcattttcagagcagtctaaaaccacctaaaactaaatcatagaatctgatattattgtactgatgtttctcttctacttaatttcaaaaccatatacagtacctgggctgtttaaccgaaccaaaccgagattttcggatttggttcatgatcggttagtagtctaaaaccgatcggaaataattatgggcttagcccactaacattggtgggattattaatctgtaaccaatcaaaatccaagaatttcgctataaataaaaagcatattcctttttttaattttttttttcctatcgttgtcttcttttgctttcttattttgtcttctcacaatctgttcctatcaatcacacagataataatcctcagcttctctctcgctggatttcaacattcttccactcatcgcttctctttaccaaatcaaactcaacacttcactcaactcttatcggaccttccaaactatatccttcaatggatctatggactcttcaattaaaagacgtcacgatccgaaaccctatcttctcatcatcgatccctgagaaatcatcgtcgttttctaggaaactttgtgaattggagtttaggtttctcaatcgtaaggtttctgcttctccgtatcgttccttggttgttcgagctacctcgaagaagagtaacgacgattcttcttctcctggtatgtagttgttcaattgaagactaattttgttgaatttgattacttgcatgcttgatttggttagtaaatgtgcaatttaggtattatgatcgatcaaaatcggcgaatttaggttttgatgttgacactagtgtacttggtaatgtttgtgattcttatacctgttgttgttgatgaaggagatgcttctcaggaaaacaaaccttctaacggcaacaagtccggcgattccgcggctccgaaatcgttcggtttaaacacggattggagagagttcagagcgaacttgtttatgaaagagcaggtaataagtttggcattgttattgaagaactacatatatatactcaataaggtttacgctttgaatgatgtaacaggaagaaaaggcggaagctgagggtcatgaatcggaacctataggtttgaaatgggcacatccgattccgtttcctgagactggttgtgttctagttgctacagagaagctagatggttatagaacatttgcgagaactgttgtgcttcttcttagagcaggtactagacacccacaagaagggccgtttggtgttgttatcaaccgtccacttcataaaaacatcaagcatatgaaatcaacgaaaaccgagctcgctactacgttttctgaatgttctttgtactttggtggtcctcttgaagcaagcatgtttttgttgaaaactggtgataaaaccaagatacctgggtttgaagaagtcatgccggggcttaactttggtactcgaaatagtttggatgaagctgcagtgcttgtaaagaagggagttcttaagccacaggagtttagattctttgttggttacgccggttggcagctagatcagctcagagaagagattgaatcagattactggcatgttgctgcgtgcagctcggatttaatatgcggagcttcttcggaaaacttgtgggaggagattttacagttaatgggcggtcaatactccgagcttagccgaaaacctaagctggatatctgaagttttctaagagaacttgaggcttttttataacttatatatattttctctattaagccgatttgtatagcttactttcgttggcttgtacgtgagaataatgcacttctatgctatttataaagatttgctttgtgaaaacacactcctattatgtattctgcagtttataactaaacaacatctatctaataaattgaaacagttgttctaagatatacacatgtgtttgattcccctaaccaaaagaaaagagcagagcacgaaacagaggtggtggccatgtacaaagaccatgtgcaggtgttgattttgtttctcttgtttcatgtttcactaagcacatgctttgactgagatatctttgttcttctttgtagcagatttctcaaggcgggacttgcgtacagcttcttggattcgtctctcgtgctctttcatcatgtcttcaatgttaccaccaggaggcatcagtggacctgaatagtgcattctgttcttctttcgcatgtatgtctgaaacaatattaagtaaacatctcagtgtccattatcttaatgaagaaaaaggaagagttaatgagttagttaccgttgcgggtgctcttgaaacgatattctccttttgcgaagaactagctaagtagtctcccattgtagcaggtacgttgttggatcggcttggcttcacctcacctacattgctcctagagcttggatggatcactgaattggtatccgtaaagcgcttttctttcttgaacgacggggtagtgagtgagacatttgaatttcctgaagcaatgaactctggtgttaccttggagtctcttaaccctcttctcacagattcatgtccacgccacttcacagcttcagcttttttcctgaaattttcaaaatgaaaagtttgtttaggaatctcgcgtgcatcattggcagacgaatatacgctctcttagcatacgcaccttttagcttcttcgtctcgaacctttgcatcgagttccttgcttggtggatacttaggcaaacttgatatgtgacaagggagaggctccgttgtaaaaaactgaagaggtaaatgagacaatcatttatcagtattcttcgggagaccgaatcaagaatgttaataaagaaaaacaaggctactacctcactcagtagagtcgaagaagctgagcatcgtttctctggttctacagatagaagcttgtcaagaagatctagagaagaagatgatagattcttgaacgtctctagaaggacacgcttataaggatgttgcggtttgtaacttgtcgcctgtgggaactttgtcgtattccagaactcttcagatggtgaaccacacagtttaaagatcttgtgcatttgctcgaccttgaagaattatattttgaatatgaaaatcagttgaaatcaatggaacactataggctgaagcagtattgattagaaaactcacctctgttcttcccggcatgattggtttacatacaaagagttcagcgagaatgcaaccaacgctccagagatcaatggcgggtccatactctgtagatccaagtagaagctcaggagctctataccacaaggtgactacacggctagtcagtggttgatcttgatctggtttataaaaactcgccagaccgaaatctccgatcttaagaactccatcattgtttaccaaaagatttgaacccttgatgtcacggtgaaggattccacggctatgacaatgctcaagtccacaaagaagttgtttcataaaacacttgatctgaacacaaaacaactagtgagtttattgattggccagagaacacaacaaggttatttaagctttttgaaaatacctgtggttcagtgaatttgacaccaggcctaagagccaagcctgaaagatcatgctccatgtactcaaatacaaggtgcaagctacctgatagctttgaagtgacaagacactgaagcttcataacatttggatggtcgagttttcgtaaaatgttgatttctctagccatgaaccttacactttcaggatccatattagcaaacctcaccttcttcattgccacgattttgcctgtctcaagatcccttgccttatacacaatgctataagtcccttgcccaatctgcaaatacaatgttcacaacattacagtccactaaaccaatccaatgtatgattcaagacaaatgagattgaaagagactaactttgtcaagcttctcaaaggaatcagcacgtcgcggaacccaacctttaatagcttcaccagcaacagaggttaaccaataaggccaaccagctgcaataagctctgcttctgcgctacgcggaacattcgaaataatcaatcctcctcctttgccattatccgaaactcttcttcctctttgagaccttgaaggtctctctacaataaccgtcttaccatcatgactatcatcaataggaacaataagaccactcgctcttcttccaccaccagagcttccatcaacggctttatgcgaaaaatcgtctttattcgaaggcagaggagcaatcaattgaacagaagaagatttgttccaatattcatttgctttctcacgatgataaacaacaccctcttcatcttctgctgctccttttgagcaaatgcagcccataataatagtccttgttccacaatctactaacgttataacaatgatttaacacatggtcttacgtaaaaaaacacaaatctttatatatatcatgattgatccctaagcatcaaaacccaggaatcttcaggtctattacccggagagattcaatagaatgctaagtttttgaagcaagaaaccgaaatggtttcttctaaaccctaaaaagattgtaactctttgaagaaaaaacaacaaaaataacaaacacacatgagagttacgattcaagagcccaaaaatttgggattttttttctctctcactacaagagaggattgttagacgaaaacggaaaatgcgggggaaaaatatagaaaagaaagattgtgaaaaagaaaaatggaaaaaataatgaggagagatatggtttgtgtaagagtaaaatctggagagcccttgattcttgggacagcacagctcacaaagaatagttctctctttctatttctctttctctttgtttagaactagtcgaaaaaccgtttgcacgagaagtttatctttttaacaaaacttttgatgtgttcttgagtttctagaagctggattataatattttaaaatacttttgtatcaaaaaagtgatttcaaaatatttattagaaataggaaattatttacagatattttaccattttaccagatcatttctaaaccgggatccagattactcaaaaagtttatagaaaactcaaatttgtttccatttcgaaaaattaaaatctcttccattaaattacatatgattggtccaccaaattatatcttctccttaaaatgttgggatatatttttttaaaatgaaatataatacaattatataaatacagtaataatataaactaaaatgatatgttataatttgattggaaaattcataaatttttaaaatttaatttatatgttatatgttaacaaaacaattgtattaatatattatttatttctttggtaagttatatcaatatattattacaactcttacttttatcttccaaaactcatttatccatacataattagttatgatagaacttcaagataatatcaaataactcatccaacaaagcattcccacttaattaaaaaggaaaaaaaagaggataccagcaataaatcggttttggtgtcataatcaaatgattcaagtttctatttataaagaaaacaactagattttaacccgcggtacaccgcggaaacaatttattttctaaagttagtatacataaagtttgcaaattgtatctatctataaaatatttttattttatagtttacaattgttattaagtaacgtcctgtcaaacccgtcccaccaatccgtcccgtaaaaaaaccatttattttgtagtaattaaatgatattaaatattttggaagttttattttagtaactaatcgtgtagttaatgtggagagatttagggaagattgttaaatgtcaaatatttaatttgaagattttttttctaattatcaaaaacaaacattaaaatccagtggtacgtattgtaaataagttccaattataggatttatttcacaaaatagctgcaaaaatatatatgtagatatgatgaattttggtataaaataattaagtttgaactcataacggtgagataaatatctaaaatatctcatcaaccaatcagagaccaacgcccttctccaattcacaaatttattgtatttttttttattgtcaaattttttacttaaaagcttacacatggcatggagagacctattttctgcattacaacatgtggtaaattatcaaattattttttaatttgccagcaaaatttcaataggctcattgcattgcatcaattgttatttatcaacatcctcgttgtatataaactaagtctccagggtatgacagagatactgataccagttcataaatttgagtgtcgtgattatggtatcgtaggattcaaaatctcataagaactgccataatgagagacaaaaaaaactattgaattaaagaaagaaatcaacttccacctctccgtattcatcttttccttaatcgtattttatccgtaatttttagttcagattttgtatatattcaaaaatctacctctccgtatatattcagaaatgagtctctcaagctttaattcatgttaaattcactacaaacaaacatgacgttacacttacacatttcaacctatcattgttttcgatggtcataaacctctgacagcgaaacaaagactaattatcaaattgctatggcccattaattttcagggccggccctgtctgaaagttgtaaggcattgtaaaaaatgaagttgaccacgatctcaaatgatctacgagaacttgtacagtaattcttcaaacaatgtttcattaataacctacatatagtggattatagaatagaatcacacttatatcaccatatccatcacattttgatactaagaattaatcatcattgtacccacaaaaaaatgaaaaaagattgatcatcatcgtatcaattaatataaggaagttctttaaagtatttatttagccggttaacaaaaaatcatatcaaaacttttgaagataatattaaggataagaaagtgtttgctgaagctgaaatgtcaatgtatagtaggtccacaggagattctgacggcatattggaatcgtctcttctgtccccacacggagtgtaccataccaacgctattgcgattattctaatttatatttaataaaagaattttctagtcatcatcacttactggagtctcgaaatttgcttttttaaacgtgtctaaagagtcaaattcatgcttttacattatgatctaattaaaactttaatttataatttcacgcaattaggcctaacagaaaactgaacgtatgggacaattaaaacatttcatactaatataatattgactgcaacagttgttattgatactgattatagtatatctttaggtaatcaaagcttttcaacggactcatgctcactataatatggaataaacctgtacttttgaggcggccatagtacgaattggtacgtgcacgtcagctcgtgtgtatatattatgggttatatgtgtctacataatggactttcatcaaataattttgtttttaataaaccataggagtttcaggtttttggtctataatcttacctatttttcggagttagtcttattccaatttaacgaataccacaacgaaaaccgaagacgaagcacaaggtaaccacccttttttctaagtttttataagataacatttttttttcttggattgagttttttccttggtttatatttatttctcgtataaaccatatgatactatctgactgacaaggaaccaaaacattacatatatattgaaaatttgaattaatcatattggtatttatgacatcatcattgttaagagattacaaattgaacccaagaaaaacagtaagggtcgaaaatttattatactttactgaatataatcgaaaaaccttggttgatgatatgacattattaaaaaaaaaatcaaatggttaagcaattaagcgaacgtatatcaattattagaattccatatggactgaaattgctgcatttcaaaaaactcatccctatcgtgctgaccaaaaaattgtccgtataattcttcgtagtcagcaacttccaaatcctgcatccaccccatcctcggcgagtctaatggagactcattaatcgcttgaatctgatccggagacaatcctactcgagaaagtccttgaccagactcgagagctggttcactcaacctacctggtttaaacataagtgctgcatcttgtgcagccgcttgaatgtgctccgaactagagctttccggccgaggaaaactgtcgacgagttccggaaagttgagattggtcccacgtcctcggaggtgaagagccgcagcatcgtaggccgctgcagccatctcggccgtctcgtagcttccaagccaaatccttgttttcttaccgggttctcggatctccgatacccatttgccccatttcctccgacgaatgcctctgtaggacaactggttaacgttgaagcggtaatctcgttggccaacgtaagtgttttccataattaatacaaggttattttagtagcactatattgtgtgtgtgtgtgtttgtgagtgtatatagaactgtgcgaattagtttagaagttttgagttatagagtcagtggttaagtgaaattgtatatatagagaaataaagaagacaataaatgagggaatagaatttgtggatggcttgtttggtttcaggtgaagtgagcttcctacgtagttacttgtgaagtggaaatatgctgtcatgcatgcatgggtctctattacttacatggatattgtacattagcaaagctgtctttaagcgtgtacaaatagtgtgttgtgtgtatttgaaagaaaacgctgattgaatattatttttttgattgaagacaagtttgatatttatatgatttgggttctaaatttttttagaaatatttttttacacatcaaatatgttttcagtaaaaactttgtacatgccttccaagaaaattgacatggccttgataaatatatttcatatttggtatattctgggccttagttagattatagatatttaacttgatcaaaaagttcaaaatatttaaacttttcaactaggaaatagatttcatagttcatactgagataaattagtgtttcatataaaagatcaattattttaagtcaaagtagtatattgtgttttgttgttgtaagaccaaatgaaaagaaaagcaattagtcctttatatcatgtgttggttagaactttaggttctcgtacaaaagtccatatatgccatatctcaagagtcttgacagcaaatatgatagtaacattatgtaactgcccatagagtcatagacaattaagttgaccaaaataatgaattgttcataacgaagaattggggaaagaaacccatctaaattaaccaaaatttgattttatgaaattctaaaacccgaccagcagaagatcgatgctctgtctccaaataatttcttgatgtgtagtaaaacctcatgagccaaattccaaccctaaatagttaaatggctgcataatggtcaccaccgccactaaggcactaacaaccacaccgtatcgaattgtggaaatccgtacggtccatccggtggtcaaaaaaatactttcagtcttaatctcaccgcccattatatattgttgcttatctacaagatttggatcctacataagaactcaacaagtataacaaagttttgctttccagtctattttttgaacttatacgttccttggttcaagaactcatgtgtgtaatttaatattatttgcaaagaaacataattaagaattgaatagtttaacgtatataaacatgaattaagaattgaatagtataacgtatataaacatgaattatgatattatttcattcttttggtcaactttccttgtcgttgtgggtagtgaaagttataaaaaaaacttctatgcaaaataaattaaaatagtaaaaactaattgaaaccccaggaattaaaatttaatggaaaaatatgtgcatagagcaaattaacaatcatcaataataatggaaagagaaatgtagatgaatttttcggcaaggagccaagtcttcaaagcggaagaggatggaagaacaaagatgtgatgagatctttgagcttgccattgggattggtgaaattatcaccctcctcgtaatacagattgaccaatcgtacaatgttgaagcaccggaccagaatcggacgtgacacactttttatcgtcaagaactcttccatcattatcttgtaattatctctaatcatcttcttaatttctcgaaccgccaattccttggtaacattatgttgcttaacgtaacagttcaccccattaaccacttctcctctcctcatctcctcctcgaagccggctatgtcgtttgtaagacgaaatataacacttaaagctcgtaacattttgggtttggatttgaaccacgcgttcgtttgattctcctcacaatcttccatcgatataaagctgtacattgcaaagcatctaatccctgacgagtcaagcccaagctcaatatagtcatcaaaggttggaacgtgacctgctcgtgcccattttgatatttcagcgtacgctctccccatgatcttaatctgcaaaattctcaatattaaacacaaacattaatttatatggacattgattaaaactaaaccctaaaattgttggtgtacctcttctacggtgtcttgcacactcgaggatcttcctcgcggcttcatttctctttcaatatcttccattgtttcaactatactttggatgacgattcttaaacagctcggtagtttgtcaatggcaccaggatcccacctaaggattttcccatgcatgtgctcgttaaaaaatgacgtcattataagaccacatgattcatacttagtaaactacctttccaaagaatcaataagacttctaacttcagagaaagttccatatgcatcacaggtgtcatccataactactatcacttgggaaactttagtggctataattctcccaagtgaatagtgtggctcgagatacaccgccatgacaccgataaaggtctctagaagcctgtctctgatgtaaggtagcttatatggaagatcaatgtctttccaccatcttcaaccacaaaaacattaaatagaaaatattataagaatcttacatctaagattatattaaaatataatataaaagacacataccaatcaacatattacctacaggttttgaattgaaagctcactaaaaattatatgataacagatgttattccaattgacccgacatgagtatgttgcctgataaaaaaaaaaaaatctaaaagagggatttaattcgagatgggcaatcctacaggtcaagcctaaagtaagatgagatctaaattaatgtataagatatataaatctatctacttgttatctctctgtttttagtcggaatctcatgagttttggtaaagtactaaaggatgtacatataagaaattcaccgggaaatatgaataaaagtaggccaacatacttggtgagagtttttagctctctaacgtaatgtagctggcaaaagttgaagttgagcttcgcaaacttgagcaatgtctcatcatgaccttctttttgatagaaatgaatatattcccgggcagctattatttccatcttaagaaaccgaggtttatacaatgcgttaagtatatgtcttgagatatgaggagctgtagcttgttggccggccaaagattccaagtgataccttgtgaaactcaaggcttcgtccaatatagtttcgaagggtgttgcgagatgcgctgcttcgtacagctgtagcattccccgaacatcactgactagatgttccttgaacttggcatcaacacctttgaatctatcgaacacatctaaattgacaccaggatatatatatatatatgttatatatgtatatagctaaatacatatgtaatggtataaaatatgcatcccattgaaaaatggtaataatgggaactgcatgtcttaccacaagaaatcttgtgtccatataatctgaaaacctcaaacatgatggcagttgtctccaaatcatcttcgtctgtaaatagcatgtccaacttccgaaaagcctgttctagaatctcttcaatttccttctcaaagtaatggaaagtaccaaggcaaataagcaagtgtatgagacatattctctctttgtcagtcttgtgagacgacattagcatgtttctcactttcggctttattgattcaatctctgtctctagtgtatcaaattcctacaaaatatcagtgctcagaataatgttctacaataacgactgattatgaaacacattcatcagatcaggtacttaccgagttttcggtggggacagagaggatgtgatctccccaaagatcgggagcactgtgaggcaagggacgactactctcaacaccactagtcttactacaagccttgacacataagttgagttttgttgatctccgggaaagagtagtgtggttttgaagcaaatgcataggaaagagcgagagtttggtcttaagaggaagtcgagtaccgttgccaaggtgagggagagttttagctcgaaaacccattcttgctgcttccatttttttgtttctcttctgtatttgattttttttttcctaaagctttctcatctgtaccttgtggtcacgctttaaatacacatcattggaatcccagtcatgtaacatttattgacggatttaaaagtggtcaaaaaattaaatggcatcgtcgtgcacatgagatccgaaaaaaatgcgagggaaaatgataaggttcatttacctatagggaatctacacaatcacgttactcctgattgctttatcccagtgtgcagctaacaatttacttatagaaaaattgtttttcagaaaaattaaccatgtgaaattaattacgtagaattaatgggattgattctcccaatttaagtagaatctcgatgtttgaattaaaaaatttcaaacaaagagaaacacaaacacgtggttctgaacactactatgcatgcaaacatggtttggagcatttatacgacaaaactaaacgcattttgttttccttcgtaaagacagatactatgtatcatttttacgtttttctactaaaaccctcttactttcttcaacgctttgattatctcatcctatatatctctgaattttttatctatgcaacaagaaaaaaagaaggtgaaattttattttcaaaagaaagatcagagtagcgggaagagctagaagaagaaatggttgttctgctgagttcggtgatgaacctggtggcaccgcctgcgacgatgttggtgatgaccttcgcaagatcgttcctatgtttcataagcgcatgggaacggctctacaactcctttttggctacccaaaatatagaggacaaagtcttagtacactacagaaaaacagcgatttccagtgaaattcttacgagactttttcctttcctttttctaccagttttttacaacaaacttaatttcctacgatgttcttacatcaattctcataggaaattagcttccaaatttctacgaaaactgtttttgtactagttaatatatcaatctatttggcaaagtagcacttgtaggaaatttaatttggtgactaaaatttattaaatatcctaaagaacgactcattgtctttattcttgtcaataaaagtcggtgtgtcttgtcaatgcaatccagcggtaaaatttgtcacttacatattgaaaataaaagtacaaataaatataccgcagagttttacatgctttcgcacactaggatccttggaatcaagttaaattataggatccttaaaaacggtaatactctcggcgtgttgatgtgcggccggtatggacaaaagtcacaaaacaatcaagcttcttccaaatacataagagcgcctttttatcgtctccaatccctaggaccctaactcttcttaagttttttgtttcaacattgtagtagattatgtggtccaacattgcgtgacaacaaacgtggagctataatgatctcaccagccttgttggtacctggaaaagatattcgaccagactcataagaatcccacacagatttgggaaacacacatttttgttttgaccattcatgtgtttcttgacgtcttctactccataaattacaactagagacagctccataagggtttctcacaatggaagctaggttccctttctattctatatttctatgaatatttcgtccttcccccattgcaggacaacagcaggtgcattgataaaacttagtttctcagatctaacatttggttgtattaaaataccatagtagagaaaaccgttgatgcatacattcggttatatccttctctaaggtaaataggtatttttaatgtgtctccatccttgaacacctcctaatgttaacaccttgtgctttagatgaccactacgatcatccccattatcctttgtactgatcatcaatcggatcgtaaccaacaaaagtagcggttctaggtaacttaatgaattgctcggttctagggttatacatcatcaaccgaccttcagcttcaataacgagaatgccatggaaataagcgcaagaccctgaatggaaactaaagctcacagaaggacagcatctcaaaattgggtataccaaagaagaaaagaagacttgataggtaatatagtaaatatagccatcctttagatccagagggagcgaatctaagttttacttagggttgtgcctttctcatcgttcttgcgtttcatggcgcctcccaaacgaaccctaggttcgactccacaaagaggaaagatgttcgtgtgttgaaaaagctagatgtgtggcttatttggttgtttttaaacgatgctaaatcattgttggttagaatttgaggatctcgaatcctagatgatgccatgaaattgtcagaaaacaattatatgaatttgtcatatatgcgaatcgcatatataaataatgacaaatatgacataatctacatatacatttttggggacgatttgtgtcgaaaaatcatttttcaatttcgatattgtatgtttagtctctacaaaatcaatcagacaagatattttctttagaacaatcaccaaatttttgcttaacaattaacatattgcactaattacttgcctaaacatataaattgttaagtactaccctcataaattgcacaaatcaattcctaaaactctaccgaattaatgaatgcttatttcctaattagcaaaattcgaaaatcaatcctaactaaccatatctagaattatttgattatatattctccgatatttttgcacccccgtatcaaataaaaatccaaatatagaaacagatttacgagtatagactaatgatattcaagcatattcctaatttgaattatgtgtaaatctttcctcatgatttattgcgttataggttttttaatgatattgaaatcttaccaaaaaatcagcacataatcaattcgatttttaaaaatatctcaactatttatataacatttaaaccaattactcacacacatacctacttgagatattttctctcccgaaatctgcaagaaattgatttttagaaacaaattaatgacttaaaatatataacgacagcatattcctaaataaaaaacgattttatagatttgattctatattagatacaatatcgaatatattttgattggcattcaagagatttgtgacctaatttactagcctataaatactataaagcttgacgtctcagaacatcatcaaacacccaaaatggtatcgtcgttagtgagaaggtaatcaatattcttataagattgcaaatttgagtcttttgttattgaaactaagtgaattgctttttttttgttgaaaggttctttctagcgacaatcctaaacgcggttacaacgctgcaactggcaaatacaaagatctaatggctacaaaaatcatcgatacaaccaaagtgagtataattcctcagctttttctttttcatgttgcttagagcatgtttcgtctgtggctaagacattcttcttgaatcatatgaatcatcgtcaacttttttatacaaaatctggcgatttcaggttacggcttctaagtccgcaaattgagaacattgtagtctctgaggaagcaaaagacacgactgaggtctttaatttctgatctgaaacatttttatccaatgtaaattctatgtttttcgactgacttgaagaacatataatttggttttgtgttctttaattcaagaaccagtctttcaatatgataacttcacgaaaaagctaaatggtttgcagtggtcaatagacttgatttggtcaaaattattttctttattaaaactaggattggatcggcgagacatcaaagctaatagattttcatttttttgaagtattttattcttttaggtataagacgatgaattgctgctgatacgttttttagcaaagtcatttagtgacggcgaaacatttttttgaaatcaacgatatcacctgttttagtgaatcgtttttatctatcagtttcaattttgtatctcgacagggcaattttgctgctgattcgttagcaaagtctgcacttgtggcagcaaaagctttctccattaatggaatgtaaccgtaactttttcccctttatctaatctaagtttgttaaaaaaaaaaggtataagacgatgaagttgtttagatttttcctattttggcttttatttttttggaaaatattaataataacacaagatccgttttatttattggggttgcaatgtttttgttttttagttttcgtttttttgctatcatataatgttgcaccgtaaaaagcaaaatataaaatttgactcaatttatatctttctttaaaataaaagtattattattaaaaaattacaagatattgttttatgtcaagaaacatagttatatggtaggataataaattttttataaagaattttttttttatttcaagagacatagtacaattatatatttttctggattggtctaaaaacatagaaaataaatgagatgtgttatgaattataataaccatttattagcttgattttgttttttaatttttgatccggaattgaattactcggacctttctataattatcttcattcctacaacaaagctaaacaaaactaacatttaataaatcagtttaagaaattgtcaatcgtatatatggttataacaaatcaatatttgacaatcaagttgtttcctactataatgctaacgattttgattattacttttttagttgtttagttctatataattataattaagttaaaaatattttgttttctcacaaaaaaaaataacaaaatgatgtttttaattttacgggacatgttatatggtagtacgggttttggtcgatattaatacaagatatataacacgggtgaaatcagataattaacaatcaaaatacaattaaaaaaacaaacaaacaatattaataaaataactacaacttaaatttagttataaaaaactaacatgcagtctaccgcggtgctcttatgtaagagccaaaacaatatacgaagagacgcatacgtgtcaccgtgagtggatgatatgaaacgcaaaaagaaatttctctcctctctctcttgccatgttttctccgatggcgaaaggagatgagatacgtctcgatcatcatcatttggcggtggctaattaagtctaaatgcctgaaaatacaaaaaacagtcccttcatgtcatagggtgattattcatacgtttgtgaaattattatatttataaatattaatatatgacgcgtttcttcagaggcacgcaagtaacgggtttgtcttgtgcactgtgagaccaaaggtctctcccatgtctaaatcctctgaaccgacaccgtttggaagcttccactcaaaggtatagagaagagaagcaagcatgagatgcactgttttcaaagctaaaggcagtcccggacaaattctacgcccggccccaaatggtgtaagctcataatttgtaccttttacatcaatatctttccctaaaaacctctctggctcaaactgagtcggattttcccatacatttgggtctcgtcctatggcccacacgttcacaagaacatgagagtctttaggcacatggaatccaagaatatctacgtccctttccgcttttcttgggaggagaaatggagcagccgggtgtaatcggaaagtttcttttatgaccgcttgtaaatacggcagttttgagatatgagactcttgaacgtcgccgttttgccttatcacacgattgatctcgtcttgaacttttgtcatcgttttagggtttccaagtaactctgtcattgcccattccacggtactagagtttgtatctgtgcctgctagaaacatatcctgaaacaatacaagcatattttatatatcagtgtactaatataagatcatgttatgcattatgctaagacttacgagaagtaggtgttcgatctcgtcaatgttgatttcagattcatctccttgttggagatcgattagtgcatccaagaagtctctgctcgaaacatctttctcatctatacgcgatgagttttccaaaatcctagcatcgtaaaactctctaaatacctgaagcaatttacccgagtactctttcatcttcttactattaccttgtaagtcaagtaacctcataaatgggaagaagttagaaacgtctggatttccgatagattccatgtaaccaatcaccatctcctgaaacgcacttgaatttttcgaatcgtagctaccgagattgactgaaaacaaaatattcgatatgatattgagagctgtgacgaaagatgcacgagaaatgtcaacagcttctcctctctcactgctttcactcaaaaagttgacaagttcttgcaccttcttcattctcagagctttagtagcctcgatacgctgcggtgagaacagctgagtaaacgtcatttcctcaactttctgaaaaacattacatatgtggaaacgatgatatatcaatagaaaaaactaaagcgctaaaaaggagaaattgtagaaaaagaataatcaaaagcagttacctgaaacgaggtgacgacggatgtatccagccaacggaaaactcatgatgattgttggatttggtcgcttgagttatgtaccgtccagacaagatttgatcgtgtgcttttagtacttctctcgcagcatctcgtgaagttatgaccactgagtttaaatatccaagcttaagactcatgactggtccatatgtttttgagaggtccgtgaatgagtggtgtgggttctttccgactagatgaatgtttccgattatgggtaatcgtggaggacccggaggtgacttggatagtacttgagtagggctccgtcgggatcttgcggcagtgaagaaaagaaaacatgataagataaagcagaaaaggagaaacataggttgtcctgagatgatgtccatttgtgtttctaaagtgatagatacttataaaattgtctgaaaatagcatagatatatagagagggaaaactgaagttgacaatggtaggtttcatttcgatgggcaccaaattcttgacagtgtacaaaacccatttgcgattaatcacccatagaaaagtatacgtgcacaatggcgtaaaagtcgttatgaactcttattagtcatgcactaaattaaaaaagcttaattatattattcctatattcctcttctattatctaatgacaaagaatttatatctactttgacatattcaaaaatattattcatttagtagataaaattttgtgtcacaagttttttttcacttccaaaaaaactttgtaaattccaacatcgaaaatgtcagaatttcgtttgaaacatgcttccggcgattttccaacaatgaaaaatccatcaagatcagatcatccgaaaacaaaattcgtcaaaattacaaggtaacttgtttgaaaaggtttttagatattttccaatgaattcctaactatattacaaggtaataacaatgtggtcctaattagatataccagctgaccaatcaagccaagctcaattacctgttgtgttttaagggatcacatcttcctggaaattatggatacagtacaagatagctaagagcatcctcaatggttaagaaccaattagttcttaactttcaatcttagcattatttaaaaataaaattttgttttttgaaagctaagactaaaagttaagtatcttaataaatatgacctccaattgttcagattcaattgtattttaaggatagaagatcaattttgcatattttgttttgtttttccttttgtttattccttaaaccaatgtcgaagtgacacatagacacatcttagctaagcaaaaacatattaagttagaaacatatcttagcttaagattgttggtttgatttaatttaatcacttttaatcctaagtttttgttaagatatacctaagatacaccattgagggtgctctaattacgaattttctgcactgctcattgtagtgttattttctacttttgatccaaactgttttccacacgcctttgtttttaaatggaaaccagttcgttctttaaatacaaagcgaaaggtgtgtgtttaaacatgaagattacatcaaattaagattagtttcaatagcaagaagagattgtgtcttcttagttatcagaagacatgattttccttcctgatcattacattggcgtgtgtatgtatttgcattaacgaaaaagggggactgggagaaaaaaaaaaaaacacccataaattgacaatttgggcatgaagttgtgcactcttgaaattttcaaggtgtagagagtctccaattcgtgccccaaaagtttgggagagagccaatcgagatttaagacattcggttccaaataatggtaattcatgtcttggacgaatttgcttgatcatatgtggtttggtgcatctatgaaaatgtgtaagaaactcttgatgaaatatatgatttttgaatatgatgtccatatcagaaacttaagttaattactaaaatctattttttttattgatcatgagttttttcttatataggctaagctgcaatcacgtacacctaagctaagtggataattgctctaaatcctaacttatatataaaaataaacaccaaaccccaataactcatatttcgtatcgttactctctgtgactaagagtttgtccacaagctccaactccgggtatgcttttagcagtttccaattttaaaatcatgttttctaataattaggatgacacaatctcttcttactattcaaaatctttactaaatcttcatgtttaaatcagaaacatccttttcagtttgggtttaattaacgaactggttcccaatttcttttaaaaggcctgtggaaaacaatttggatcaaaagtagaaaaaacaatatgatgagcggtgtagaaaatttgtaattggatttctagcgttctatacaaaacttccacgaagatgtgatcgcttgaatatgacacaacataacacgtaactgagcttggcttgataggtcggctggtatctaatgaggatattattagcaccattgaagataagaagataataacagctgttagcttgtaatatagtttgaaattccttcgaaattgccaacaaatatccgacaacttttctgacaagtttccaacaaatagttgtcattaatttcagacgaattctcctttgtcgaaacatcgttgcaatagcctgaaacaaacgaaattctaacatttttgaacgtcgttagttactatgttttgtggtagttcaacatactacattaatgtttattggtgataaaaatttcgacaacattttaaataaataagataacaaaattttagtgtcaaagtagatacgtacagtaaataattgttttgtcatttatataaaaaaggaatatagaaatagtataattaagcttttgtagtctagttcatgacttatacgagttcataacgacttttttaggcccttgtgtacgtatacttttatgtcgtgaaagtgatcggtcgcaaatgagttttgaattttttcgtggaaagttgaggtcgcagtggcaagaccaatgagcccatcaaaatgaaaaatatcatgtccttttttgtcaacttcagttttccctctataaatcttatgctattttcagaaaatatgaagtagaattctatcacttagaaacacaaatggacatcatctcaggacaacctctatttctcatcttctgctttatcttatcatgtcttcttttcttcaccaccgcacgatctcgacgtagcccttgtcaattgtccaagtcacctccggggcctccacggttacccataattggaaacattcatctggtcggaaagaacccacatcactcattcacggacctctcaaaaacatatggaccagtcatgagtcttaagcttggatgtttaaactcagtggtcatagcttcacgagacgctgtgagagaagtactaaaaacacacgaccaaatcttgtctggacggtacataagtgaagcgaccaaatccaacaatcatcatgaattttccgttggctggattcatccatcgtcatctcgttttaggtaactacttattgatttttcctttcctatgattagtgggaagaagttaactaggaaatccaactacttctcgttttagtaactaggaaatgctagatctttgatcatgatgatgatcttcttcgaaatactggatctagataataatacttgcagtagaccgaccatacatgcttggccctgacctaaaatccaacaagctggtgcattaggtaacaccgtaacaaaatatattttaattttaagtgcaattaaatttcaaaatagtcttgtagtacagtggtttttgttttactttttggcaaaaagtgacgagtttaagcgctttggttttttctttctgttagtatattgtgatgttactgagttgtgtagctgtgacagttggaacatggacactcggtcagaatcacaacatatgcagtgacagtttagagaaacattctaagatagtattgaagcttgaagatcatcaaagtacaatctacaaaggtgagcttgagttctaaaacgcagtaacaaagggggagaatgagagtatatttgtaactggttgttagactcaagatgatgacacacagctcaagatatgagatgatacagactacactgcaacaagaacatatgtgtgaaacagggatgatacagaccgtgatacaacagaggacttggcacagaatgaaacaagagtttatgcagacagcaacagagatattgaaagatctatgtgacgctggagtatcaacagaaagtatcagagttgtgttccacaggtagcagctgtgtacacaacaggagaactgaacgtagaaagaaacaagctaagaatgaagatgacgtggcgtgtttctattggagacgtgatgtttcctttagtggtggctcagatactttcggatcaaagaaaaaagattgcgagaatatttggagcttagggttttgtcttgagtatatatagatgactgccgtgacaaaaagaggtggcgcgtctatgatatagttgagagagatgcacacatgtgtgtggcgtcgccccaccaaatacagatgatgatctgttggtggtattcctttggaatctgcagcccttagagaagacggtgatgcaccggtgctgccgggtggtagtcaagacatgcgtggcttgatactgtttccaaagtccatctagaaaagagtggtaagtatagttatgctgtaatatcatatgcaattgtatttgcaatcttgttctagtggaattgttctggactaggtctcggggatgtaggttgttaccgaaccccgttaacaaatctctgtgtcatttactttatgcacacgtacaagttctttacacactctcatcattaacgacgtattagatctagcacacagttagtaatttcactttccacttatgtaatgttttcagaatgttgaggaaattgtcggctactcagctgttctcaccgcagtgtatccaggctaccaaagctctgaggatgaagaaggtgcaggaacttgtcaacttcctgagtgaaagctgtgagagagaagaagctgttgatatttctcatgtatccttcgtcacagctctcaatatcatatcgaatattttgttctcagtcaatctcggtagctacgattcaaaaaattccagtgcgtttcaagagatggtgatcggttaccaggaatctatcggaaatccagaccttgctaacttcttcccatttatgagatttcttgacttgcaaggtaacagtaagaagatgagggagtcctcagggagattgcttcaggtattcagagagttttatgatgctcggattgtggagaaatcatcgcgttcagttgagaaagatgtttcgagtaaagacttcctggatgtgcttatcgatctccaacaaggagatgaaactgaaatcaacatcgacgagatcgaacacctacttctcgtaagtcttagcttagttcataacatgatctatattagttcactgatattaatatataatagacgtatgtgtcaggatatgtttgtagcaggcacagatacaaactcaagtaccgtggaatgggcaatggcagagttacttggaaaccctaaaacgatgacaaaagttcaagacgagatcaatcatgtgatagggcaaaacggtgactttcaagagtctgatatctcaaaactgccgtatttaaaagcggtcgtaaaagaaactttccgactacaccctgctgctccatttctcctccaaagaaaagctgaaaccaacgtagagattcttggattcactgtgcttaaagactctcaggttcttgtgaacgtgtgggccataggacgagacccacttgtatgggaaaatccgacccattttgagccagagaggtttttggggaaagagattgatgtaaaaggtacagattatgagcttacaccgtttggggctgggcgtagaatttgtccgggactgcctttggctatgaaaacagtgcatctcatgcttgcttctcttctctatacctttgaatggaagcttccaaacggtgtcggttcagaggatttggacatggaagagacctttggtctcacagtgcacaagacaaacccgttacttgccgtgcctctgaagaaacgagccataaattaatacttcttgtattgtttgaatttgataaaaattatattgaagggtctgttttcttttgtatttttcaagcgtttattattaaattaccaaagatttcaaaatacatttagaaagctaactaaggctgtgaccatgttcatatatatggtctgagaaaagcctagctatgatgagatatcgtgtcaaggacagggatattgtgagacgtggaatcacaaaagttgcaacaaccttcttgaccttgcaaagcttgttggagaagcaaaaacaattaagggttatgtttgttattcatgaatgggggatgcaaggattctaaaattctaattatgtaaacaggagaagtaaatactaatacctagacaggcatcgccgactgtatgtaccacttattagaacattggtgctactagttacaatatcaatctatatgccaaagtagcacttttaggaaatttagtttggagacttatatttaaaaaattatcgtgaagaaacatacactttttttgggtttgaaaaactacccatgtttttttttgctaaactgcaaatatcatataaatgaagggaaaggtttacatgagttagaacctatacatttgatttcctggcaaaaagttaaaaaacaggaaaaacaatatgatagtctgaattgggtcagattttagtgcaaccaaagagtcataagccgcctgaaccgcttcttcaatcttcttgcagtaatggagtttttgatttccctgtcaatggtcttaaacaccactgacggcagaatagtctcatgattgtggaggaagttgtttctctgcttccaaatggcgtagagcacagattgcacaatgagcttgcggagggttggcggcgagcgtctgttccgttgaagagtccagtccatgaggtcgttccacacaacaaagctgaaagcaggcagctctaatctcacactaacagtgtgccaaagaaaacacgcaaattcacaagtcaaaaacaaatggtctctgtcctcgatgtccaaagagcaaagcccgcaagtcgtttgtaattgcataccccaagaggcaagcctagttttagtgggtaggcggtcaagatttgttacccacatatggaaagcatgtttaggagttgcacctttaaaccacaccgtttttgcccagctaaccacatccgatcttggtctcagggctgcccaagttttcgcagaggaaaagccgttgcatagcttgtcttccaccacccaatcataaacatccaactccccggatagagtaggtagatcaatagaaaaactacccatgttttttccttgttaatagaacctagtgcgtcgcggttgtccttgtcaatgaaacctggtgtgttgttgttatcattgaaatctggtggttggggcatgtaaagtttaatgagagagccatttttaacaacaagttggcggaagatttgatatcatgagagagccacatgcaagacaaaacaaagttggggtgttggtgaaaacctttagctacaaggctgatattctatatttttcaacgtttctaagaggtaatatgagcggcggcgaggaacatacgaagtagatgtgaaggaaaaacgagacataaaatctacacgcagtcacgcacgatgtatacgaaaatgaaacaataataattgtacaataagaaaaatgtatacgactataggaggacttacatgagtatcctaacgaatttgcagtagaagagaaaaaatatacgataatctagtttatgttttttcttcaaattcagtctctcttctcactgtttatgagttgatttagtttgattccgtgtgttgaaaggaatatcgttatgattagtatgaaagataattataacgaagatattcattctttaaaaaacaaaaaaaaaaaattagttctaaattaaatttgattctaaaataatttcttatggtgttgacaaaaagaataagtaaaagtatataaattcttatggtgtctatctaattagacatttagagcatcttcattgcataacttcttatatgcgtcttaaatactaaccatagttaaaattaaagacattcccctttttcaatgtcaaaaatgactttcccgagacatttcagacaccaaaaaaaggaaatatctttagttttaatcatggttagtttatttttaccatagttagtctttaaaacatccacaaggggttatgcaatgaagatactcttataagtgtatatacaggatatatgtatacaacaaacaataatgcaatagtgtttatgtatatatctcgttgacttcgtcaataaagaatacatcagatttcttccaaatacttcaagaaccacccacacttttaatttaagtataaagtacaccagctatttacattgtcattcagttaatcttccaatctacttcaaagcttttcttcaatagcttgaaattatttgctttcattttcaaaatgcatcaatgttggtaccaaagccgaaactaacaagataagaagataaaagcaataaaatagaagatcttatttcaacaactgaacgatcggccgtttataggaaactactgaaagtagaaagtttaacttaacaagttggagtgtcgagcttgagactttgagcgggaatctaaaatattctctgattcccactttcaattttcagatgtctccttctgacatttatctgtttctatttataatactgatggagctactgacatttatctgcttctctttatagtagtgatgggacagtcgtaggtattattctccggcgatgtgagattctcgtctctaaggctgttttcaaaaggtgggcctttcttcgatgctcagcttaatgggctgatgctttcttttatgggctggatcttcctcactttctcttaattatgtcatcaattctgatgggccgcataagtatgacttggggcgaagcccatatctaacaatcaatattatgttggaaatatatatgagtcaataattttcagtatcaaaggaagtttaacctctttatggatagatagagtatggtttgggtacggacaatttaaaaattctgaatttttttaaactatgcgaaactaaggaaatacaaaagttagatgtttttgaaatgaaaattgtgaaatcatcatatttaaaattatttctaccatttctttccactattttcaaattatattgtaagaaaacagtagtctaatattctgccaaaaaaaaaaaaatagaaaaactaattccaaatgttcaaaaattatattcacgtattgctcgggtaatcacttacgagttacgccctatgtatcaaaataaaatacatataggttgaatataccaatcaagacaactcgtaaacctacattgtttatccatacattgtaattaatagtttcaaaatattttctattattaataaatcatgaagaaaacaaaacatcactattttgataatgttaaaacatgacttaatagtaaactaaaaatatcaacatctaaaaatcaagtggtacatttgtttcaagttaatctttgaccacgtatatcattcttcaactatataaattgttaacattgaacaaccggacctcaagaacattagattaaataataagaattcaaatacacaataacgcggtttattagaacaagaggagtgacgttgtagaaagcacgttcacatttttagctttgttgatgatttctctagagactaaaataacgcttcaacgaaaacagctcattttcttcttcttttctctcaatttttttattagtgaaaaattcaccaaccagaatctcaggaaatttttattcattggaaacttggattaaaaatgattaaaattaaattatattgatatacaaagaatgaacctggagctggcaacatgccaacatcaaacggtagatgtttgtatttttatagtaatttcactagagtaaattacttctattaatttttttggcacatatcaaaagttcactactatttcattcctcgaatatttcccggcaaaaggaaaaataccaaatcattatactctttttcgtgaattaccaagttttattggtcaaaattcaggactctataaaaatcctattgggggacagttttcttgttgataaggacaaattcattaataaatataaaattattgacctattaacgaaacatgtaaaaatgtagaagaatatatattatacaattaggctaattaaccgtcaacgtatttttgatggcaatattagagtaattttaagaactgcaataactttaaatgatggtttttcatattaaaattactcttatatatatggtatgagaacatcattatatttcttttaagaagatttggattttgtacattttctcgaatacgaagcagataatgtccaatttttttgtgcaatagattgcgtgagtgtttaaattacacagttggttcgaatatgcttgtcatttgacattctgtcagtttcaatttgcatatcttattaattagtaatatcactcacttttcactatataaatataagttggttgtaataaaacagttggattgctacttcttattaattttttttaagacataacgagtggtatgtattggattctagtacttattaatgaaatattagaagaaaaaacaaaaaaaaattcaattcatatcactcttctttgaataatttgattttaatatttccctgagtttataattaatttggatggaatctttgaattaatctttcgagtcttctttaactggaagaaaaaccctttcggatgttcgtatgctttattgctaaaccttttagataccaaagcgatgagttccattacattatgtaatttacatatactctttatatatctttaagattagttttctagagttatctgattattacttaattatgtatccatcttttttaacactaaatatttgttcataaacacgaagagcactaaaactttattaagttcaaataattttcattataaatttcttgaatttatgattttttttactttgattaacaaaaaaatttaatacaaccaaaataccatttataaaaaaaaatcaaagtatgaatatttttctatggaacaatttaaaaaaaaaatactaaaatattaatttaatagaaacataaaacaataacgtcaaaactaacttgttaataggacatttgctatacacgtattgtataattttttacggataggatgatgtttttatcaatcacgaaattatacatggcggtcccaaattcatcctttcaaaaatatcctccttgtggttagtttcagggtgtttcatctagagggtttaatattcagtttttagggtgtttcatttagccactcttttttactctttgagttgagtgtgtatgatatcattaaatacagatgcaaaaatgttgctgaactacattgtaaatgggtatgttgaacttggaggatccgacgaaattgcatatggatgaatttgggacggccatgtgtaattgccaaaaaaagtgacaatatattgccaaaaatacatttacaactatcaccaaccaaactaatatggcatatcgggtcaacaagacaccaagtttgattgtccgatctactaatcggattaagtacttgtataaattcccctcaacttaacaatgagagaggataaaagagtactatgtttcaatggactgcttaacttcaacagccgggaacattctattattttcgaatactcgttttcttttcatataactattacacaatataccgttttgtaagtttttgtatagtccgatggtatgttttaatttgtaaaaggttaagctttggaaacaaatataatttttgataaactataaaaaaaacataatatgtcattaaactcatagacaagaatgttcgaaaccgcatcagcgcaatcaaagacttgggagatcatctatatgatgacggcaagagtttgtggttctctacttgatcaactccataaataagacctcgagactcacttccaataccttcttcacttttgatgttttttcctaatttttcaaacaaactaaagcattcattgtacacaacaagtctttttggttgaatatatttttacattcaattgaaataaaaaaaacataatctgaattttatactgtctatcggataaaaccaaaaaaaggccaacaagtgatagtgctccttatcctttttaccaactcttttacggggccggctattagctgggcacctactattttattttaccgaaaggccgcaaatcaatcatgatcatcatttccactccagttataactttctttcgtcattatcacaataacgcaaaaagtaaaaaatttagtgggttcgtaaatcattattattgtgtgtttttttcataaatatatatggagattatgaatcctacgagattttgctacagaatccttgcttataaaatgaacaacaatcaaataaaataaatgtggattcagtgttgaattcttctacaaattcagaagaaattgaccaaaaatattatttagttatatacacgttcatatggcttttaatagaaattaaaatatatacaagtagtactcttactcttgtaaggttattagtttattttgtcttggcagtttagtaatcaccaaccaaagctattttgtggcccgcatgttgtcttctttttcttctgtctttgcttctatttatgcttctatagacacttgtctttcgtagttcatttcctttatcattcatatctctctctttctctctctctcagctctggagaattaaacagagaaattttttgggtaaatctcacttttttttttgtttgtggctataatccttttctttacttcatcatttcatcaggttatatagcttcaagcttgtttcttgttgttgcttttaactgtttatcttctttgtgtatgttcataattcacagaaaaagatttagcccttcttgtcttgaagcaattgcttcatgtgattagaaatcttttctatttttgtaggattcatcaatctttttcttgcaaaacccatgacagatttcagttttctcatgcaaaagctttaagctttttttgctctttcttgggtttttgtctttttttctttgtttttttttcttctctttgttggacactatccagatttcctgacaaaagactacttttgcacctgaaataaatcctgaaaaacatcatcttttgttttatatgattatatctgaaatctctaatgctttaaatcttaagttcacctctctttcgttgttttatatcttttttttatctgaccaaattaaagtatcttaaagtctcaggtttatatcaaagatgcaaaacgttcctgaagaccaaaacaaaatggtatgttttgtctttgtatatcaaaactaattatgttactttaaaaaccaaaaataaaactagttatcattgtctaaaagtgatatgagtattaattattttggtggttgtggaaataactaaacatgattacgtacgtataacagtgatgcaatatagtcattaccattctgaaaaaaattattatcttgttttgatcatgggtcaaactctttataggtcatagatgataaacttcctccattttcatgggaaagaaagttgaacagtcaagcaaagactccttctgagttcaaattgagtaaacgagatcacatgcatctggtaatttcatcatttctttggctgaaattgattttgattagagacatattcttaaacgaggaatcatctttcttgctgtaaaagttatgtttttttaggtcaaggtgctctgttttttttttggaaattttaaacttaaacttctctccctatctctgttttggcttttccaaagtttccattaggctacagattgtggcgtcacaccaaagacgaagccgccaaaggaagagtaagagatatatctctcataaccttcttttaatgctcacaaacatttgatgactttttgttttcatcaaatactaaatacttcccaaaacctgcaggcttcgatcttcgatatcttcagaaaacaccatattacgggagatcacggtgtccctttaggaggaattgggtatgggaatatacacatttgctttagaaactgcatagaacacaaagttgcaatgctctcgagttttaagatcctctattacaatttcctaatgtacaaaaccgcggggtaaaaaaccgtgattcagttcaggaagcattggaaggagttacaagggtgagtttcagcagttcaagctgttcccaaaaatttgtgaggaagctccaatcctcacaaaccaattctctgtaagtaaacaatcatgaacattgcttggtttcttctattgtaaaccaaaacctgtgtgtttgatgtctttgtgaagtatcactctcatgcttcttgatctgttaaaattataggcttttgtttctcgtcctggaggtgtgaaacactcaactgttctatgtccatcaaagccacaagttgtcaagtaagccaaatacattattttcttgtgtctcaatcagatctatagttaaaagaaacagagtaaatgtgtgaatgatattaactatgttattgtatatgtttgtgcagagacaatggaggctatttatgccaaggccaagctccaaatatgggaattgagtcttgggactggaacatgacaggggaaaaatctacttaccatgctctttatccgaggtcttggaccgtctatgatggtataatattcgacctaaatgtctctaatcatgtttactacagattaatttactgcaaagtcttgatgtatattaaggttatgaaaatgtttttacttgatgaacaggtgaacctgaccctgaactcagaatagtttcacgtcaagtctctccctttatacctcataattacgaggaaagcagtcttccggtttcggttttcaacttcacggtatgattattctatggcgcttaccctcaagattataactaattaggtcacaacttgttctaagctgatggagttttgttatgtttcaggtgactaatactggagcagaaccagcaattgtaactttgctctttacttgggaggtaattaatcgcctaaaagataaattggggttcttctgcatgttttcaattaaaaaaactgacccatttgtctctgtgttataattagaattctgtgggaggtgcttctggactaactggacaacactttaactcaactatgaagtaagactcatcattttatgctgcaatagattttgctatgggtttcttattctgacatggatcttctttctattatggaaatcttatagagcaaaagatggagttcatgcagtagccttacagcacaagtaaaaaccattttctctgactctttgattggtttggtactctgttttagtgttgatcatttgttaaattttttgtgtaacttatcttgcaggacagcaaatggacacccacctgttagctacgcaattgcggcaaaagaaacagaggatgttcgtgtctcctcatgtccttgtttcattgtttctggcactactcctaatcaaatcacagcaggagatatgtgggatgagattaaaaaggtttatagtttttttcaagtgttccttattactgttagaagaaagatcaaaagttttaactattcgtttatcttcagaatgcatcattcgacaagttaaccagcaatgcatgctctccttcgaaacctggaacttccattggagcagccatagcagcaaaggtgaaagttccaccgggatgtgaccgcacagtcacattttccctctcttgggattgtcccgaggctagattcgacgagaagacttaccataggtatgtgtgtgtgaccccattacacttcaatccagtatgaaattttcttactaacttaaaaagttatacttgtagacgatacacaagattctatggtagtttaggaaatgctgcggtagcaatggctcacgacgctcttctcagtaagcaaacaattcccatttcttgttccttgagtcttgttaaactaagagatcatcagattatgatattttctcctttctatttttgttcttgcttgttgttagactttcctgaatgggaaactcagattgaagagtggcaagctcctgttcttgctgacacaacacttcctgagtggtaataaattctgcttcaaccttttttcttctttgccaaattcaattgagcagaagaaagtaatcagaaatcattttcaggtatagagtaaccctcttcaatgaactatactatttcaactcaggaggaacaatgtggaccggtaacagacgtttgcttcgtccacaagttttatatatttctgtaacttacaattttctaaactcgatttttgggattgtttttatgtagatggtttacctccaaagcaaagcttagatagtataggaagaagaaagatctctctcggtttatcaaccatagacaaaaatgatcaagaccagaacaacgtagccttagacatcctgggaagaatcgatgcggtctgctcacagattcacgctcctttaacctcaaatgctgcgctcggaaacactatgattcagaacaccacagagaacattggacagttcctttacctagaaggagttcaatatctaatgtacaatacttatgatgttcatttctactcctcttttgcattgctcatgctttttccaaaaattgagctaagtatccagagagatttcgcggctgcggttctgatgcatgattctagcaagaaacaggtcatgagctctggcgaatttgttaccagaaaagttctaggagctgttcctcatgatattggtttgaacgatccttggtttgaacttaatgcttataacttgttcaacacggataggtggaaagacttgaactccaagtttgttcttcaagtttacagagatgtggttgcaactggtgacttaaactttgcgaaagcggtttggccgtcggtttacactgcaatcgcctacttggaccagtttgataaagacggagacgggatgattgaaaacgaagggtttccagatcagacttatgacgcgtggtcttgctcaggagttagtgcttattgcgggggtctttgggtcgcggctcttcaggccggatctgcgttggcccgtgaaattggggacaatggggctgcagtttacttcaacgctaagtatgagaaagctagaagcgtttacgagaagctttggaacggttcttatttcaattacgataacagtcgaagcggctcgagctcgtcgatcttggctgatcagatggctggacaatggtaagtgttaataaaaatcagcaatgctgcgtttagcaattgaaatttcaatattgagtttggagtgttttgtatataggtatgcgagagcttgtggactgaagccgatagcgaaagaagaatggataaagaaagcgttggagacggtctacgacttcaatgtgatgagagtgagagatggaacacgtggtgctgtgaacgggatgttacctgatggacgagtagacacaagcacgatggtgtcgagggaggtttgggctgggacaacatactcggtcgcggcttgtatgattcaagaagggcttgcggataaaggttttaggacagcaagtggaatctatgaggccgcttggtccgaccgtggtctagggtaagctcttcgcagaatcttttttgttgattcatcatgttcgattaacattttttttgggtgcagctgcgcatttcagacaccagaggcatggaccacgaacgatgaatataggtcactttgctacatgaggcctttagctatatggggtatacaatgggcacacacaatgccaaaacctaacagagaacaagaagtatcgctcaggccacaagaggaagatgcaacgtctgtgttgtttcaacaacacgctgggtttatcaaagtggctcactatctgaaaaacactaagggaaaggaccatagaaaccgcctccagactgcgtatgagacattcctcaagacgattcgcctataggccaggccacgacctaactttgcgtctcaggacatccaagttctgttcagatatccatacttatttttggtctctttcacggtttttgcgaccctcttttatgcgtttatttcatttgttggataattaatttacgattatagacagaagcaaatgttaataaactttctactgtcgacaatgcttaagattttctgtaacaaggctctcgaacctaactctactgaaaaaaaaaaaaaaaaaaacaaaaactgaagcaagaaactgtaaaagtgatcacaacttcttagaaacaccttaagcaatagcagcagtacagatacagaagaggagcgaattagggtttactcagatcacagtacataatctaaagggagaatgagtcatgcatatttagatccaacgattataagaagacataacgaacagctgaggaactgctaatgctctgtctcaatcaggatgtgcagtttaggaatgcaagtctactaaccttgcattacatatgatcttctagcgagccacatcataagcctggtctgcatcgtactgatttgagcgacaatgatatcactgtgctgttcctggagcagctgcatagccagctgattgagttgctgattgctcatagccggcctgaggaggtgcagtctgggaataagcggtttggccagtaggtgcagcatatgctgatgcgtttccacctccatagctaggatactgagagccaatgtatccatagtttccattgctttgagccggggtattaccataagccggctgtgtggagggatacgaactatagccaccggttggaggtacttgcccgtacccacctgaagtttgttgcacaccagaagctggctgagcaccgtgctgctcataagctggggcaactgctggtggttgtgtaccattataaccatcagatggtgctgcagagctatatgaaggataagtttgctgagtaggcgcacttgatgcataaccatattgctgttgttgagccatgtttgaaccatacgatggtgctgctggagttgaaccatatgatggtgctgctggtgttgaaccatacgatgctgctgctggtgttgaaccatatgacggtgctgctggtgttggaccttggtaaggcacatcaccaggaggtgctgcaggccttggaggcccatacccttgctcggctgatccttgcataccgtaaggtctacttggctgctgcatttggtgctgaccacctgccgatggatagccctgttgggagccaccatatcctccataagattgatgcataggaggattatcatagtgtggctgatcatacatctgcccgtaagtctgctgagcacctgcctgggagtaagaagcaccatgagaaggcacagggcctgggttttgacctccttgcctaccgtaataatcatatggaccagaatgtggaggtctttgttcccaaccagaaccatatccacttctaggaggcatatgttgtggaggataaccaccagaattgggaggtctgaaatgtgagccttgagacgggtacggtccaccatggtggtaattgtatggcattgaatgtggcccgtgaggaccacgcgaaccccattgaggtggaccacctggtcctcgaggttggtaagcctgctggttaaaaccaccagaatagggcgatggccttccatcctacaaaacataaaaaattgaaaactcctttaaagaaaaacaaagtgggacataatatatcatacagctgacagaagaaagcactgttataaattcaaattaaaaatggcataacataaaatctctaagttgacaaaagaatcgaaaaagtggatatgactaagaacatagcaagacagcaaggaatttcatcaaacagatcatatgcagatggcattcggagacatgacatgggccagaaattattatatgcaataaaagtgataactttgcatacagttatgctgtcaatagcattccaagctgtttcaagctgaacataaagtctggcctcaacttagtacctagcctaaaactacagtacatgcttgaaataatatcagagatgatcatttagtaagcacaaaggtatccaggctccccttaagtaattccatgatcatctgagcatacataacacaatttttatggacttggttgtagaaggagtactaaaaaagaagttctgttcacattgcaaacttggcggttgacatatatattctagattctcgtcaatgtcgttaatcaaataagagcaagcgatataggccattaaagtcttgcagctagatttatacaacggaactgcaatatatccatgctcacactaacgtcctgaagttttcaaagaacaaaagcagccttaccgactactagaacctgcaagcgtgaatgataactgccaaataccttcatccgtagacctgggtgatgtctattgtacaaggcaatgctgaccccaattgaaaggtaatagccacatctgcatttttaaagccaacaccaattcgagatcggcacctttaattttaaatatcatggcaagcgacatcgaggatggaacaaatgatcttcttaacaggagaaaattatcagttctcttacaatatgtacatattttctcaagctatccttctaatttcagcagtatgaaccaagtactccattaggacatgaatatgcacctattcactaaatcaggggagcccgcatagatttgcactgaactttcaaactaagacaacttttgcatatgcttaaagcaggaaaacagtaaaattatccacaatcaaatgactatgccccaaaaacataaatcaaatgtgaatcagcataaaatgaacaacatgattaaggtaatggacctatagttgatcataggtaacaagctagtttttacagagattgcatgcacgagaaaattagcaaacagatagcgggaacacgaaaacacagatttatcaccttaaaaattatgtagatgcattggtgaaaataaagccaaaataaagcagttatcaggatatgattatcaaacatttcggtataccagacatatcgtgcaccaagattaatgaaaacaaagcaatttacatggttgcaaaaactaaaagcaatgacatcgttttgagaaagaacattagaagacaaacctggtacataacatcctttatcaaagcggtggctatatcaatctgccttttatcaccagaaatacgaacagttctttccttagatgcatcaccttcattttgtggtatcaactatatgaaaactattttagtcagctgttacccgtaacaagcaatattgtcacaatctttctctgtactctccatacattcaagattaaatagaagtaatcacctggatgcgtgctctcgactttgtctgcatgttcttgatagtctccccacctcggccaataatcacaccaacctgtgagttgaagatggattagttatcacttaaaaatggccaatcagaacagttaccagggtctaccttatcacttggaactttaatctccatctgttctgggaccccccttgcagcaagggcaggtacacctcctgcttcaacctgggattgcagcagaagaagaaaaatgtagccaactcttagcatagacaactaaaagattgtgatttaaaaaaggataatgtcaaagaaaacttttaaacctctgcaatgacagcattgataagcttctctgctttctcgatacaagaaacagttccaattatttccaccggtcttaaagctgaacttggatcagcctctgcatccctccggatttggattttagcaccagaattgacctgaagataccgtaccatctccccacctttaccaattagcgtgccaacctgtcaagtgtgccaagatcacatatattgaagccaaaactcagcaaaacttactcactaaagagtcaaaagcgaaaccaaatcaagtcacctttgaactcgggacatctattcgacgagtcgtggactgagtatcatcaacctccttatgagtactaccaccattcacttctttactctcgtcaccaatctcatcatgagaaacactgccattcacttccttactctcgccaccagcatttgcttcatcttccttctgagagtcacaatcagtgacctctttgcttccgttttcaacttctttctgagcaacaacatcattcgtttccttactatcatcctcaccttcattctgtgaaccgctaatgttcacctccttactttcttcaacagaaacgtcctgagaggttacaacctcaggagtaactagttggttatcctcaggcttaccgttatcttccatcttattgtccgattcctcagcatcaatggtctcctgaactttctcaattaaaggattaccatcttgattctcatcactctgagcaatgggtttctcagttccctcctccttggattcaacatcaccactgttttctacagttcccccaatccctacaacacaatgccgtaacaacgaatattaagaacaaaggtgaaatcttttcgatatgcatccaccaaaatccatactttgaaaggaatcagacatacctaaaccatcaacagcttcatcgtcaagcttcggtcgcttcggctgacaataatcagatgcgtttttgtcatcatctacagaaacgtcattatcaatcgagccggcgtgttgctgctcgaggatctccgattcgagattctcaagcttgcgcttgtggtcagatggctgcacggggatagcgataacctcttcctccgccatgtgttgaaccgggaatagtataaaaacgcctcctttggtgatttaatcggcgaccttgaaaactttagggcttcggaaacagtgactggagagaggacgggaagtggtggtgacgacttgggagcagtggaatgggaatatagctgattaaagggtttgtgggctttttaatgggcctatcggaccttactattattcaacttttcattggcaaaaaaggtaaaagagaagtatttaatttagcccatgcacaattaaatacaagatctgatccgtttacatttcaagtgttcgaccaaatttataagaacactcaagcataacatatgcatcattaatacaagccaacgttacataaatcggaacatttgtattagaatactactactactcattaaatttaatcatttcgtatcatgttgaggtaatcattgtccggctcagtggttctattgactaaatatgaatttcttcgcttcatgtttctcagagagactgtttggtgacctttcaaatgccttcagatcctcaattttgtaccaacataacgactgcatggaaatagtgcataagggttgaaatcatactttcactaacattcactatagttgtaatggagcttattggcattgggatctttaaatcactttattatagtcacacaaattttatttggagctacgtgtcataataaatccaaatacaaaactgtgcttttcttgtccctaagctttacaaggagaaagtggaaagccgcaaagacacttgttatcgacaaaagcactagccgggaactttgtcgatggaagctttccgcaaagatggttttgactcaagtttagtgtctgcagtctggtcaccgtcaccggtaccttcccaaataccaagttccttgacaaatccagggttttcaagaagattccaaactttagcttccccaagtcgaactggagtttgttccccggtgcatggaactccaccataaaatccatctggttaaaaaaccttattggactccctgagatctcgttttccgaaaaatcaatgtgatggtagaaagaggtgtctgctggcatccaatggtctaagctcattttgatcccacattttgcaagcttcaatgagtagatgaacttcgacaaggtcacccattcggggattgtttcaaggtgaaatcggttgtacgaaagatgtagatattcgatgcctaatgagttcaagacagggaatggaccggtaagcagattgtgggagagatcaagaaagataatgttggtcagattggcaaaactcatcggcacgacccctgtgtacccattcctagagagatttaatgcggagagaagctcgaatctcgataaatagtccgggatagtccccgatagcttgttatggcccacctcaagggtagaaagagtcggtgcaagagatgcaatcgatgaaggaaggtttccagagaatctgttgctggagagatcaagaaatcgaagttgccgcatggatttgaatatgtctgggaagatgccagaaaggcggttaccgttgagcttgagttggagtaagctagttaacttagacatcgaacttgggatcgaaccgctgaaccggtttcccgccacactcaaaatttccaaattacttagtgcaccgatgttggcaggaaggggaccagagagacggttattctctaagtaaacagtccttagctttggtaatttgaagaggaagtggggaaaagatccagtgatctttcgaagattggtgaggcgaatctcgttgaggtgatggagtttggcgagcaacggtgagatagtgccggagagaaaggtttcaccaacatccgtatttccgtctaatgccatcatggtgacgcggtcgccatgaatcgtagggaggcaaaagataccgtaccaggagcagcagtcaatatctttctgccatgagctgagaatacccgaaggatcttgggttatacccgatttgaaagctaaaagacccgctttgtcatcaggatgacatgtggcagctcccgtggaacttaaacaccggagaaagataacaaagaggaagagagggaaggaacaagagttcatggtgttttgttgaatgagagaagtgactgaagtgtcgtcgactcgaggtctgatttcatttctattcattttcaaacgtgttttttcttgcatagttagtggtgtccgtaattacagcatgacaattatcattttatattcccatgacaggcttaatcaactctctgtcggtaaaagagatactccatgatatagaccttaattaacaaaataaagagatctgatatcaatgtgaatctcgatcttaagacttgaccacatgtcattggaatggtaagcgtgatattggtaatccctcttgtatatcttattgacctgtgattttttaagtattaaattaagctgcgagattttgttcaatatattttgatcttataatagtataatgcctgttccgtagaatacaagcaacacgattttgaggcatggtttgttatcagagtattggagaggttgttttcatattgtttaagtgtgagtttagagatttaagacgttggtttgtttaagagatagtcgcagaatctctataatggtctgtctaatcgatttacttcttatgattcatttcctcaaccaattttcttatgcgcttcttgtctttcaggttactccattggagctttttgaatcttagtttgagagagagaaaggattgatcattatattactgattaaccttagttttcgacaggaaatgctcctcccgccataggttcatttttggtttatatttttgttcaaatttatttgttggcttatgaacattaagcttttggattcattgtactttaagaaatattctagatccaaaaaatgaatcatctaattgttattgtgttcgttattgctttgtgttctcgttagaatgaaggtaagggttgtaatacttaagaatttcttaatgaactcactcgtggtagtattctcaaattaagtaaagtgcacatccaaccataagtaatatgtaatttgaatttttgttttaagttttaacggactaaaattttcaaattagggggaaaattataattcaaatccaaatccaaatgggtctaacggaataaaacggggtattttagtattttcgtatcaactagctttagaacactcactacaaatataattttctggttccattcatttcatcaccgactcaaaaaatacttcgtctctacaattcaaattatcaaattcttcggaatcaacttgtttcggctccagccggtgatgaatctggggatgagaaacgaaattggggaggaaatccttgtcaccgccgtcaagaggagcgtgtgattgactcggtttaaaccctccgatattacgcaaacaatcaggtatataataaacccaattctgatcgatttcaagtttgtttttgattcatcggttgtttcgtttacttcataattctcttccgattattcagaacataattgtggaattgaatcttgattacaaatccttgtgattaagcaaaataaggttaggaatcacaaacccctttcttcgggtttctttgttgatccatttatagtaatcaatctcttagcaatttagtagaatcagtgaatttcgtagtagtgtgatgattctgatgatgatgatcttcattttgtgttcgtttagtactagtttcaattcaatcatgtaggttattgaaaaacgttggttacatgtgttttgattaagaaaatctatccatttagaacctcttgtgatgatttttctctgtttagtgattcagttctttggctctagtgtttagtgtctccaagatattacctgattctctagataatgtttgtctatttctccatttcagagatgataggctctaccgctctatcttactagttgatgacttactaataaatgtcattgctttcaagtgcagagaaccatagagagactatttcgctagcaaagacgtacaatgattaaggtgaagtctctctttatctctctcctttaccgcaattagacaggtttttttctgcaattagcagctccataacaatgtatattacctgtttagaaaacctgagcagagcaagcaaccaaatgttagcagcgaggattttgtatgttttgtcaattttggttttatgatcatttaaatttaaatattcgttctatgtttaagctgcgtgttattaacaaggtttctttggtttcaagagctttctaatggaatttttgacaaagtttctcaggatgaaggattgtttagctgtaaggaagctttgaagacagttcagtagccacaaaggtatggttaagtagctcgctctctctccctcccacttatcatgtctcttgcactgtatcaaaaacagagcataaatccacgaaaacctacacataaacgcacaaaaaaaaaatcaaacacacataactattttaaagtcaccaaaacacaaaacgaaattcacacaaataaaaaacatagcacacaacgtccaaaacacacaacttaaagaaacagaaaacagaacataaatccacgaaaaaccacactcgaacatacacaacaaatcacacacacaaaatgaaattcaaatgcacaaacaaaaaacataacacacaacgtccaaacgcaacttcaagaaacataaaacatactttaacatgattttttttatagcaaaaagtgtgaataatcacatttgatggcaagaaattgcgttgtgagtgttcccttatttcttactttcttatctacttgctttattatagcttgtactaacttatatatttgaaaagtacacgagcattgtttgcagtttaaaacaggttttatgaagaaagagcaaaagtttcagatgagctttaatatactcatgactgacaaggtaatcttgttaaatctttttcatcgttttaaactcttttctattagaaccaatgggagtttatgtaaaaccactttaatctcagaagatagctccgaccgggtatcaaaatttgagaaaaaggttagtgctttatagcattgtgtgttttctcatatttaagttgtgtggttctgtctgtttgatgtagatattgttccttaattgatgtgtttcttgctggaatattttgtgtgagtgtgcggatgtaggagttgataaagagacttgaataaggtaagctttcgtgacgaattggtaaatcattttctagtttcgtaaccttgatttatactgaaattcacagttatccatatcaatgcagttctcgccatataaagcacaaattcaacgtataaagggaataaggtttgaactaatgatccttgaataatggctggtggacttgcactgagaggtacactttcttgtcaaaacccctgaaccgtagtcatctttttaagacaatgtgtgtctctaccaatttctgaggctttttaatgtcctctctgattccagagtcgatgaccaagacatttgtcacattagtgatcgttctcattgtgccttagttgtgatatgcataattcgaaaggaaacaaaaataagtaagcacatttgtctccgtttattgctaatttttattggttgtgatatgcatcatgcgtaaataactaactatatcagtgtgtggttggtttctaatatttaggttctcatggctgatctgatttcttctgcagatggcactctactggaacttacgattgtcagtcaagaactggaggtccattcagaacaatgaggtttgatgcagagcaagttaatggagccaactatggtattcaaattgctcttaggttgctggaccccatcaggtagcattccctactatctctcttgctgattgattttagatttttgaaaagttctaatttgttgacggtgataactttagggtttggattctaacttacaatgtctttttggtgagaaattgatctttcaggtgctgtggccgttgaagttactggtggccctaaaattcatttccacccttgaagagaggttaatcattcctgagagtgtgtgttctgctttctttgttgacatggctgattgataatttagacattctctcaatacttgtaatactgaaacgctgtgggacttgattgtctgtttctaacatgcatatcttgctttcaggacaagccccatacacctcctgagggtcgtctccctgatgctacaaaaggttttgatctgttgagagatgtatttgctaagcggatgggcttgtctgacaaggacattgtcgctttatctggatcccacactcctatttctccatctcagagctaacaacccttgtgaaaagggtcacgtaagatgtagttaaactttacaattccgtaattttttactggtttagttcagccttttgcattttatttgctctatgttactctattttgttgctgacttagtaataaagatcattcctcacaagtgaagagatccttaagttgcaaagaacaaaagggagactattcgctagcaaggacatacaaatgttaaggtcaagtatcttcctctctctcctttaccgcaattagatacgaaggatatagaggcttgcactatcccaaaaaagtttacttccgtaccattctatatcttaaaaaacttttgtcgggtttattttttatctttgaataagaactagataaggtgaactagagaagataaagctgacttgaaatttccagcagcttccaacaatgtatattaccgttaagataatatgagctgaggaagcaaccaaatgtcaacagggagtattttgtaagtttgtcatttttggttttatgattttctgaatttaagttattcgttctatgtttaagctgcgtgttattaacaaggtttctttggtttcaagagctttcttcagttgaaatggaatttttgacaaaggtcctcaagatgaaggattatttagctttaaggaagttttgaagacagttcagtagccaacaaaggtatggttaagtagctctctctctccctcccgcgtatcatgtctcttgcactgtatcaaaaacagagcataaacacataaacgcacaaaaataaaaatcaaacacacataactattttaaagtcacccaaacacaaacgaaattcacacaaataaaaaacatagcacacaacgtccaaacgcaacttaaagaaacagaaaacagaacataaatccacgaaaaaccacactcgaacatacacacaacaaaatcacacacacaaaacgaaattcaaacgcacaaacaaaaaacatagcacacaacgtccagacgcaacttctaaaaacagaaaacaaactttcacaggattgtttttaacaaaaaaatgtgaataatcacaattgatgacaagaaattgtgttgtgattgttcccttatttcttactttcttatctacttactttattatagcttgtattaacttatatatttgaaagcacacgagcattgtttgcagtttaaaacaggttttctgaagtaagagcaaaagtttcgaatgcgcttcaatatactcatgactgacaaagtaatcttgttaaaaaaatttcatcactttaaactctttcctactagaaccagtgcgagtttatgtaaaaccactttaatatattcaggagttcatcattaacttattcaggagtttcagttataatctcagaagatagctccgaccgggtatcaaaactagagaaaaaggttagtgctttatagcattgtgtgttttctcatatttcagttgtgtggttctgtctgtttgatgtagttattgttccttattttgtgtatgatatccttttaattggcttaattgatgtgtaacttgctggaaaattttgtgtgagtctgcggatgtaggagttgataaagagacttgaataaggtaagctttcgtgatgaattggtaaatcattttctagattctgaaccttgacttatactgaaactcacgccataaaaagcacaaattcaacgtattaagtgaataaggtttgaactaataatccttgaacaatggctggtggagttgcactgagaggtaagataatatgagccgaggaaacaaccaaatgacgacagggaggattctgtaagtgtgtcatttttggttttatgattttttgaatttaagttattcgttctatgtttaagctgcttgttattaacaaatgttctttggttgaaatggaacttttgacaaaggatttcaagatgaaggattgcttcctcggctgcaaagacggtttgacgaccaccatttaatacaaggttagtactttatagtattgtgttttctcataattaagttgtgtggctatgtctatttgatgtagacattgttcaggtttgaactggtgatcttttctctccaagactattcccttgggaaggtatttctaattaccagataaagtccatgtaagtcattcagtttaaccagacaataactaattccctctctgataattctgctgatcagcttctttttgtttttcttgatgcgagaatgaatcttagttcaagtgggttacaaggaccaatagccttttcctttagagatctctccctcctcgagttatcgtaagtgtacaaatgcaagccatacaaacacacactttccaagagctttcttcagttgaaatggaacttattgacaaacggtttgaagatgaaggattgtttggctgcaaagaaaatcattcagtagccaacaaaggtatgtatggttaagtagctctctctctctctctctctctcacttatcatgtctcttgcactgtctcaaaaacagaacataaatcaacgaaaatccacactcaaacgcactcaaaactaatttaaagtcaccgaaacacaacgaaacaaacaaaaatcatagcaaacaacgtctagatgcaacttaaaaaaacagagaacaaaacataaatccacgaaaacccacagtcaaacgcatacaaaaattaattaaaagccaccaaaatacaaaacaaaattcaaacgcacaaacaaaaaacatagcatacaacgtccaaacgcaacttcaagaaacagaaaacaaactttcacaggattttttttaacaaaaaagtatgaaaaatcatagttgatggcaagaaattgcgttgtgattgttccattatttcttactttcttatctacttgctttattatagcttgtattaacttatatatttgcaaatactttcgtgtacacgagcattgtttgtagtttaaacaaggttttcataagaaagagcaaaagtttcagatacgtgtcaatatactcatgaatgatgaggtaatcttgttatcatcattttaaactctttctattagaattagtgtaactttatgtaaacctaattatatgttttaagtattcagaggtttcagctatgatcttccatttattcagaggatagctccgacggagtatccaaattagaaaatggtagtgcttaatagtatagcattgtgtgtttttctcataattaagttgacattgttcttttgttcattattttgtgtctaatgtcgttttaattggcataattgatgtgtaacttgcagaaataactttgtgtgaatctgctgatgtatctattaaggagttgataaagagacttaatgaaggtaagcttttgtaacgaattggtaagagacaactgaaattttcctagcttgctttcggttagtttcttaatgtgctacgacatgtttaggcccaaagtcttggcgttgagaacttgatgatgatagatattataaacttgcaaatatttgcattatatattcagaaaacgagaagcaggtatttatcatttctatctagtaataatttatagtccccaagtcactataagtccttgtttttcatttttagattgggtatgaattcaatggaggccaatgcaatggaaaagctccgacgttttctttatgatatgattaacaatgatagagtcatgttccgttcccaaagtacttgttttataaattgactttttaaggattcctgtttcactgatcaagtgtttttttacagaatctcgcttcgtttttttcctatcttgctttccattagtttctaaaagtgctttcagtccaatgtcttggcgttgagaactcgatgatgcgaaaaaagagaagcatgtatttatcatttctatctggtaagaattttacatgtgaatccttgtttttcatttttcattgcattggccatgatttatactgaaactaacagttatccattttctcttgttaatgcagttcacaccatcgaaaggataaaaccaatgtataaagtcaataaggtttggactggtgatccttgctctccaagactattcttttgaaaggtacttctaattaccaaataaaatccttgtaagtctaacatttcaaccagacaataactcatttttgtaatttccctcaaggaattc

SEQ ID NO: 71 - DNA, 88401 bp, Arabidopsis thaliana
gaattcaaatgaaattctacaaataccgagaatttatctagacttgtgattctaaattcctcaagaccaaatgatgcaatacgaagaaagattctcattaccttccaatcaatggcgtggaaaaaccccaagaaattatcgtaagcaggttgaaaccccgttcggagctctccggagagtttctcaaccagatccgctacgagatccacttgcttctccatcgccgatcttatttcttccattgtcttactaaatgtcaccggaaaaaagaaaccaatttgaaattgcaagcggtggtaactaaaatactcacactccaagtaaccaaaaccctatcgcttcttcgattccagttctcaacttttctcgccaagatttttaacgagtttcttctgcgcttaaaagctctcgaagttgccaggaaaagaaaaaaatgtaatcaccaacttcccagaatacccttatagtttcatattttaacggtaatgccactgagataacatactaatattttggattattcagagtaatatgattttccaggaacatctaaacttatactcaaaccaaatgatttgatcttcgatcgaagtcagttttaatgaaaggattctccgaaataataagacaaaaaatgagtttgagcgattccactcctttccttcatgaaaactctacataattactatgcttatgataaaaaaaaattagatgattattaacattctcaataatcgataataggttaacagatagaagaatgagtgaatggagatgttgagaaagaaagcaacttcaggatgtggatgttgttgtgggtcgttgcttcttacggaagatgtagtttaggagcatcccaagtaaagggaaacttgtaaccatgcctatgtaaccaagccaccataccgactgttttgtctgcctacacagctctttaaagcttttctttgttacatcttcctcaggctttcgccctctctgcttcagtgtggtcttattggtgtcttgctcatatttgactgctgccaccaacccgtcttctgcaatgtttaggtacgggccttggtttatcgatggctcttgtttccctgaccctgagcttcttttatctacaatctgcaaaaaaattgataatcttaggaagaaagaaatagagagaagagttaaattatctaaactgcaattctaataaacggaaacttactttctgtatatgcatataaggactgcagctaaggacgccaagaaactcgttggtggctcgaacccacctatacacaacaacatatataggcagtcaaaataggaagtactattattacttagttacaatctgaaatataccaaccataagctagatccagttaatccttcgaagaacgctagatgtcccccgtgatttgttgtagccaagacaatgtttttgttggcccttttcaatagaaacttcatgttaatcgctgtaacaggatttaagatttaaaaagagatagatagcgtcttacctgcattcgtcccagggaatagcttcctttgtgcataatggatcatctagagcacttatacagagtagtggcaccgccacatttcctacgtattgagtgctgctcgattttcggtaatacgtatccacagtctgcataaaggtgcaacccgttgtacttatattaaatcaacagagaacttaatggtgattatgaagagcattgcaaagatgaatatatgaattacaaagccaattgcggtggaaaactaacatcagaagttaagataatatggaggagaactaatacctcgaattttccaactagacaggtagcatggttgtcaaaatctcggatggaacgtgactgatgaagtaaaaacaacggacaacaacagacaacgtcgatagggaaagaaatatgtaagttatttgcttaagaactctgcttgtttcaatgcatctaccaagtagactgtataacttatgggcctgtggttaattaacctactaacctttttgatgccttcccaattagcaagccgtaaaaactgaggttcatgcctgcaatgaaaccaaaagttataactgaaacctgatcttctcaaagcagtaaaacggaaatatctcctctcagcccatcttacaaactcaaaatctaggcagttcttggtggacatacaattgggcataaccttggagtccgatggtgagagctttgtcatagagcttttgtttcaaagtccgacagataaacctgtcaccaatcttgttgggaggagaaaaggaaaagaaaaagcataacgtatcaagcatccacttgtatcaaacaaaacccttagtactatttacaagttcaaaggtctgaaatcagaacccaatgaagaaaattaaggaagtcataatttctcgtcaagttattagagacaacttcagacacgaatcaatatacaaagaacaagacagttatgaaaaatagctcaccaagaggtcccatggagagcagatagcaacagcacctctcagaggagtcttttcaccctcttccccaaggtattttacctgaagcataagataaattcaggaacctcctcacgcatatcaatggtatttgaaaaacatatataatcaatctactcttttagcttgaaatcgtttttttgaatgtagcatatggtgcagccaactgagcaatatgtaacaaaaagtccatgaaaaacaaagcaaatcttcacacttaaacatcattcaaagctaagtaaaacactgcggttcctgatttagtaccagaacatttgctccaatgctagtgccaatagcaaagagaggagccctcgggtatttgtgttgaagataatcaagaactacccttatatcatctgtccatccagcattatagaagcaatctgactacatacatttgccacaaaacaacacttacataaaagaatatatgtatataagtaatcacaacttttcgtagattcataaaactagcgaactcacagtaacagaaactcctcccaatcctctatggttgctaataacaacattccaacctgtttttgcagtgtcgtaagcaagatgctttaaatactacaacaaaaaatcaccaatataaagtcaattagccattaaagaacagataagtgatttaaaactaaacttactgcagatgaagaatcactagttaaccctggaataacaacagctataggcgttgtatcttcttttgtaatttcactcttattgtgaagagaaccatcaagaactacacaaatcaaacagattcaaatatccatccaaaaccaaccatattggtagtaaaatcagtcactaaaatcttaccatcagaattcgtaagccaatctaatgcaatcgttccaccatcagaagtaagaaatagctgtctaaaacaatacaataaaacatacaaatttgtgactcaaaatcaaacagaaatattgaaaaataccaaatcaccttgtataggtgaaaactggaggcaatccatggaaattcaagaaacaagtctgaatatgagggctcgctaaccatggcgtcgccacatatctgaacaaaaaaaattcaaaaaatcagaaatctaaatccacaattttcgcccaaaatcgaagtacacacacatacactcaccggccgtgaagaatctgacaccgagaaacaacaccgtgataaagaggagaatctggattgtaaatgagattgacgcgacatctgaaataacgaagaatcgcatctccaaggaagtgaaattcgacgaaattgtagaagaagatggtacagagaacgaagagagcgatgaggtagtgacgaatcgggatgagagttagagcttgaaagagaagatcgtatggagatggagatagaatcagatcttcttcttccattgatttgatttgtgatttgtttttgcagatccggcgataggaattagagaaggatcttcttcttcatggttcagtggcgggtgaagatttttttgacgaacttgtttattattaattaattcatattttgaaattctttttatgaaattaataattacacgccgacgcttacgtgtacactaggaataggcataattctcgttctgttccgttccatcatgtatccgtttacgtgtaaacttttctgttttggattagtcgacacaatggtttgattgattcccttcgtaaagacgagcctgagtctatctattacttaagtattattcgcatttgtactaaagattttgttatagtaacattggaaaattgttgcttatccaaaacaatgtccatactgtatcaaacggcacaagggctagtattgacttaacaattagatgaaacaccagagggatggtggtctagtgcctagtggtaatataaaagggttggttcccttgtgcctcggttcaatctcttttgggatgaagagggattctttaaacaaaagtcgactaaagattgtctatgtagtaaatctttcaggtggaggtgttggattcgaggcacgttgggaaggatctcttctctaaaagagatgaatttaacctggtgagggtttcgcctctcggagatgtaggtagggcctttgtgtctgaacttccagattttcagaaaaaaaaaaaaagattatatatgtaattatggaccaaaagttcggaatatgaatcaatgaaaaaacatatatttactatcaataaaataatacaggaaaatctctataaaataataatgttaaatattatgatattttattaagttatagtaatataattttatttttaaattattaaatataaatttgttttaattattaatattttaaaaacgtatgattggagacaacttgatttacatataatgatggatgttatcaattaagaagagaaaatactcatttgacaatgtataacaaaaactgcaaataaattcgcttataaagcctattgaaatagaaaatgataatatttaaaaattgaaacttacaaaaattgatgtctatttttacaatgaagttataaatgattctacaatatgatggtttaaaaatactacaacaagcaattgtatgatacagtcaaactttaacaaaaattcaatggaaaaaaaaaatcatcatgcattattggttataaacttataacttataagtatgtaggtgcatggagtggatctcccgttgccaaaaaatgttgatgagatcgtaatcgatcactccaaaaacctacatgcacggctcgattgatatatctattgtgtagagtgttggtctctaaagattcaatatcttttgaaattcggttgcaccacatatatacattatctaatcttatgaccatattaataaaaactaaaatttatcacaatcaggaactatattataaaaacaactaccaaatctacaaaaaaaaataaaaaaaatacacagaatagaacacggcgagtaatcccataaaataacaataacatacaatatgcaacacactggtcaatgtagataaataaatcaaatgaaattcattgatttttcaaaacaaaaaaaggcgggaaattaagcgaaagaagatgagcaatggaaaggaaaatatgtagtccgaactgaaaatcacaaataaaatgtttatggagaagaagaagaagaatacgtagaagctagcgagatttgatcatagttccaccaaatgtagaatagagatcttcagtggctgacgactatgcagtttgtcctgatctctccagaatttcccgtaagaacttttatttcacccattatctgcattgcttcagcaaatctttctccgaataatgtttcatttaatgcaaaatttgatacgatcctactggttgagtcatcgagacccaagttttgatcaattctaaggattcctctttgactttttatctgtttatagatttgattgtctacctcaagtggcgtcatttggtccaagaccactgatgggtcatttggaccacgacatgtgttctgtaacttagctttcagtttgctgtccattttaggatccttaagcctatcctgaaaaagactgcaatgtgcaacaccgacgctgtgaccaccaccaataagtgcaaccatgttggtgacattcaaacctttaccttcaaaatctttgattgatacagccacggaaattagtggtccgggcaaaatcacagccctaggacttgatataaatcacggaaattacctatcctgtttgtactgtgaaacgtggaccacccgctaatgcaatcgagtcttttgtggctagagttacaatgtctgcgcatgagactgtttttgggcaaactatctcaagctctttcttaacctcatcgatgatctcgaagcctctcacgcttacgtttgcctccgcgcttttctcagatggcctttcgggcgttgagtcgatcaagagggaagcatcacaaccctacacatgcagcattcaaaatatttgcttggttaatataattagctagtttatgatacatcatgcatacatatacaaacacacaaaggagaagcttacgaacgttgacaaagcaatcatgaaactgcatacgaagcaacgctgcagtaacggtttggttaagggagtgatgtttggcaacaactctagacacggtagattcagcgagagggcatgaactgtcataaaacccacgtcggagcttcccgaaaacagagggaacaaggaagcagaaaatgaaaaacgaagctgtgattgccctcatttcaaatttttctccttcactcttatgtgaaaacttagaaatatttttggattgtgtttaggttttaagttttggtgatgaaatagttagtgcccgtaaattgcatatttatacgtaaagatggagacattggtacattttgaagacgtgcagagggtaaaggtacaacactggcaagccatgattttaatgtgtcgtgtaatagtgtggttcatcaatgttgtataaaaaaatattataagatcgtcaatcgacttgtcaaaagattgattatgatatgcaaatattttgtgatattcctttttggattcgtttcattttatcatctttttgctctctcgtataaatttgtaatttgtaaaagacaaggaatttgtttgcaaggattggttcttgtacacagaaaccaaaaacaatattaaaaaaggttttattcataaatatataaataaactagaatttaaccgcgtaccgcggggctatatttttaacaaaaatataatgttatgagttttctgcaaaataacccttcaaatcgatctcgtttgcaagtttaccctccaagtctgaattatgcaactcaaccccaccatctctaaaatcacatacaatacaaccctcccgtgtatcgatgatatggcactcgataactccgtttgaaaacaaaaagattttgggcaaaaaaacctcaatgtatttttttttgcaagataaacctccatgtcaaataagtacgggtcaaaccacaatctgaaaatctcctacgccctttcgtgtatcgatgacgtgacagtcgataattcattttaaataaatgaaccgtaatttaaataaaataataatattaattttttgaatcgataactttaactaacaaattttttatcaaattcgttctggttcgtttttttctttcaaaataattaaaattaaccaaatttaaccaaaattaacaaaacaaattaaaaagaagaaaattttagaaagaaaattaaaatttggttttattttgtaaaggagtatttaattttgaaaaatataactaacaatatttggatattttgattattaaagtatttgattatttttctaaaaataattaatattttgagtttataattatagttatgggtattaattttggatattttctatatttctggatattttggttaaccgtttggttatcggttcggttttattttatttaaaacttaaatcaatgactaaattaaattatatgcattaaagcaatatattcgatagacttataaaatttctaaatgagttatcgactatcacatcatcgatacacgaaagagatatgttgtgggagcttttcagattgtggtttgacctgtatttatttgacatggaggtttatcttgcaaaaaaaaaatacattgaggttttttttgcacaaaatccttatgttttcaaacgggattatcgagttccacaacatcgatacacgggagggttgtattgcgggtgactttagagatggtggggttgacttgcataattcggacttggagggtaaacttgcaaacgagatcgacttggagagttattttgcagaaaacccttttttaaaagattaactgaagatatatcatattaatttggtatcaatctctgtattatgtagtatatgattattattgtttatgtttcaatttttgaagtatagatacaaaaacacattttttttatgtaacgatgtgtggtggattttaaaattttgaatattttatccgcagtataccgtgtgtctattttttatagctaaaatttttaaatttcaagatattcgttttgttaatattgtgtggttttttgtgtttaatgttgtataattatattttaattgtaaattttaggattttatccgtgatatacctttttttattaatatcgatcaaaacccgtcatcccatataaatccgtctatattatctcgttagctaaatattagtattataaaatccaagaaaataaattgttattgttataaatacaataattttaggatctcacccgtgttataccgtttcttgaatgattttaaatttctactactaatatagattttaaatttatcatataaagtatatgatttcaaatttttgtgtttttttatttaaataaagcaacggcttaaatgatgatagatatagttctttttctgtatgtgtatatgattttttatgtgaatattttcattattataaattagtatttttattgctatacaaaatgttaatataaatatttgctataaatcggatttatgcatattttgtggagcaaaattcacgaaattttgtttttgaagatatatggaaagattgtgttagagatttttagaaacaaattaggcaagatatcgtttggttaataactttttaaattttgtaaaactaaataataaatgttagtggcagccattgtaaataagtctcaactccaagatttatttcacaaaatggctgcaaaaatgtatatgttgactagggagagccaataaataaataaccaatgaacaccatatgctcatttttcttagctaaataatctatccgaacattggcacaaagtagaaaatgacataagctaaaagatagtaatgaggactaccataatgataacatgttccactccaatggtaaagcagttgaaatagcaataggtgtccacacagttgtggactagtgataaggaagaattagggaaaggttggaaggaactaatccaagttaaatccactctaaaaacaaaactcacatatgtgtgagaagtctaaacttggaccaaaggctcaaccagtttttctggtagttagtaacaagcgatttggtgacctcctgacaaacattccaaatgtgggacatacagtatggtggccctttagagagaagtctactctgaaagaattcgtgcgtttctatcaaaactgaccatatcagccgatagattaaaaaaaaaaaaaaaaaaaaaaaatagtaagaggcaaacctttgacagacatgtaaccatcctgagaaatattgccacacgaaaatcttaagtttctgtgtagctttgagattccaaacatgcgtctgatatgccgaaaaggagtggcaagtaggacgtgagagatctcaaacatgttggatatgctcaaggaaagatagggatgctagtatgcaacaaacttttggataaaaaaaaaacttggatgaccactgagcatcatcgagagccgatgagtcgatgacggcctgcaaatccaaggtaacttggatgctcagactgagaagcattctgtccaaaacgaagtacaaatgagcggaaaggacatctacagacgcatcgagatgttgtacaacgtcacgtttataaagtttagtttataagactgtgcagttggaatgatcaaacataaatcaaatttgcatgccaccttcaattgatattttcttctatatcaaatacacacattatcatgtgctggatgaatatagtttctatatctaacgattacaaaaatatgaaggctcaagttaagtccattgagatctctggctaagccaattagctaatgatgatgtttgtttgcgttgtaatgtgaagtacatttatggcgttttacaaatgttaattactgctaataagactatgattctcaattatcagttgcttctctggtgattattagtctaaattcgagtttaatccatttggaaagataatctatttttattctccaaacatatgtaataaagtttcttgtatgtacacaatacaactataagaagaaaaagaacaacaaatacaaaggaaatgctaaaaaaccaaaccaaattacacccacaaaaaccaaaaagagtacaaagttactaacctctgccattttttcatcacctataaagggtttcgatggcaccgtgcgatgaatcacattcagattcttcatcatatcaacaacttttggtgataagagagtggtgtttcccatccattcaacccctattctgaactctgatggagtggaagtagttaactacaagcttcgaatggtgtccacgcgatcaatcacatcgagagctttcatgcgatcaatgtcaaaatcaatgatgggaacagaagaaggtcttctggttgagaaagtatccttcttattcttcatcatctcgcccatcattggtgagtggctactgcttttgcttagcctatggtgcttacaaagacgtgctttagccaccgtttcaaactcttggctcttgcttattcctggcgtctttctccgcttgcttacatctctaagcatctcttgatcctccgtagtcagcaatggcaaacccatactcgggttgtgtgaaccgctggagagttggatcgttttctggttaggtgatctgattggagacttaacaggagatcttaggccataacctgtagtggccctgacttgggtaacgagatgatggagccacaccaccaggtctaatatgtaagcctcggttttttctttatctgcatggtgaagagtatctatccttagtatggtttgacctgcaggtctctggttcgcctccgacctgagttattttgcataatctaacatttagtaaagaatgcagttgtctgcatatatacacagcacaaagagagaatcagcttgtagtcagggcttacccggaacttgcccattctccaacccatccaaaaccatgatgcgctctggttgagaaaagaaaagacagaagaataagtctgacttactttaatagttaaaactaagggaattttacatgcttttgttaacagaattaagacatcacatgttccattgatccgccaaaaaaaaatacatgatttaagtgagaacagagttctaatgatgacacaaaaccaaagataaagagatagaaaacatcacagaagcttacttggtggtgtttgtagcaacaggaacaagccactgcaatgttttttccatttcagcttttatttgaggaacagtgagctggtgaaaacaaatcagatatagtgaggtgagcagggatacaaataacatttcaagtaacactggacatggtaaattcatcttgtcagcacaaaagcattatgggaagtgtgaaacagtattaatacctcttctttaacctggaaggactgtattctggagcgtaaagcagattttatgcttgggggtaaaccttggtacaaagcatctcttgtgcttgcaggcatagtgctagaccgggacacctactcatagaaatgataaatttaaaatatattccacaagccgtatgggtccaatcatattattattgctgatgcttggaggtagattattaatgaaatcgggagaccattggatacgagaaacaaacgatttacaatcccaggaacctagagtttggacaacaggccaaacattgaaagtaaaactaagtgataaaaaagaataatatacttacaagagtatcaatttgagtaatgatgtttgcgtaatgcaaggcaagaccagcagagcccagttttttatgattgattggcgggtcatttgcaggcttatcaggatctgcatatcaggtgaaatggccatgatttgtaagtacatctttcattttaggtacaagaaaataactaaatcctctatcttcctgaacgctaaaataagacgaaaacgctttatccaataatcgagtctcacccgcaccaccaaaggcttcgtgaatctctaaatgcaagaaatggacaacatctactagtttctccatcacctaagtattattagtattttcaagaattagcaattgtgaatgcagatgagccaagcaactccaaataaaaggaaatattatacgtttattgcagcccttacctcttccaagatcctagaccaaagagactttttctttaagtttctaacatgcttcttctgactctttaattcagttctcaagatagcgagggtatctcccacaccttatgtaaaaggagaaaaaatggaagataaattagaacgacatccaacaaatagaagaaactagagtgtaaaacaatagcatccattcccaaagatattaagaatagatattttctttttggtacttacctcgttgtgctgtgcttgggttctcttcttcctggatcttacgttggtaatcttgttcaaacctatccagcgcatggagttcatgatacaagtcctgaaacataacatatactcagagtagatcgctattgaggaagtcaaacaggaccaaatatcacaattttgcatgaaaatacgtacagctgtaaaatgaacaaatgacatcatctggtgcataatggtctctgcttcctgtttcaagtgtttctggggtgtaaattcagagcccaacctaaatcataacacagaactaatgaaaagtcagatactttccaaaaggaatacacccgttgtgtgaccaccaaagtgacaggatcatgttggaacctgtcaaagaaacgatccaggttgtggtattgaggatccttgcaacgattcccaaaacgcaccacctctccagaaaaaatcctcaactcttccctgtatacaatttcaaccgtcacttatctccaaactacaaattagaaaacagcatcaacacagaacacaatcacaaacaattgttaccttttatcagcagcagcaattctcaacagttcatccatgtctttcgatatcaggttctgaacaccttctgaaggtaacacaacctctttcaaatgagtaatgctatctttcgaaagagaatgcataagattggcgcctttaacaatagtattagcaacttcaaaagacaagattgatatcttattccctttcaccgtcgtcgcagaagaaaaccccccactaagattcagattcgtcatactactcccgagtgtatccaacacatccacagctttaccaagtcccatagtaccagccctacccaaaagagagcttacttccgaaacctataaacaaaaacaccttagtataataaatttgaactcagaactaacaacacacaacagcttaacatttctttatataccttagcaacagcagcttgtctagacttagtggatctagatttctgagataaaaccctcgataaccgaggaatcccatcctcgatattttgaggatgagatccactagagactataggaaacgaaaacgattccgatgtatgcttattatcatcaacattctcggtaacaggagaaggatcatctttaagtccactttcaccagaatgagaattcaagtcagaggcattgttattgagatgatgaccattaacatgtgcaaaggttccaccaggagcattatttacagatgaactccttgaacaaagcccacccatcacagcaagtttccaaatttagctctcaaactctctcgaaactctccatacgcaaaaaaaaactctgatctcggattgaactctctaggaaacttgaaatggatgaacaatgtaaccagcgaaacactgtaatcgcaaatcctgatttgtatgaaagcaacagtccattaatggagcaaattgctcagtggaaaaaaacttgattctctcatacgaaacctgccaatgaatcaagaagattttaaagtcaagaggaaatcgaaaaccctagctaaagaagaacccaaaacgacaaattcaattcagtagcttgaaggaatggagaagaaagacctaagaagagtcagaaacttggatctgggaattagattgaagttcagattcttcttcttcttcttcgtcgctagttcttgagcaaagctctagagagaagtgagaagctctcagctgaagaatcgtggagatgtctacaaggaaaagagaagaagaaacgcgactcgagaaagagagagagaggagagatgaattgaatttgggttagtctgaagagagaggaggagttggagagtgtcagatggtgaagttagccaaaaattcaacccccaaaggctttttctcgttttacccatttctacactcttcaaaactctcaatcccatttacacatttttattatttttttactaacaagttgcagtatattttatattatcaaatattactacataattagaattattttgtatgttaccaaattttatttacatagttaaatttatgtttatatagtcttttaaatggatttcattgaaattctttgaattgggatcacttcaacagaaatcagaaataaagacacgtcaatttcgaagaataccatatgttgttatcaaattatcatcaaatacatatcggtgtaatgtttcgagtttgttatgcgaaaattcacttttgataggtgttttttggaatttaaattagtattgtgatggaataattaatgtcgataaaatcgattttcgtcgagttataagattcggaataaatattgttttctctttgtgatttcaatctatttttcttttgtttgaaatcattctaattcaatattattgaggcaaaaaagagttatggttatataaaagaattacaatataatatcttttgttgtatattccaagtagtaaactaagttgtatcaagtagtaaattttgaaatatttaaccattttgtacctttgattgtgtgaatgaaggaagtatttggtaattattgtaagtccttgaaatagaaaaaggtgaagaaaatcagtcaacatgtatatgcatatctagttttgaaaatgaaagttgactttttaccaagtaaaggacaacagaatctaaagtaggtttcaaattacattgttttaccaaataacctatgtgtggcaatgtcataatagctttatagcatggtcaaaggtaggaagcttgaataaaaaaaaaatgttgatatcatataggaaaataattgttattatcatttagtatttatgtaaataaatggaatgtgatggcccatagcttatttattacataaaagataaaagctataaaatgatttggaacttcaaaggtatgatcatttatttggaatgttataattattcaaaagaaaaacaaattacaagcgagtttttatcttttttttttcaagtcttgagatttcaatattaattagtagtttgtagttgtaaaaaaaaacagaaagagatttcaatcgtattttcataaacatgatcctaaaccaatttcaatgataaactaagtgaaattaattcttagtattttaggctacttatttaactgcgaattagcctaatttaatgataaggttgcctctcttttggaccaattccacgtttcaacaagttcacattggtcaaatcttttgagttattcttctgtctccatcgcaattcatcatgaatattttgattctacatttctttttctttctttttttgctcaattttttggtcaaatgattccacaattcaatttatattttttgtaactaattcattagcccccacactcctaatacaagaaaacaaaacaaaggcacctgaattatcaaatactagtttacggcccgcgctatgcgcgaacaaattagttagaatcaattaaataactatattttgtaaatgtctttacatcagtagaagatcaaacaattttgtaaagcataatgcatatattaaaaagtttggatttttcttgattaattgaaatcaggtctaatagttatagtggtcataaacctctgaacatatttcattagtttaacagaactggtacatgacatgagaacttcacacacgttcggttataagtacgacatacaaactgaaaactagatattttaaaccgtttttgtgacattatttgcgtctagtacatatgtgcttatgtgtctaacttgtttcctccacgtaccaaggcataccacacctatagaaaaatgcaaaaccattttttagtatagttaccgacaatcactcatcaactttccaaaataaaacaaatagagttaaattcaaagaaaaacgtttatttttattttgaatataatttaacattaaattcaaaaagataaaaggtagttgtgtccagaacttgacttgagatcaatttgattgaggtactaattttcgagagggatagaaaatgcaattattatgaagaagacatcaagtacagaaaggcaaaaaaaaacattgtaaggaaaaaataagaaattattgaaagagacatctatcgtccaatttgttctttgtatacgctaataactataaagacacatctatacatgccctagcttgttcaactgcaaactaataagccaaattatagatttggaaaataacaccatattacgaattaagaaacaaaggcttataacattgtctaacataaaagaatataaatttgaatgcatgtgaagtagatgactgaccttgttgtttgtattctcccgcaatatacaaatgccaaaattaatgtcttcatcgctgtaaactgtatttaataaaaaaattttaaaattttggtatatcagcaaagattataattgtgtatggtcgaggaaaattggatatcatagttgcagaaaaaaattaaaaccgtggagatgagcgatagttttttttgggggaggtgttgttcaattgtagaagtgtggcaattaatacagagaattcttaaaacgtggaaaagaggagttgctaagatgtaggagaatatcttttttttttgtggaaacttatttttttttcaataataaatgaaaattgattaaaaaaagtaaaacataaaaaaatgagacttatgccacatgtcgaaaggagaatgtatcagttattgaaaaagtgactgttgatttagtataattagattatcccataattagaattagtttagtttgttacaaagttttatttacatatttaaatttacggttatataggtttttttagcaaatttcattgaaattttctttaccaaataactttgaaaataacaaatctgagatataaatttatctaaatatattaagtgttattatcgagattatcgagttatcgtcaaatgtgttaccgcatagatttagagtttcacatgcaaaaaaattagtttatggtcttcgcaactcaaattcatgatatgatgatctaatctatgtcttatcgataaaattcgtcttcatcaagttgtaagatccataataactattattttctcttgagattttaagttttttttcctctgttcagtgtcgtgctaaagcatccagaggcttaaggcaagcttaaaaaatgtggccttataaataactttttttgtctcaaaacataaataatagcgccgcctcccttaaacaaagcttcagtcaagtttatgaccagcgcgtggcggctcatatagcgccggcgtcggtcacctcctttaattttttgcgtagtttttcatttcttagttttgtatccttcagttgtggaagcatggaggtttttgatgtggtggagccgtgagtttcgaggttcagatctagtaagattgtgctttggtgtttagatccggcggatctgttggtcgttagtgtgctcgggtcaccgttttgtttgctgttcacgaagtggagctatggctagactcagctctgtcatgtgggtctcttccttgtgccttgcgacattggaggctctagtttcttctggcgatggctcctttctctttcttcctcggtaaatatgtgcatcattggattgactcttcgatctcttggtatctacctcgtctctactgtaataccccactcccacatagttgggccaatttgttttgacattatgatatagcccataaatggctcaatctctttttgatgacaacaacaagggttttgtaagtgtcatatatattggggtatctcataccctaaactaagtcagccaccatcatcattgttgagacgtgagttcgtgagcctttgttatcgtcgtcgtagtctccgcattatcaacgtcgagagaacctattgatattccacccattattgtctccataaccaaactgccatgatctggaaagaaaagaaaggagaagaataagaattgagaagatcgtgaaagagaagaagagaaggaagcggagatgaaggcggaaatgtggcgtaggagaagagatcatcaccaccgcaaaggaaaggcattaagaaatggaaatttcgtttgtgtcattaaggagaagtgagatgaagcagatctaagtaaaatcagagaatgggcaaagcaaagaaggaagaagaagagaaaagagggaggaagaacagtttcaagatggggttttgtgagactcattactgtctttacagaaagtatcagatgacgattaaggagttgttcgaaagattacatttccaagaatttatagcaactgacggactttgaatcgggattatgttagagaagttatgtgcgtttctttcaggacaagtaactgacgaaatatgtggaatcctagaaaacagtttcgtactagcttcttcgagccaacgtttggaggtccgtaacaactctgatcggaacgaaatttggtggagcgcttcatggtattactgggtcgataatcaacggtgggattaagtttctaacggttagttattgacctaaaactatgtttacgagacagttttatatggagtaaatcgtaacgagttttattgtttgatggcgcaaacgagctcggatggggatgaagctttgcaggagcttttatgactcatggattcagatcctggttgatggagaaccaagttaaagctgatgagcatgtggttacagtaaagattgcctaagtgaaaagaaaggagaattgagtcttcatcttcaatagaccaaggtgagagaggtatttgcgaagcatggtatcattgtattttgttatgcttcttgacgcatgatatgtaggcttagatctgattgtataggataagattacatgatgatatgactttatgattgttgagtatgatgtttgataatgtgatgttatgtatgatattataagtatgtgtatgttaactatgattatgagtatgtatgtatgatgaatgtatgactggggagaatcgagctatgggtcgtggtctccctagtaatgtggacagtgatgggccgacgggttacatgctggtcaagaaaggctgacgagcctgggatgcatgggagtgtctttgccacgagggccagcctctacttatgaggttctagttgtcacgaggatgactggacctaacgatgtgtatgtttatattaatatatataagatgatggttatgaatgtgttgttagaagttaaagcatgttaggttgattgcgtgtgtctaagtttatatgttatgatgatggttgtatagctttagaaagtgttttatgtttcagtgggcagagatgattcctctcactgagtattctttactcactccttttttccctttttcctcaggttagtaagcgtgaggaattgcgtgcaatattttgttcgtgtgtgaagttcaaagaaaacgtttttggcaagatcagatgaaaacatgccgtcttagtctatatggcggggcaggtgttacatctattgtcttccttcttttgtcccctggttgctctgatcagattgtatcctatttaaatttggtttcatcagttgctcaggtttagttgtctccctcgtttgggttgtcgtctccctcgtttgggcttaagcttctcttcctcgactatattacttcgttagtttggggttgagctttttggttatgtcttggatctatctcatttagtattaagcgatgtttggcttaattactcgtttgttatgtgggtcttgattattttacggtttatccgggagacccttgacaaagactctcatggagaaaggtgcatcttatgcggagaaggccaaggtccactctcttgtttgcgccatttgtgttgaagcccgttctcatatattagcgggaagtccttatggtgtgcttcgagagcttccacagtcttgagacaagttgggtttggtttttgcaatgtatcgaaaactccttccctagttgtaggttatggaagatcattgtgtttctctgtaatttaactctcgtcttgtttcttgtggtttgtaactttccaaaaactctgattatcaatattacttttagtgaaagaaaaaaaaaacatagataataatgtcaacaaaaccaaagtcttaaaacatacataatagtgtcaacaaacccaaaaacagagaaattctaggttttcttttaattatatttttattgtaatcaaaatgtattaatatcaggtttgattagttcacctaagtatataaaccagagttatccgcatctaaatacttaggcacatctatgatagttctactaattacctattacctaagatcaacttctacctgatcaatctagaactagcattaagaataatcaaaatgaaaaactctaaagataatcctaacatgttggcgatctactagatcatctaaatccccttaatgagaaaccctaaactttaaaaatgaactactcagacatggagattgaaacaaacaacatgattgaataagaaatcttataagaaattaagaagagaatagagtttcgaaatatcttctctaaagggagtttctaaaaggttttgctcctaagaataaaagagaaaagaagattagcctctccaagcttaggtctaaacaccttaaaatctatatataaattcctaaaatcgtgcagggacttctttaaaataaaagaaacttctggagcgaatctgcaaatcttcaaaacttcaaagagcgaaatcaaattgccatcaaatatcggtgtcgagcgtcaccatgagtggtgtgttactactagaacttttgaaggttaaaattttacttaactaagtttttgtccttataaaattaatagaatagaagactaacatctacatcagtttttgataaataaaaaaaggacatttcagacaattatccaaagttctaatcacgacactagagaactctattcagataatcataatcaattatgaacactcatttataaataatatggacctgttaaaaaaaaaagttgataataattttagtgagcaaggatcaaatccaccaccttctatctgtaagggtaagggtaactaccactagactacaaaactattttacaaatttgatgcacactaaaataaatgtaggatttgctgtctaaagcatgaacttgctggattttaggtatgagctagtcctgagtggcgtcatctaattttgcctaaccatgattattttccttcaacttctaatatcgtcaaaaatagtttcatcctctttcatacaagcaaggattcttcaataaagattttcaatcaaatatgtgttatatgtcctgacattgtctctctcctcaattgcaagagtcccacacatataattgattcaatgttgctttgcctaggataacatacaataaagagtaaaatcatgaaatgaagagcgagataaatgaaaattgaagagttttcatctgaattttaagaacaaaataaaagctacaaatttaaaacatagagcaaaatgattggatgacgttcgggttgagaggcatcgaaaagcttttctacactcttgatggaacccatcataagccatacccctttgtaaggccaaaccaccaccaccagtaattaacccctgtttcaagggcattcaaattaggcatgagatacatgcaaattcacatcgtaactaaatgaaaaaggaaacatggccttggagaattctccaaagagcaacaatatatgagaaaacgggttcataaaagatctataagaaaacttaaagggaagacaaaaataaataaaaactaacatgagatgtattatagatcccatatgaaatgtctgatcacgacgctaaagaatttctattcatgcaatcagaatcaagcaaaaacttatatttaaaatttatatggctactcttaaacaaatttcatagaaaaatatattttgttgtaagtactaaaattttcctaaattactcaacttatatatgaataatgcatatgttgaaaagaaaaagcaaacatgagacgtactatagatcacatatgaaaggcatcaacacgacaccaaagaattcctactcatgtaatcatgatcaagtaagaactcctagttaaatttatatggctatctataaacaaatttcaaagatttgtttttttttttactatgagtattaaaactgtattatattactcaacttatatatgaataatgcatatgttgattttggtaagttaatcaataaatatataaaaaaattgattttattatatgtagtcaaaatattaatgaaatttctctaaattacctttattattttttggtaaccttattaaatttagtattcaaatctaaggaagtattttattgtgttttgatacttcttacctataaatgtgatattctgcgctctcatggtcgcaagagaagttgaggaaagagagaaagttgtataataattgttgagataacatattttggtataccgatctttagatacgagcttatggaaagtggcaacgttgtgaatgcacaacctgaattatcaggcataagtaagaaattttaactttttattttattttattgaaaacttgttttggttataatttttagtttttttccggtagttgatggatccaagagctatgtttacgagcagttatggaaactctgtgcgggacctttgtgtgatattccaaaacttggagaaaaggtttattactttcctcaaggtcacatagagcttgtgagttctctctctctctctctccctctcttttctttctctctccatctcttctctctctctcttctctctctctctgtatgaaaccttttaacggggttttcaggttgagacatctacaagagaagagttgaatgagttacaaccaatttgtgatcttccttctaagcttcaatgtcgtgttattgctattcatcttaaggtatatctctattatgttttagcgaatacgcatgatatgtatatttaatttcattgtaaaaagacgtaattgggtaattgtttgatgtttgattttaggtggaaaacaatagtgatgagacttatgctgagatcactttgatgccagatacaactgtaagtgaaaatttagtatttctcttttattattagttaattctattttcctcctattataatacactgattttctgattttgttaaatgtttagcaagttgtaatccctactcagaatgaaaatcaatttagaccattagttaattcctttacgaaggttttaacggcctcagatacaagcgctcatggtggattctttgtaccgaaaaaacatgccattgaatgtctcccttcgctggtatttaatgttatagttttttaaaataaatttaaactttaatctttcattagacattacatattaaattttggtttaggatatgtctcaacctttacctgcacaagaacttcttgctatagatctccatggtaatcaatggagattcaaccacaactatagaggtaatgattccttttattcatataattcaaacacaacaattgaggtaataaatcctagataaataactaataatcttcttattccatgcaggtacaccgcaaagacatttgttaacaactggttggaatgcattcacaacatcaaaaaaattggttgcaggggatgtcatcgtattcgttaggtatattattgggtttttttatatatggattttttggttcttgagttttggactttaaactatttacttgtggtttcaggggagagactggagagttacgagttggtatcagacgagcaagacatcaacaagggaatataccttcatcaatagtatcaatagattgtatgagacatggggtagttgcttccgcaaagcatgcttttgataaccaatgtatgttcactgtggtttacaagccaaggtaattcaaagaaccatttgaactcacattttagattatattgatttatcaatagattagttccttcaacatgtaggtttatattttgtgtctttataagtatcaggtcaagtaaatttattgtcagttacgacaaattcttggacgctgtgaacaataagttcaatgtcggttcaagatttacaatgcggttagagggtgatgatttctctgaaagaaggtaacattagatgaaattttttttctgcttaaatatatttataatgtctaatattatctatgataacacatattgttcaattgattaagatgttttgggacaattattggagttagtgatttctctcctcattggaaatgttcagagtggcgcagcttagaagtaaaatttcattcacactttataacattattttaggaatacgtttttgagtgcaataaataacatatcactaattaactttaattttgcaggtgcagtgggatgaatttacatcatttccgggacctaaaaaagtgtcaccctgggacatcgaacatttaatgcctgcaataaatgttccgcgatcatttttgctcaagaacaagcgtttacgagaagttaatgaaatcggtataaaaaaagactcttataatcttttatttaaagaattaatcttctatttaatgaatttggtattcttgaataccttctcaataatcctattttatatacaggttcttcatcatcacatctcttacctcctatattgacacaaggacaagaaaatgaacaactaagtgttgcctctccgatgaatatttctcttcgttatcgtgatgcaactgaagatgctatgaatccttctaaattgctaatgagctaccctgtccaaccaatgcccaaactaaattacaataaccaaatggttacagaaatggaagaaaatataacaaccaagacaggcactaattttaggctgtttggagtcactctggacactcctccggtgatcaaagatcccattgaagaaattggctcggagatttcgaaacttactgaaggaaaaaagtttggtctaagccaaactttaagatcaccaacagagatccaaaacaagcagttcagttctagtagaacttgtaccaaagtaagtataagatcaatatactcttattatttatatatataactttttctcattgtactcaactcacgcaatcttgatatggaacaggttcaaatgcaaggtgtaacaataggaagagctgtggatttaagtgttcttaatggatatgatcagctaatactagaattggagaagctctttgatatcaaaggtcaattgcaaactcgcaaccaatgggaaatagctttcacagatagtgacgaagataagatgcttgttggagacgatccatggccgtaagtttcctttctatttctatcgattgaaagattagttaacatcttgagagacattgatattttattttttgtgttgtttgcatgtagtgaattctgcaacatggtgaagaagatattcattcaaaagaggaggtaaaaaatttgaagtccaggaagagtctctcaagttgaattaagaatcaaaacatatgtaataaaaaggggtcgaaaatgttactggtgtcttgttctatttttatttttctcttatttgttgttgcatgcgtttgtattatgtacttttgttttcatcatccataaataaaataaaatccccttgttatcgtgatattgagctttctttctaattcatacaatctacattctaaaaatttgagtgtagtatttattttatgatattttgaaaagaaaattgtataagacgaagtatatagtcattcaataaattaaaaattttactttacctattattgtacttgcaaaaccggatattttggagacataaaccaaatgatactataaaatatgtttatatttttaataaatattttctgaaatctatcattgcaattatgtcagcactcacaactagttaatatataatgatggaactaggaagttcagccaattcatattcaaataaaactactaagtcgaatcatacataaaataaagtattatgtgaatagatacttcaattatcatgattggagaaaattcataaataaaaaagtaaaggtagaaaaaagatataaaaagttatcatagattgagtgtaatagcatcacgagtattcagattttggtaaagagttttttcttcatttcatatatttaaattgtattaaaatagttaataatgtggattttttttctagaaatttaaggaataaaatactactatgtgattgttgcacaaaaaaggatactatgatttacaaattttaaatgtaacttatatgaaaaaaaagaaataaaaactgtttatggtgataagttatctagtttggaaaatgaatgttgtctttgtaccaaataaaggacgacataatctaaagtaggcttcaaattacaatgttttaccaaatcaccttgtgcggcaatcataatagcttttttttctttttcttttttttggtgtcataatagctttatattgtagtttataacatagtcaaagataagaagcttaaaaacaaaaataatttgctgatgtaggaaaataattattagtatcatttagtatttatttaaataaatgggatgcgatggccataacttatttattacataaaagataaagctataaatgattggaatatatgtttgttgttgaatctaaacagaacaaacaatattcaaaataaatataatttaagtctaaattatttagttataatctagattttaacttaatgaattgtatgttattgttcttatacttctaaaatagaaaattaaacatagtaattgtacactaaaaatatataaatataagagttgtacatttagaaaatacaaaacattaaatcatatcttattaaacatattttattaaacaacttaaacgtttattttaaaaagaaaatagttttgcaatgtaccgcatgttaaagtgtaccgagggttaaagtgtatcgcgggttaaaatctagtaagatagttaattttctaatatttttttaatttttcaatgatgagctaaatattaggttacttatttaactgctaacttaattgttaacccaaaaaactgctaatgtaatggtaagattggtcggaagaattttgcctctcttttgaaccaattaaatgattcatgaaatccacattgttcaaatttttgtcttttgagttattcttctgtctccatcgcaattcatcatgaatattttgattccacattccaatatataatttttgtaactaattaataattattgcccccacactcttctttatacaaagaacaaaaaaaggcacctgacaattatattgataagatatataaatgtttattgaaaatatgtgggtgactaataattatgagatatatataaattaacataggtgttggagtttgatgatcaaactaaccaggtgagataaaccaactttgacaaataaatgtcttcgtgaggatcgaaatttatttactttgaatatgacgccgtttttgtgattctaacgtttttcttgttttaaatgtctctataatcttttaactgctattagaaaagatgtttatctttttcaaataataagttttacaaattgcttaatacttaattccgtggacaaaagttatatgaaaaaaacgttacaaacaaagttaatgtacatataaccaaataaaaatcacacaaatgaatttttgagttaagaaatgtggcagcttttgcttttatttttcttcccacgacgagtttcttaagctcgcatgagacgacgtacacgcaacaatattggaagaaattgagatcttaaatttgtttcaaccccgagaatgataataataacattatagtatatgcaattttaccttgaaggtctaaattcctagaaatgtcatattaaaacttgtggaacttcttaaaaccattccacaactttgaatatgcgtatataatttatctcagataaatagtaagtagatatagctttgaagtgttcctatacaattataacgtatgcaaataagtaaatcaaaacaacctagacattagtaatcacaatacaacacttttaagatccaagcatagagccttcactgatccttgtggaagctggtccagacgatgtgatccccattgtctgaaacgatcgtgtagcagaaaaagaagatgaacgagtcggacccgaagcaacaaacatagatgcatggctcgtgctcatactgttccctgaaaacgatacttcacttatggtctttggacatagtgggttctttatctctgtgattccttctagcatttgaaccactttccccattgtcggtctctgcaatggctgctcttgtatgcaccagaagcttgtcttaaccattctcatcacttgttccatatcaacagtttgatcttcgcttaaacgtgtgtctaggatcgccttggtgttgcccttttcaaactcctcgtatgcccagatcgagaatttcttgtggttcgttttctccgagacatcaaagtttcttttaccgctaactagctctagtaggaccattccatagctatagacatccgattttgaggttatgggaagatttgcgagccattcaggagctaaatagcctcttgttcctctaacactgctcatgttgtatctgttgtcttttgggttcaagagtttggcaagtccaaagtccgagactttggcagcaaaattgtcatctacgagaatgttctccggtttaatgtcgcagtgtacaatgcagtcgcggcactcctcgtggaggtaagttattcccttagccgtcccaagggcaatgttaaaccgatactcccaagtcaagaacttcgctgaatcagtagtaaacaggaagttatcgagagatccatttctcatgaactcatagacgagaagcctatgtcttccctgggagcaaaatccaatcagtctgactagattcagatggtgtgtgctgctaatggtagcaacctccattctaaactgcttctctccttgctctattccttcaagttgcttcactgcaaccacggttctattagtgagcacgcctctatacacagttccaaaccctccagctccaagcttctctttgaaacttttggtgcaacgctgcagctccttataagtaaactgcacaggtgcaccagaagcgtactcaagcaaagtgtagtgagacgacaaagttccaaaccgaggattctttctacagcaacaccaccagagacctatctctactgcaaccaaaccaagaagcccagctattacagcaaccgcgacaatccacaaatgcactttcgagttgttatcgtcgccttttgttgctctttcgagtgtgttagccaccactggaccacacactttaacataagaagtactcggaaccgatggccactggtacccagtaaagaaggaaccaggatgtttctgccaacaatttccagacccatcagacatggaaacagaagcaagacacaaaacactactaagacaattagctctacaaggcgaactacccgcaaagaaactctccgagttcggatcgtcttcataagtaaacaacctcgtatgaaccaaatcaagcatggttgtattgccagagcaatcacttagctccactttccttttacatccctttcttctatcattcacatcaacaaaatcaaagttacgagacggacacgaacaaatcggattagtatcattgtaactacaaatcccaaagtttccacaatatccataaacaagacactgatcaacagcagaccaatgagcattcacaggtccactgtttctactagcagaactgtagattctcaaattcccatcatcatctaacttcaagaacctaaacgtattgctatcaccgtaatcgccactataaacgatttcagctcctccaagaagatttgattcgaagatcgaaacaactccattagtctgtaaacttaatctaggagacgatagattcgagctaaacgaagaattaagtccatggttccagtaaatcgcgctagtgttccacctaagagtaagattcccacttctctctaactgaaacgagtaaagaccagatcggagaatcttaccggcggtgaaattctgcgattggacgattgtatccgtcggattatcgaaggaagaccaaaccgggacgcttcggttattgaggaggatgaattcaccggtatcttcaatcgaaccggaagtaacaccgagacgatcggttttagagtcccagacggtggttccggagccgttggtgagacggagagagccggaggtgtgaagacgaagagatcctcgtgagtcaacggttcctgctgaccatatcggaacgcttccagcgaaagagacggcggcgaggaaggagttaggggaaggagatggaacaaaggagacggagaaagtggaattgggagatggccagttctggttggaaccggaggcgtaaataacggagccgagaggtatggtagagaatgagaaagggaagtggaggagaaggagaagaagagggagaagtttgagaaatggcgtcttcaccgccattgttacgattgtgaagcttcttcttcttcttctctctctcttctgttatcaatgaagactctttttctctttaattaattactcttagatattgtaattagtcgtcaaagttgacaattttaaatgagcgtctccattatgaactacgagagaattttaaaaaatcttcgtttaacttaattttagattttacacaataataataaaaaaaaacttaattgtcgaaagagtgcatctgggatttgaaaataataatcagattgtacttgaattcttttatccatttcagtttgaaaaatctagataatcctaattctaaatagcaatactaattattcgataaaaacggagcgaatcataaatactactccctctatttctattgtttttaactttctatacaaataaataaatatatttaatattttctaattaattctattttaattatatatttttttattggttgaattgattataataaataatgtttttatataaaagatgtagattaaatgatagttttataatttcttaatatgtgtgtaaaaatcttaaactacaactaatatgaaacagaagaattataattttagaatgtgaatatatgttctactctatatatacatttaatattattatttttttaattgtttttagttatatttaaaattttacacataaactagattataatctgtgttacattacagatgtaatgtttttgttttttgaagtaaaagaatattatagtataaagttgaaaatgtcatattatgttcaaatattgttttttagttgggtaaaattgtgtattatatttattttgttttaaaacaggttttcataataaagaatgagataagattgtagtgtatataatatggttttagttgtattaaaatggaattgtttgttattaaaatctgttttcccatccgttttggagttttctcaattgacatttgttttgctttaaatattagatttttaaggttttttagttatttttatacgaatgtttcgatttctggatagatgattggtggtaatagaattgtaattgatggtaaattaggaataaatggcaatgaataagatcctcttgttagactaaatgttgattatcatccatgtaatagatcaaaaatgagcaatagagaaaactaagaaacgtgatgtctaattttttaacaagagattattatatttttttttatttattttataaattaacgatccatgtaaaaaatttatgttgacaagtgatggcgataatgcttggataaatactattttcgacaaaaaccaacatgaaatttatttttattatattttaatcatgactgacaagataaagataggagtaaaactatgtagaaatgaaactattgatacccatgaaagaggaagaaaaaaatattgaagagatgattttcttagaagaataatggaaactttttgggtatagtgaatctaacatgataacttttcttgacaatatcgagaagatgacacgcaagtttagaaacagtgttaaaagttaatttacaaaggaatagatgaagttttgaaagtgtctcatttggattattgagttcgaggaagaaaagtggtgcttactaatgtaaatttataaaatactagtattatattcctgttttgtaaggacaaaataatttttgatgacataatttctattcagttgtatgaattgcttttatttctaaatcaatagtatggatttgagtaaagaaatagattcttcatttacaaaatttgttttgccacttatttacttaaaacaaaattattatactttaacattgcaaagtaaaattatttgtatttaccaaaagtagaatttttaaattaactcaaatttgacgtttaattttgtttctatatcacttgatgaattaagtatgaaaaaaatatgaaatttttttggtaaaatatacaagtatataaaaatttaaaatattaaataaaagtgttgaaatgttgaagaacttatttgattatgtttttaatcttagttagttttttttttaattctagtaaaagtggagcaattatgaagattaaagaaaaacaagaaaaaataatatagtggtaaacactttgtggtttggactattttcttctcatccatcataaaaactatagtgtgatttttttaattatagtaacaaaagaaaaaacaagagtagttttttcatgagtaaaagtatgttactttgcaattttgaagtagttcacctatagtttattactctctttgtttcttaattcttgattttctagaaaaaatacacatattaataaaacgtattaaaaactgattataaatgtaatatttttttgatttacatatttttataattctaaaccaatgatatttaattatttatcttgaagtttcatattcatcaattacaaccaattaatattgcataaaaaacctaaaaaaatcaattttttaaaagcaattatttttatagaaaatcaaataataaggaacatagagtatacagtaaaacctctataaattaataatgttgggactacaaaattttattattttagagaggtattaatttatcaataaataatatttatcaatttatagagagattttactaatttggtaactttttaaaaatttcaataagatttccttcattatagattatatctttctagaaccagttacaagtaaaacataataataatgtctagaaaacaacaccaatagttttgatacagtaaaatatgaaaactatagtcaaacaaaaaacaaatatgaatttaagcaaaaaaaattataaatatattataaagaatttttttacatataatatatatatatagttgatatatttatataattattaatttatgatattgatgagaccatagatttacataggactttcaaaaaaattattatcttattaatttattgattaatgtcattatttacacagatcccaactcgggaccggaataatttattaatttatagagtattaatttatagaggttatactgtatttcattttttctaataagatttttattttatttttaacaattaacaatttcatgagttagaagtactttttttttattatatgtgtgaagttagaaaacaaaacaaattcattacttatattattgcatttaaattaatttccataatttttataaattatattttaacatttatattttttaataattattttggtacatgtgttttgtttattttactactcaaaccgcttttaaatgttattccgttcacaaacatatttaaaccgcatgatacatttaattcgcattttcagcttaatcgcacaatacgcttgatatgcacttaacctccttgatctgcttgaccgtttctctattcagaactatatgtattgtttaaccgttgcatgttgttcttcaaaattcttctttgatatgtacaattgattgtataatctctatttttttattttttggtgaatgcaaaatacaccacaaataattattaaacgaaaccataaaagttgtttagataaaatacaaactaaactttgatgttcattcaatatttttttttcgtataaacatattaatacttaatatataaggaaatgcacaaaattcttattttctctagcggtgtgattgactctctttattggagaatcttcaactgacttcataaaattacttaaagaaagattggttgtatgtgttagagtaaaataaatcagaaaaaaaaaatatatgtgtcaattagaagtaaaacaaaattccaaaatatacttgttttttacaagttatgaagagtgcataaaaagaaaaaagaaaatccaacatgaaaagaccagagtaaataatttacctactaaaaaccaagttacaagatatcttctaattaaatagcacatcttccaatggcataaaatcagttattaataatttgtaatgaaaaaaagtggttggaaaccagaatgaatttgattatatataggattggattgcattcatagtctccacaaacgaattattttcaaattctctatccatacaaaaaacaagaatgagaagtagtgttttccattggtcttagtatcataattatctcaaaaacttcctctcttctagcttgcttctataaaaacaaagtaaactgcttattaatgagcttatatggatcaaagtattagatagaataataagtctaattcctcaatattcttctttagtggcccaatcaagatcatctatccgagaggatagggcccaaggtctaactcttacatatatctcttactacgagttacttcgtacctctacttattactgaataattacctaatgagtgcgggtagcatcagacaattaaaagatgggttttactttttgtcacagttttgccctcgtatctagaaaatgataatttacggaaataaaaaaagataggatctcctaactttcctactacaagtgattaaagacagatttttattataaaaacgtcaaaatattatacgggatctcattccccgaagtgagttatgtacctagggatcaaccaataaaaaatagataaataaaagcgtgatctgattatacaaaactaaatactacatgtagggtaaatgaggattctgattagttttgagttgtcgagtaaggagtaaggggcctttggaaacccaagaaaagcggcggagtactctatattgaagctggagcgaaatgacataactttcatcagataccaggctctcgtcactagattgctgctgagtaagtgtcactgcttcatttggttcttggagcctcttaggttgcttccttatcctatacaggtagaatccaaaggatgctcctcctgcaaccaccaaaccaaccaaaatcccaagtagaagtaccaaaacagttggtttgttcttgttccttgttggcgaaggaacaagaaggcaggttgactcgatgtttggattcctttcagtgagtataacaattcctctaacgcgtgggacttccccatgaagttggttataagaaacatccacaatagtcaggttcttcaactttgtgatttcaaaaggaatggtacatttaagtcggttatgcgaaagatctatgacccgaagagaggttagatctgcaaaatgtggagaaatagttccgattaagttcaaggaaataaaagagataccaatgatgataccctccaaacagtttgtaccaaaccattcacaagggttgttcccttgccaactcgttacaaattcctctgggtcaaagcgtccaacaattggcagtactattttgactatgggatcaacctgctctattgccgctaaatatggagtcaaccgtgaatcaaccacaaccatgacacatagacaaaaaactatatgtcgatagttgatcatcttcctttatcagtcttttgtgagctgctctgtaagttaccaaagcctggatttagtcaaaccttattgcatgtagagtcaaacacgcattaaccacaaccacaatacatagcgaacaaaccaaatttgagcatcttcctctatcagtttttcataagttgctctgtaaattatttgtcagctttaaacctcgtatgagcaaattgatgagcctcttggcttgtacaaggttttctgaatgcaagtaaaagaagattaaattccaagaaagagaagcaagtgaaacctcattacatcaatcttctagatgaagaagaaaataccttgatctgcgtttctggtatcagccgagtgttgtttgattcggtcttgataaacgctacagttaaagtctttgctggagcttggggaggataaatgtttgaacgaacacacgagacccaacagatctacttaaaactccagtatttgacttatactttgatataaacgcagcagcaaccaattttacgagcggcagaaactcaattctggaaggagttgtcgtaattaagccgcatggcaatacccgccaaaaaggactctttgatttttaagggctgagcctttatcaagtggataattaaccaaagtaaataattaccgactaaaaatcaaggtacaagatatcttctaattaaatggcacatcttctaatacggtaaaatcagttattaataatttgtcatgaaaagaagtggttggaaacaagaatacatttgcttatatataggatttggttgcattcatagtttagacaaacaaactattttcaaatactctatctctacgaaaaacaatagtgagaagtttttttttttttgcttttgttaaatttttctcaatcttatatttcattccaaaattttcataactcaatattgaaggtacttttcaatttcttattcatcacatgcgttttgtttttgcgaataacatgttatgaatttaaatttatattatgttttttttttgtaattattttacttaattgtttttgttgcactaattaaggaaattttagtttctaccgttaacacttattttgaatgagtcagattatacatatcttaaaaaaattatttagttttatataattatttttgtaggtgtaatatatatttatatatattaaaacgttgtgatgcaaaaaaaacaagaaacgcaatattgttttgattagaatatttttatgtgctgtatattttatgtattataatctctataatatggaaatattcaaaatatgtttttaagtataaatagtttaactaatgttcttacattttctaattttatgatatattatgaagatgctagcaggttagataatacacatagtagagataatttgtggaattgtcggtataggacgatcgagacataaaatgctggtgaagcaacattgagaagagttgaaagaggtacaagaagcaagtatgtttataaattttttgtttatatcattttatagttttatccatataaaattttaaaaatttaattgtgattttttagaattttaaaatatggttagcataaatggatgtttagaaaaaaattaatttttctagaacttgtagtccctgaagtagaagtggaagactatacgattagggtaccattagcttcttgcaaacggagaatcgaagaaaacattattcaaccagttagctggtgattcggttaaatagaaacccgagatgaaaagcaggttaaaatatctagaaattttttgattttcaataaaattatccaaatgtatgggtgcatatgttaaatcatccgagcaaatcaacatgaaaccgtcatggtggaaagatcaatgtgcagtaatatctcatattttattatgtttaacatataatttcctgtaagcataccaatagtatactcataaatcatattttgtttacaggattttcgtaaaaccaacaaaaatatataattttgttgcaaaataagtctcttcaaaaaaaaaaaataataataataataaaaagttttttctattcaaagatttactagatgttacacacaacaaacacgattttaagcaagattctcattattcacttcaaatacttggagttcaatttaatatcgaacaagaaccatataatgatgatatgccacggatgacacattaagaagatggtcaaaccgcacttcctccggagaattataatcttagagcatatatatgatgatgatttgccacgactctctcgatcacctagagagacaaatcgacgtactccacacatgacgcatgtgacagcttcacgtcagacgtgctcagaatacttcgatacgacgtactcatttgagaagagcaaattttgaggtacgaatggatggcaactttcaatgtatagaagaatctcgtaatgagttactgattgtggtgtactcacgacaaagcttaaaaccaacatatggtgatgcattagttgtactattgcccagttgagccaatgaatatattttgatgggaagcaaacaagttgctaatgaacgatgaagatatttgtgacggatttataaagttacgaagtgaggagaataaaattcgataaatggagcggttatccggtgttcataaatatatgaatccttgtgatatgatcaacttacgagtaactggcatcaatagtggaagtgaatatgtaaaatctgatgtttctggaaatggtggtaataagtctttaggtaaagcatttgttgttggtggatctactagtggagggcctattggtggtggattgactttggatggtctgttggtcttggatcagtcagggtgggtttggtggtgatcaaggtttgaatataagcacatgggataattataactatgaaaatcatgtgtctattcttcctctacattacgtagaatcaatttctccaagttattatcctaactccgagatatttggtttggggtcacgatggacgaatatttcttcatttcttgagattgactctactaggtctatatgttctagttctgctaatgttctgctaatgttctggaaatgataaaagattttaataggctaaatgaaaatgatgggaaaaagtagtgattatttatattagaaagttttaaataaaaattaaaagggtgttattagtttatgatttcaaaaaagttttagtaacaaatttcagttgaaatttaaattttgataattttctattatttggtgacaaaatatttagaaacctttcatatttttaattatttagaaagactaataataaatcattactagcagtactaacaaatttagagaaactactaataaattatttattttcgtttataaatttaataaaatagtgtgtgtgcctctgcttcagctagaggattcatagttacaataacccattctgtcctgtgaagcaaaagcagagatctttcctgcgaagcaaaatcgaagatggttcctaagatcgcatcaatggcgtctactagacctctctgttcaattccttctatcttcctctctttctctctcctcttcgtcgtctctcttctcttcttcttctccaattccttaatctccaatccaaatccgagcatttcacacaacactctccaaaacggtatcaatgtctatgtagctgagcttccaagatccctaaactatggtcttatcgacaaatactggtcctcttctactccagattcacgtatacccagtgacccagatcacccgacccgtaaaacccattcacccgataaatacccaccgtacccagagaacccgttgatcaagcaatacagtgctgagtactggatcatgggagacctagaaacctcaccagagaaacgaattggatcttttgctaaaagggtttttagtgaatctgacgctgatgtagtcttcgtgcctttctttgcgacgttaagtgcagagatggagcttggaaatggtaaaggttcgtttagaaagaagtctggtaacgaagattatcaaagacagagacaagtgcttgattttgtcaagaacactaaagcttggaaacgatctaatggtcgtgatcacgtttttgttctaacgggtactaaaaagtttctctttttatcattcaaagttcatgtctttgtaacttgttctggatcttctagtttagagatttgagtaagtttgtgtcatgtgggtgtgtgtctgtagatttggtgtagaagcttatataagttatatgtgtggattgtgttgtgtgtcaggttaagttaaaatgttgaagcgttctttggcagaccctgttgcaatgtggcatgttcgtgaggagattgctttatctattcttcttgtggtggattttggaggatggtttaggcaagattctaagtcgtctaatgggactagcttgcctgagaggattcagcatactcaagtctctgtcattaaggatgtgattgttccatatacgcatttgcttcctagactggatttgtctcagaaccagagacgtcatagccttctttattttaaaggcgctaagcacagacatcgggtaactattcttacgaaactcatttctttatccgaatcgctacattgctcttgtgagtgagtgagttcatggctcatgaggtatcattgacagagtaaatgtactgttgttttgaaagttttagtgtagttcaattttggaaagatttgggcatcgactatttgtttgcatttgtgtttacttatatgcatactgtgtggcgacattagaattgattagtggtgtgtatacttagcaaaatggtctgttctctacttagtgttttggtgtcaagatctcttaaacgaatttgtataattttaacttgatagggagggttaatcagagaaaaactatgggacttgctggtcaatgagcctggcgttgtcatggaagaaggttttcctaatgcaacaggaagggaacagtcgataagaggaatgagaaactcagagttctgcttacatccagctggtgacactcccacttcatgccgtctctttgatgccattcaaagtctatgcatccctgtgattgtcagcgacaccatagagctcccgtttgagggaataatcgattactcagaattctcggtttttgcctctgtaagtgatgcattaacacctaaatggttggctaatcatctcggaaggttctctgaaagagagaaggaaacattgagaagtagaatagcaaaggttcagtcagtttttgtgtatgataatggtcatgccgatgggattggacctattgaacccaatggtgcggtgaatcacatatggaagaaggttcagcagaaggtgccaatggtgaaggaggcagtgattagggagaggagaaaaccagcaggtgcttccgttccacttcgatgtcaatgtatctaaataatgcaaccaatccaaaagatagaaagtgttccttttactttgttggtcttttcttttgtacttgtttcgtttacgaacattgttatggccactttaaaatccatgttccttagggttcacagaaaatattgaatcatgtaagaggtttcattatcaatccatagtgccaactcgagtatgtgaccacgttttgatgcatgacttaccggttcatgtggttggacctaatggtcgggttagtgatttgtcgatgaattcgattaaactccctaaaatacggctagattcatatttctgcataacttgggtcgaatgatcgctaagggattgaaagttgtagcggttaggctagtgacttggggttaccaaacactaaatgttttgacaaacaaatgtaacaataaacacttttttgatttcttctttcttatacaaaaacaatactttcacatgtaccaactgacactttgttttttttagtacagactttcacttgcctgaatctgcctttcaatgaaatggagaaaagacagacacaagagacaatccaatcacttaaatccaccccagaaacttgctaaaaaactgcacaatgatggggtagataaaaactggagttgtctctatatacaagtgaagtaaaaaatcaaatgaaagaatcatatgagagagatatatttttttttttaatcaatatatatgagagatatagaccgattataatcaaataacttctactttcaagctataatcatatgctttttgcccttacgagtctccttggtcgcaccactggtcagggacgcacaagaaatgcgttttcatgaatttcctgaaccttgtcttgtaatcaatcgggctgatcactgtcggctgcacattctttggtaccaccaaagacgatttcacccatgtctctaactgcttgtcccatgtgtattgtctcagataatcgatgatcccacacactagctcatgattctcatcatcaactccaaccagcagcgagtagtccatcacgtttatactctgccatttgttttccatttacgataagtggattgtgtaacacaatagaaatagaactaagtgaacatatgtatgattatactaagagaaagagagatgaggaaaactcacggttaggaagctggtgtcgttataaaccgctctttggagattttgttttgatgttttgctaacgtaaagcggggatttgttcatgtcgttgacaaagttctgatccaatagaacatcgtcttcgccattagcagaagtggctgtgaaacgagcatgtagagcgcctttgagatcatactggcgagtaacttttctgctaaaactcagattctccatgaccatcaggtcgtgccgtatctctttcccgccaccctttggctgccttacagttacctgaaaataggaatcaaagatccttagaactaagaccaatccattttataacaatgattaggtaaaatgctcatggtcatatgatcaaaagatgattctaaatacctgatggatcccaagaactttggcaagacaagtctggttgcctaaatcatacgagtccttcatgtatttgaaatactccgtagcaaaagtcacaaatgattcgtactctgtcttcttgatctcttttacgatgaacctatcatccaaagtcttagcgaacacggatttgctcttcccacctttggcatcccatggcttacagcggcttagtgaagctatatagtcaagctctgatgaacaacagcgttttctgaggtcacggaaatcatctgcatacagggacacgatagagtacttgggttttccaactgatttgactgacccaaaagtaacgaggacctctggagggggtagtgtttccaaccgatttgtactctcactcgagaaacgggaaacgtctcggtcagtttgcttagaatcctgattattatctaagaacccttgaagagatccatgtatacaccttgaaagaggctttttgctctcttcattgttcagatgggcaagtgcacaagcaattaggctggacagctcgtcttcatagtctgacacaataaaatcatcatccctcaacgagatgcgcagacgagaactttcctcggtgattatctggttcaccgtctgtaggttttcttgggtaaagttgttaacatactcgaatttcaacaagtattccttctcaatatcaacaatccgcttcgagcgtagttcctcaaatggcagccaaaaccattcatcccaacctaagatgtgtggcccattagaggtagaaacctcatcatccaaagactctccagtaactggaattgatttgtccgcttcttgtccattggttgaatgtacattaacagccaaatgagtgtcaaaatgattgttgatgggagaggttgtatcgggactggagctgcacaaagtttgcgattcattatcttcaggcacataggattctgccatctgatcattgtccccaacagacgctccagcgattggtatatccttgtgttcaacaagtggagtgtctatgcctccattgctaccagaatcagaaactttgttatcattttcatatctggtcattccagcctcggaaacagtcttcaaaccttgttcatatatcttcgtctcatcacttgaaggtagcaaacgatcagataaaaccagcgactgcaaccggtagttccagatgagagcttgaagcagaagttcccacctcatgcggtttaagcggagcagtctgtgtgaaacatcatctatggttttagccttgtcgaacgagttcttgatgttttcctatttgtaggcattaaatattaataagcctgtctctaacacttaataaagatagttgtataccatatggaactgtcacaaagctaacctcaaatatgcaacgctcgtgcttcagcaactcctcaatgttagaaaggagtttgcgtgcacgctgatatctgagatctgaatttgtgaattgtgatcttagtctcttaagaaaaccagcagcgtcctcgaacaaggagatccctttagtgaatacctgaacaagaaaatataaacaatcagcacaaaaattgatcatcttgcgtattcattttgcaatttttttgccagcccttgacccaagcaagacatactatttggcagaaaatgtaaactgaaaagaaagctgatggtgggcgacaattgtttctagcatcatgtatgagaaaatacagctacaatactgtttactcagaatagaaacttactgtttgaaattctttctcaagccaacctgcttttattaaaatgctagattccagcttcatgggtggtagagacactgtgtaggatgcgacttgggagtaactgagcatagcaaccatggagcctaatctgcagttgtgtacaatttaagatatatgattaaagctaatgagtcactaagttcccaaaattttcatgaattttacgttgtagcactagaaccaagatgggacattaaaaaaaaactacgcctaaccactattctcttagaataagtgaatgtcactatctcgaaaggccatattatagagttactaaaactatagttaattacttagttagaacatgtgaagcaatatgcagagcaaaatagattaaaaaaaaaaaaaaatacccaaagaagtgaaggaagtcactgtcgaaagagtgcccacagctagacgatctgttcagaaaagtttgctgagaaaagctgagctccaaaaactttccaaatgacaagctacgagcagcagttgatatcagcactcgttttgtggatttccgggacgcattctttgttttacactttccacaacgactccacatccagatttttccttttgcctcaccagccaaaccttttgctactggaattcgcttgatttggattgttagttgcttattttgatgagcataatagtaaagatgtgcttctggaaattcaacacacgtttggcatagatttctctgcatcatgaacagttccataaacaaatttgagccacaaacacatatgaaccttggcaaatgagcaaaacagcattttatttaaaatttacaagtgcaccggagtcaaacctgattaaacatatcgcgcaggaatttttccaagggaacatcaaagtgcttgtaaaacttgatgtgtgaaaaatgcctttgatcacacattatccccctgagggcattcctctttgacactaaaaccaatatactctgagactccaaggtgctctcaatatcattttccgtttgcgacttgttgtctccatcatctgaactcgagtttactgggagctcaggatcaagtaaaagaggttgtttatcctcattcttttctgcagtatcttcctcagattccctaatcgaatcaagattgctggtagtcgatacatctgtatccacagaaactggaactgactccggattttgaacaaagcctaaatatttacttaatctggcagataaagatgagaacccagtaaaaataactggattatatggctcgtgagagaacacatgatctccatctgattcccaagttccaactttctcaccatctgcttccccattaatctgaatagtttgttcatcgaatccattagacacaggaatatcaactgcttcagagggagattcacgaggagaaggagatggtgaaaaattttctatttccacaacacatgatgtagcttcttttgcaaagatggttgagaacattgtatgccggtcagcgaggaaagaagcctccagcattagatgatatgccaggataaatgaatattgtactacttctttgacctttttcaacctctcgctgtggcatcctttaagtaaaatctgtcacatatcaaatgtcaaaattagaatgcaagaaagtttaaggtcaaattcacaagttcaaattttggataaattcatcagttgatatatattgttactaaagtagagatatctagtagcattaatgacttatcatactgcacaatcagtcaagaactcaccgtgcagccaaggcgggtagggcaaccctctaaaaacatcagtgttttagttggcttcttgtcggattcacccgcggcattatgctcctcgacaattttctcgatacgaaaggaatcacaatgctttaacttctgactagacagagagtcaactgaaagaattggtgaaccaatgcatcgagaaatcctctgtagacggtggagcttcatgtcaaacaccagagtgacccctttatcaagaatagtcttttggatatcacgtgaaacagacttttccaccagcatcacgtcaggcttggaagcttctatgatatcaacaacaggcttcacatacttcagtagatactcattgtcctgttggcaataataaaaaataaatcagaaactaataaaatgaaaggttccaaactagtgaaagacaagttgtgttgcttcccccacctgattcactgattggagagacgaaaatccacttatcggatgacccagtactccttcgactaacattattctaggatgctcatacttagttgccatgtgtttaagagcagcatgttttttgaaaaccaggcctttgaaaacttcactgcaaaagtgaacaagtcttaagagagtaccagtagatagaaactgatttttttttttttaaacggtaaatggcggattctccaatctttttaagggtcaaagaacctcaaacaatgcaaagtctaagcaaaaaatgggtaatttgttatacctgtcaacgcaagaaccagttgctatgcatttcactttgatatactcagtgggatcaactgatttgccgtcaatagctggcttcaacatagaagcagcctcccagcataacctagcaactatctcaaaccaatatccactttcttcaatagaaaacccagccgacttaataagctgactaacaatgaacttaaactttgaatcagcctcctcaagcatcactcttcgattttcttcataaacctttctcttttcactactttcatcactcaactcccctaacaaacttgctttgttccacttagaaccatcacaacaatcatcatcatcatcagcaaaaacaccatccacctcatcttctggattttccggttcaggtggctcccaaactggaacatcatcactatcatcttcacgatcagataaaaactgcacattctcaacactgttttctttcgatttctcatccaaaatgtcgagaatatcactcggcatgctcttcgacttacgctctaaccgatctaccttaacctccttcgttaattccacatcttcttgactactatgacttgaacattcatcttcaatacccctaacaaagataacaacaatcttcatcatcaaacaaactgtttacaaaaattatcaatataaaagagtcatgttttgttgatctcttacctatcacaagagtttccatcaacagaacactcacctgccaaataaaacatcatccaaatcatttaaacgcgttttcggatgatttcaacagcacaagagaagaaatctataccagagagagagcgttcactgctagataaagaattagaaggagtcatcaatggagattctgtaacaccaaggtccacaggaccaagaacacgagaagtagccacctgtttaaaaccaaagaaaacgcgttaagcatcataaatcatcatcatcatcatcatcattaaatctaccaaatcataaaaatccagaaataaggaaaataaaatatcgaccgacggagatttgatatgccaaaatcaaatacgcacaaattccggcgaagatctaagaatttacgattcggattttgaatctctgtcaacaactctactacagtacgaaacaatgaagaacagagacgacgaaaatcaacaatcgaagactcgaagtcaagtcgaatagtaaaatcgattttcaaaatttcagttcaacgaaaatcgattatcaccggagaagaaaaaaatcaccggagaaagcaacaagaagaagaagaagaagaagaagaagaagaagaagatcgttgagagaatgactcaccacggaagcaaaagaggaagaaattgagtttaagaggttgaagaaaacttagaacatttgacagatttcttttgtggggttttttgccttcactgttgaaacaaagagagaaattgaatttttcttacagagaaatggaaaacgagtatcgacggtggagagaaagattggagacgaagtttgaagaagagaggaagaagagaataatatatcctttttattaatttaaaacctgtgggctccacttttctttttttctactattctaattttttttttaagttttttttaaactaaattataaaatatatttgtttcagaccattttttctctattttttatttggtcttgaccgttaaatctgtttacatatctaaaagacaaaacaatattgagtattcacttttttttcactgcaataagactatagaattttgacaagaagactatagacttttgaaaaagttacaattttctatgaacttaagaacactgaaacaagaagtaaaaggattttattctaatatggttagttttactaattaagaaaagagatgtttagtcgcagttgagtttttatctgtacgaatagttgcttcgtttggctatagtctgctttgactaaaaaaataaatactaataaattttcaaaattcaatggatataatacatagtgcatgtacgatcaatgaagtagatggttgaatgtgaaaaagaaaaaaaaatagagtagttattttgtttgtttaatgcaagttagtagtctataaaaaaaaaaaattctactgcatttttcatttgtacttaactttaaaaagagaaaattgtgtgtttcttttaattactttgttgatatcgcctaaagataaaaacatcagtaaaaaagattacaaatacaatgttaaatatcaaaacgataaattagatatttgaccgacatcatgcatgatttttacaaacaaataaaaacgttacaaatatatagttaacgttgagatacaaaattttgttttatagtcattgatagataaatgttttcttatctcatgatttttacaaataaataaagacgttacagatttatagttaacgttgatgtacaaaattttgttgtatagtcattgatagataaatattttcttatctcatgatttttacaaataataaagacgttacgaatatataattaacgttggtatataaaaaatttgtttgtattgttgatagataaaagtttattaacttgttgacattctctaaagactaaagcgtcatttttgtaaatggtaaagacgttggatatttcaaaattagggtttataaatatatttttatggttgatggataatatgttttatttattgttagcatctccttaagataaagacacaagtaaagagattctaaatacaattgtaaatataaacctaacatagagaaatataattatgatgtattatcattgttaaagaatatatactttattaccttgttggaaccctctaaagacaaaacatgcaatatactttattaccttgttggaacctcaaatacaaagtaaaataccaaaagaaacagatgtttgtttgaaattaaacgtgatttttatgaatagtaaagacgttacaatatataaaattagtgtaaataaatataaagacaaaagatgcagtgaagaaatttcatatacaaagctaaataccaaaaaacaaaattagatgtttgtctaaaatcatgcgtgatttttataaataataaagacgttacgaacatataaaattaacccatacaaatataagtttgttgtattatcatgatgatgaatatatggtatattattttgttggcattccctaaagaaaacgacaaacgctccagtaaagagattctaaatacaatgttaaatacccaataaaaagagaagaaggtgagtggttaggtgggtttgcgttgaacataggcatctgttcggttcccatggcggagttatggggagtgtactatggtttagtcatagcctgggagagaggctttcgacgggtggagctggaggtggattctaagttggttgtggggttcttacaaacatgggtgactggaatgcatccgctgtctttcctggtacgtttgtgccatgactttatctcacgggactggttagtccgggttactcatgtgtataggaagctaatcgtcttgccgatggattagcaaactatgcgttctctttagattttggttttctttctcttgatgtttgtcccgaatctgttctttcgatcatgttcgaggatgttaatgggcctggtgtccctcgtactattcgtttgttatttccttttatttagttcttaataaattggggggagttttttgactccccttcccacacaaaaaaaaaatatccaataaaaagaattagatgtttggctgataacattcatgattttttaaaatattaaagacgttatggacataaaattaacgtatataaagataaatttgttgtattatcatagttgatatatatatatatatatatatatatatatatatatgctttgttaccttgttggctcatataacgagattttaaatacaatactaaatactaaaaaacttaattggattcttttcgacatcatttgtgatttttacaaataacaaagactttacatatatagattaacttagttacagagaatttttgttttaccctggttcatagataaatgttctataaccttattccctaaagacaaaattgttgtaaagatatttcaaatcaatgctaaatactaaaagttaaaaataaaactagacgtttatctgatgttatgcgcgtttttttatacatagtagagacgttacgtatatatataattaacgtgtaaaagataattttgatgtactatcatggttgatggatatatggtttattaccatcttagcatctcataaagaaaaagacacaagtaaagagattctaaatacaatactgaataccaaaaagattattagatgtttttcagacactatgcgtgatttttataaataggaaagacgttacattaattaaaaattacattaatagaaaattaacggagataactataatttttaatattatcgatgttgataaataatttggttattaccttattggagttcactagacaaagtgacgtgaacatccatcctacggatagaatggaaggtacggtgaatcctactatatatcttatattaccatatttgatggatatgtttttttaccttgttaacatctcctacaaacaaagactctagtaaagagattctaaatataattcaaaataccaattaaaatttatatttttccggcatcatcatgtgtgattttaataaattagagacgttacaaatatatgttttattattttgttggtagaccttaaaatcaaagatcccagtaaagaaattccaaatgaaatggtaatttcaaataaagtaaattacatgtttgtctggtaatttatgcgtgatttttataaatagtaagatgttacaattcttggcggagaaaagagagtaagatgttacaaatatagaaatcgtgtatatatatggttttgttgtatgatcatagttgatgccttgatggataatatgttttattacattgttggcatgtcctaaagaaaatagacttggtaaaaatctgagtttgaagattctaaatctgagtttaaagattctaaatttgaactttgttttacatcatttgtgagttttatatatagtaaaaacgttacgaatatagaaaatcaatgtagataaatatttctattgttcctaattaaaccaaaatttaagattttcacatattgaatttttgattataagagcatcattttttgtgatcaaaaatttttcacaactttagaccagtagtattcaattatttttattgaagcctacaattcatcatcaataactaacacaaagacattaaaaacctaaaatttgtatatttttgcaataaatttgttttcaaaaatttggattaataaggaatagaaggagtacaattttattgcattatcatggttaatggatagatgtattattacttttcgcatcccctaatgataaagggatgtgaatattcaccctattgatcgagttaaaggtgaatcctaccaagaagattgtgcgttccataccaaccatggatcctgtactgacaatactagaagggagaaagctgcgcaataacgattatgtctctaccattgatgtcatgtcaaaaatccatcgacaagtcaattattttgagaagaatgatctaaccaaaactcaccagaattggcctcgatcataagtgttcaaacactcttacccaaagatataaacagacgtgtgaagctacccaattccaaatttacaaatacaatcgtcttacactcgaagatacagtaccaaaccatgcaaagaagctaactactttggtggttttccaaactattgaaaggagccacctagacagtactgcaaacatgaaactcttcctcgcactacttccactcaagcattcagcctcggctcaaaaaataataaagaaattccatagaaataaagttttgatcgtggttaatcacacttggttcggattaaatccaaagatggacaatgaatcttacccgcaaatctttttacccgcttcaagaaaccaatccaccaaacttgttccagttattctaacttgataatatgaagcctcttattgtttcatgagctttcaaatcagtgtttcatgttaaatcttcagtccccgcgggaaatagtctttggtttgtatctagccttttatatatccggaatctcataatccgagtgcatttccaatttgccatcacaactatcgtacatcccttccattaagctcttaagactttgaacatgtgtgtaataaagtcataaaatgaaagataagaggaaaaaaattcacaacacgtaaaagaacaaaaaagttgtagtagtaagtgtaagatctacacaccaaaaattaaatattttgttttaattgactttaaacttttcaggaaagctaaagcatgatttgttgaactctgtggctaaacaatttttttggctgtaaaaagtttttaaagtcttaccaatcatcctctatatcacaaaagttggagtaaagagattccaaatactattttaaataccaaggattaaactggatgtttgtcggcatattatacgtgatttttacaaatagtaaaagcattatatatatatatatatatatatatatatgtgtataaattatagtttctctattcaaattaagtgttattttatgatctttatttttgtctcaaattatgtgccgtataaatctgagagataaaattgtgtagtgtattaataagaggtataataataaaaattaattatatgtacgaaaattctttaaagatacttaaaaacaaaatggagatggctataatgcgtaattcctttattgtttatgaattacgaccacggtccatggatggatatatatagctatgatgcagctcgagaacgggagagcgaaggatctaactaagagttgagggctataaaggcgacatgcatatttaaacaaatgccataggacgacagacacaatggtgtctagatcgacgggtatattcggcaagtgatgtatgatgtatgatgtatgatgatatatcataagaataacgtagcatgtagaattttgataggttaggtgtaatgctaggttctagattatgtgttatgtttacctttttttgtacaaaagttttgtttttcattcaatcattcaaatttaatataaggtttaggagaatatacatttcaatgtcgatataaaaagttaaaaacaataaaagtaaaagtataataaaccggtaatagttccgagataatctgaagataaggattgtagaacacaatatcacatgtgagaaaatggtaaatcggagatcacaaccacgaatccgggacgtgaaagattggttattgtcgcaagacataataacattgaaaatgattttgtagcctcgagacttgccggtacaaaacacactacattacaaggtgggaaaacgattagaaagatcaagcagtttctcggtttgcataccggagaccaaatacgaaaattggttataaaagttttctccatgaaagagaagagagagacaaatgttctccccataacgaaggaaggcggaacgaaggttttctttgagatgatgtgttacatttacctattctatgcataatagattatagtttggttatatgtattgaatcatgtggacgtatgcgaacatctttgccgagtaaacttctcctctcttttctcttttagtatgtgcatgtttcttgtatcgctagtaaatatcgttggtgagagttaagggagaaaaggtttgacagtggtgttaggcggcttaagacaattctaattttaactgttctttaacataattcattaaatccattaaaatgttgacattttgcttgttttttgtttttttctaattacattaggttaaatttataagttttaacttcaaaattttgtggtcagaaaagttagcatactatagtaaattaaaactgatataatggttacatttacattaaatcttaacatgatcaatagtttaataaattaacatttggtctataattttcgatatactgtatgtcttttctttattgtcaatttgtccacactgctagttttgccgggaatagtttactaattaagctattgacacttggtcatattctttattttctatatctattaatttttgtattatttttcaattaaagattaaatctggcactgaaaacaaaaatctatcatctctttatatatattacaatcattcagtacaattaataacaaaattcagcaatattttattttattaatcaatcattcaatcgttgcaatcaaacagaatttttttttaatcattgattcactgatttgtgattagtgaaaatacggtttgagaagaaacgaccatgatccactgcgaacgtaactggtcctctgtgatcttgccacgtagcctgactcagatggttctaatagatcaatggttaaagtgggagaagaagaacacgacaacccctatatgtcagttcgacacttgtacgtcgtcatttatagccttggattattggtccgtgtcatagacgaaactgcaaatctttatgtttttgtttttcttcagtactagagtgtactcttttggtaaactacgtatagaagataaataagtatgtcatactttagttataaatactgaaaaataaataagtatgtcatactttagttataaatactgaaaattatccatgactcaaaactaggtaataataactaaaataactctcattaacgatggataattagactaacacaaattttgtgtaaaaaaaccaattgaccctacatgtcgatatttaatgttttaatgataaatataataactgctctaataagtctgtcatcacaaggaaaaaaaactgtcatcactgtaaatattattatagcaaaaaaatatgaaaaaaaaaacataattgatttttgaaattatagaattttttatatatttgggttgactatgtatatttaaggtatagtttttaggtgtaaggtttagtgtttaggatgtagaaattagttttgaatattaaatttagttttagatttgtggtatttttgaaaaataaaattcattatagtatttttttggaaaaactcattttagtggtatttaaaagaatttctaaaaacaattgacaaaaaaaatttaaatctgtcataatatgattttccaaataaaaaaactgttacaatagttagtattactctatcaaaaaatcacggaaaaaaaaaattataaatcgatcaccataaggatttcaattataaatctgtcgtaacataaaacatttttaaggccattccagcaatttattttattctttattaaacctgccatcaaaccacagatttatggtaatagaaatttatctatcacaacttaaaacaactctgtcataacacaaaatattatattttagaaaacaaatctgccatcaaacgacagatattgtgtaaaattacaagaatctgttataacataaaacaagtctgtcataacatttaaaaaaattggttatcgttagacgtcattctagtaattaattttttgacaacaaatctgttacaatgtgacagattgttttaacaaaattataaatctcccatcacttaacgtaaaaaaaacatctacaaaaaaataagtctgtcaaaatatatgaaagtctatggttgaataaactaaaaatcagtcaatcaaattaaatctgctataatttataaatctgttatcactatcttctaagaagtctgtcaaccaaaaaagtctgccataaaaaatctgtcgcagttaaaaaagtctgcggaataagaataaatctgtcataactaaacgatagacttttgtaaaatgctggaatttttttaaagggtatttttgtatttattttatttttaacacataagaaaaaagtagtttagacaagaaaataaccaatttaaccccaatattttataagacattctaataattaatttcattatttgggttaatttagtttttttctcttataaatatcgtttcaagaactttttattttcttaatgtattgtttcaagaacttttttgaacaaaaaaagattagaaagtgacgaaagaacaataccatttaaattatttaatagttttattttacatatattgttaaatttttttagaagatacataattaattttttactaaaattcattaaaatgacattgtttttacatgaaaactatcttaaaaatctttcaagcaaaaattagaaactatcttaaaacaaaagttatttcaaaatctaagtgattgttgaaacataatttttatatattatagatcagaatatataaactacaatcacttagattttttaattatattgtgttagtatagtgactcgagaaatatttatttatgtgatatatggcaatagctgaaatttgtaaagatggatcatggatacatctattcttagacaatcatgtttcgtttgaaacaacattgtaaatgaactatgtgttgttgaaaacgagagttcgagtttgaatttcttggtacaatccgaaaatgctggaaattcatgtttcaactgaaaaaatggaggcatattacccatcacgccaattatataattcttgtcactcttattgacaaaacacttgtcttttctcgatcattattatatatttcaatcagtatgttcttgtggtagaaaacaactacacatgaccaaaaaaagaaaaacactattacatattttctttaatactttttaaaatacattctcataatctagcattggaatgaggacagtaaattagaacaaaaatttgaagtttttctttacattttctgcattttttaaaaacttattgaattttctgcaaaaataagtttgtctttgaatttgtagaaatttgaatgaaaatattaattatccttttctaagagaaccttttgtaaaaaaattatatattaggactaacatagcatatcttgttactacatcaaatatttggattccgctatttttttagtctaagagattgcactagtatttttttatttcttttataagtagaatgagatctctaaaaactagaaagtcactattttttgacggttgtgcaaaacaaaaacctttaaagtcgctagtttttgcaatttaatcttctaccttcaaaaaaggtagaataatcctataaattccaaaataatacttaataaaccttatacgtatattgtaaatgttttcacgatcacatatatttgattttaaaaattctaaaaatagagttgaactagtcgtctcaagatctttgatttgatatattaagaacttgacaatattagaaaaaacattatattgcatattattttgaatttatagaatttttaaacatgcatttttttggggatcaggggtaaatttgcaaaaattggctactttgaaaggtttttttttgtacaaaacttttttttaaaacaaaatttatttttgactattttaattgaatgtctaccatttaagtaagtgatgccgttccacaaaggggatcgccacaccaactctagacaagattaggagaaatgcaactatgatgcatgattcatcctatgtcaacttagagagatcatatgcaaaatggagagtgataagcttaaggattgaaagtatagtctgcattggagagtgaatgtcaagcactaattcaagctatgcaacattgctggattcttgaatctgttgaatcattttaccatttttagtaagttacctgttatctacaaagcctcgcatttattggtcggtgaaaaatgaatatgcctcgaatgattctctagagaataatggtgcatacatttttaatgaataattaatctctgtatattacacgtgtattattaagacgacgagaaataattgatttgattgtaattattaattgacatccaattattaattgatttgattgttcaactcgataattagttgcgaagtgttaggctcgatttcgtttcctgccttccaattttaggcaggttaattatctcaattttcatataattttgatgccaaaaagagaaacaaaacatatctttcaaagttgattaaaaacaaatctaacgtttgcgtaggataacactatttcaacagtccagattaagatgtttcatgttgactttgtagcccatatatcttgagctacttcaacagtcatatgtcatttaacaatcctgcaagttgcatcccattatctttcttccttcgactattgaccatgtcttcttgggatattttcaagctttctttttcaaaatgggaagacaaaattaatataaataaatttttatttgccaaagtcattgttttattttctgatttaaaatcatttttaatttcatttttcatagtcaaataacatagactagtcttcactttaaaaagcgagacggaaatagcttaaagtttaaacacaaaagtaaaatttattacaaatgtttttttcccctaaaaacacttaaaatctatagaatattgtatgctcataacataaattagaaattacgagaaaataaacaactaataaaaaacaaaacaaaaaaaaaagttttaccaaaaaaaaacaactaaaaaaatctttattcgtgtaccaaaaaaatgaagaacaaaactttattctaacttctaagtttttttttaaattaaaccaaaaaaaaaaacgtctaagtttttgaacaaaagaaaatgatttctttaactaatgcaaatcagattaatgtaagaagatgtaaatttcaaaacgatccatagtaagaaaaagtttatactttacacattgttacataaatgatttttttggtttaaccggttaccggtatgatggagatggcttttaaaaggaaacaataaataattggccaaccgaagcatttgactttgtgatgtaccggttcaagaatctgattcggtcgtgtcatacaaactctctttgaaaaggcctaataaagcccaatattaattataagacttcaaagtgggccaatagcatttaatttaatatcccaacaaattgtacaatagaaaaaaagtttcgccgccagccaaaactgatattttaatcacagacgtcaaaaaaaaataaacggcggagattcaattcaagctctagatggcacgtgatagtatctccctctgcacgtgcatctgtagatgacgctacatgattcggcgactgagcattcgaaactaatcatcacacgtttacacggcgaacatgcgccacacgcgtatgaacaatccggtaagcttgatcctgttgggtacatttccatttctacccctccgtttttgcttatttccttcttcaccacattacaacaagaaaacaattaattgacaatgacttcttttataaagaaaaaattaaaaattaattaaaagaaaaaatcaaatgcagttgttattattaaaaaaatatttttatatattaaaatatggtatttttgcacataaattaaaatgagagaagtgcaccgtgggagacaggacctaccttgtggtgcgtttgagcttgttctatatcggcgtttttcttttctccgccattgaccgtgttttctacattaaaaagtataaaatgttaatatatgaaaatcattaccaagtaaaatataaactataaccaaaagatattgatgtgacggacttagtggcggcgtgcgaatggagttaacgaccaaagaacacgcggcgaagactaggacgaggcaaaacatatacttgcgtacaaacttcgtcatgtttataatctttttttttaacaagaagaaactttctggttgaggcagaggttttaaagagaagtttctagaaatgataggaagcaagtactacgtgtgttatgtgttgtgtgtgaagtattaaaggtgggataagtgagatatgtgtatatatagttgaggaaaaggtgagaaagaattggttatgtgtttatgatttatgataataaatgatgaaaagaggcacacatgttgaagggtcacatgattctcgtcgattttctgagaaaaaatcattatgatttattcttttagttaccaatgaacatgttcgcgggctatgaatatttttgaatatgagaaactgttcacatgtacgtagcaataaagcctgagatatggttgtgacttgtgtgcatgttttcatgttcagtcagtggatatataatatgaagatctcatcaatcatattataaaccatggatgaaaatgtttaactagaagactatatttcactacaaatcatagttcaacataaaactaaaaaaaaaattagttgagcatcgatttatgaccaatacatcatagtttatataaaaaaatatgaccagtaaatcatatatatatatattaatatacacaaagttctaccgctaaaagaccaagaagcccatcgatcatattgtacacaaggatgaacgaatgtataattacaaaagtcgaagcattaaatatgtaagtgttagtggtatcatgaatatagagagaagttttatacgtaaagatatggtatataatatatggcgtgggaccaaaaaaggagttactataagggaatagttaataattgtagtcataaggttcacaatgggagagagagcagagaacttacagaagcagccaaaaagtgttcagacatcttgaaaataacctgtcacacaaacgtgaaccttgcccttggttttaatgaccttttcccaaagcaccaaataatgagcttagcatatttttcagttcttttttgtaacgaagaaattccatgttttattgatagatgattcctagcgtaggcagaaatgttttctggtcacaaaaagattcctagcggttaaactagtcctttcttcttggttgatatttatataaaatctgagctccaacaaatatgatgattaatatgtgttttggtctagaaaacatttttatgtgtttcgaaggtctaagaagaaagaaatgttggtcaagactatttcagaatttttttcttattttttgagtacttcgttgataatttaagatatgtccaacaaaaatggtagtctatagcaggctatccatatccattaacacattccaatttttaataatgtctattttgatattagataaatggagttcatgtccactaaaactcatgtctattaacgttcatgtcattaaagtttatgttcaaatgggatgttcaatgggcatatcagaaccaaatttgaacataatagtttttggttcatattttaatcaatacataagtcaaaagtcttatactttgaaatatatctaaaaacaaatttgaacacaattcaacaaagtatcaaatctaaaagcaattaaatgcaaatttaaacttcttatatttctcccttgccatctttgtcttcattaaataactcaatatgatcatctaagtacaacaaaaaaacatatttacatttaaattcaaattgattgaaatatgacaaaagaaaatatgtcaaatagccaattcctcgcgcatatcaaagcttaaacgttagtagggaaggagacaactctgatacttgtttaagacccgacttcctatgctgaatgaagacttttgaagctacaattttagacaactccttgaaccgatttgcattatttctccaatatgcaaaatatccatgctcttaaatgctatcatgtccaaaaccagctcattcaaatatttgtctaatgctgactatccattagccccagccgtttgagaaatgaaagcataaaactcttccattgtgaaagttaagagaaccatcaatacacataaaccataaacgattcaaaccactacatcaaaacatagaaagtttttaatagagggttaaagatggaaacttacaccatatcctagaagaatgttttgtcaaactatggtttttgaagttctaattgcaatttcctttggattctttataaacttcaaaaagcttcttcagcttcttacgcacatgttcaatcttaaatttactaatggaagcatcaagtgtatcgaagcaatattgtaacatagagaacttcaatcttggatcaaacactgctgcaatgacaatgatatcactgtattcactccaatatttgtcaaacttctcttgcataccaacaaccatgatacagaacttcatcatcagattcttcatggcttttaaccacatttcaatatgccatacttgcatgaagtataaattagatgttggataagatgatctagagatcaaattcgtcatctctacaaatgggtcaagaactcatgaattaactcagctctttcccattcttcaattggtggacaactcttaatctaatctttggcttacttcacttgttctctagaccaaacctgtgatagttaggatgtttcttagttcaaaacatgcttatgttatctatttaatgtattgtaatatgtccctatgattctatgaaaaatattctacttgctggtgggttgtaattgtgttgatattctactaaatcagtaatagattatgacctatgttacaacacaagttgatttttttttaagattcaaattatataagcttatatttaaaataagtgatgctattgaagtagaaaaaaatacaaatatatatcttatcttgtcaaatatttgttttagatagattatttaatgttgtatagtaatgtattttattaagtctttcataatatgacccacatgtttaattaataggtaaagagaaattaatttgttcttgatttttgtttttgtaatggcaatcaaatgtaatagaaaaaggagtaatgttctttcttgtcggtaatattatgtgataaatctttcataatacgagagtaaaaggataaaagtttgtagtaatatataactataagaggataaaactatgttggtaaaagtaaattagcaaaatttgatatttaatttgcaatatttgcacaaaaaatgttacttactttctttttatacttattcgttttgaatcaattatattgttacgatttttcatagagaatgagatcaaaataaccaaacacacaagttattcaaatataaatgtaaagtttaaacccatgtatatttatatttgaactaactcatgtttgagaggaatataatagtactagataaggctcgcctaaatagacggtgtaagatataaatttattcaaatatttatcgataatatttaaattttgattagtaaataaggatccacacaatatttctaatatttaatttagtaatttttgtattaaataaaatttcaatcacacacattcaattttaatatacattttaactatctattacatcataataaactgaaatttagttctatacactccatctgattgatgatatttgaactttaaatagtaactcatatactcttcggtatttaatttagtatttctttaaaccaaatttcaatcttacacgattttgcaatacaatttaaatatcataatacaaatacaatttaatttgatcgtatagaatttaaatacaattcaattttgcaatacaaatacaatttaattctgtatactccatcttattgttagtttcctatttacacatgttaacatctgaacgatagacttgacacgtgtcacgatcaagtgagttactaaatttgaaaaccatacattacatagtaagatacttgctattaatgcagttttgatcctagctaggttgaagtttactttcctgtttttgactgcatatatgatttatcagaaaaaacttaaatacagcgacaaaccttgttttcttgtgcatattcgtagtcagatgtgaaaagagagagacatgctgtgaccggtcccgatttcaccatattaatcatcttctatatgtcattagtcgcgcacaaacacatattgggaaacttctcaatagttgtacttgtatgccttttttactatgcaacatcacgatccatctctatcttctaggtcctcccttggaatctcattgctctacatatattcattttctagagttgatatctaattgggaaaatcacaatcttcacactccaactttagggggagtattgagatatgtataattatattagaattagaaaaatgttgaattaaatcacttaaactgtatcacaaaactgagtgatattatattaaattacttatttataaatgaagtaaatatttatcacttagcatcaattatattaactaatgtcataactaattaattttacttcaattaaataaaactgattcaatttctattagtttgtatcacttttctaaaaatgatataaaatataagtttacatttttagacgccgccagtggatggaaggaagccagccccctacttatcttctcttagatagtagtcaatcagtcctatataatgccaccttctcactctgatattctggatcatgctacaagatgtatcagagccgaacctagataagtgtgaagtcaagaaggcttgcaccatcgggggttacggtcttggtgtgcaacgaggatgttgcgatctgttagtgggggtgaattgtaacactccggtttcatgaatatggtggtgcatgaagagaggtttaaaagaattgatttgaccacctatgtcactaaagtgcacttatcttttcggtcagtggtcctgaaagaactccacagttaagcgtgtttggactgcagtagtttcaggatgagtgaccttccaggaagtgattatcggaaccatgtgagtgaggacaaagcatatgaaaagatcatgtggtgacttgtagggtcggtaacaattctttaaagcctccgggacgtggcgcaccaaccatcggataggggtgggcccatgggcccgagtgaagacatggggcccactagtagggacggtcggagcgttacactacttgtcaacaatgtggcatatctgacgaaacggtcaaccattgtctatttacatgtccatttgccgtattaacatagagacattcaaacatatcattatcctcttcacaacttttgttagaggatattcaagaaatcttgtcaaatattttgaatctccatcttaacactggtatttcaaaagaaagtaatttgttaccaattcggcttctttgacaaatttggcgagaaagaaataacctcgttttcaacaaaatcagaactagtccaacaaaggtaattaaaagcaaaggcagatgttcaagaatggttagaattaaatgagaacacacacttttctcacacacatactcacccaccgaagatgacaacaatgtcttggcaacgaccacattttgctttacattttgcataccttaaatataattttgatgctaagtttgatgtcaacactaaccaagtaaatggtggctgggttatccgtgatcatgaaggaacttctaaagcatggggttcgtcattgttgaaactcacaacatcaccactagaggcggaaacacaagcactactatgttcattgcgacaaacatggatttgaggtttcaccaatgtatactttgaaagggactgcaaaatcttaattgacatcatcaacaatggatcagcagacgcatctattaccagcatctacgcctatatcaagtattggtcggctaaatttaaataagtttgtttctctcatgtaaatcgttgttgtaaccaagtagctcataatcttgctaaatatgggaatattgacactagtttttattttgagagcctaaatcgtcttctttggattgtaaacactttgtatgatgatctttcaaattaatataaattcttttgacgaaaagcataatagacaactattatatatataaaaatatttagctttcatattaattaatgaaattacataatacttttttaaaaaaataattgaaaatcatcaacattgattatttataattgataaaaatactcaacatcacttattataactgttgcaaatattaacatcattttgataaactgatgcaatactaacatcacttaaaaagatagcatcattttttgtaactgactcaaattaacatcagttacaacaagcgatgcaaatattatgtataactgcaccagttgttaacgaagtaatgtaaattatttgcatcaataatatataaatcatttacttaagtgatataaaattcgtttatatcaattataagtaatacaaatattcaaaacaaatgatataaaatgacttcttttttgtattgtacattctattgtgataaagtttatgcctatctcgtgatcgagattgtgattttagggatatccaaaatcaactaaataatatcttttatttagcggatatgaaaaataaattttatgatcgctgatcttgcgattggtcgttgaaccagcgataaccaaacaaacaacttttgattgatgtcgtttctgtcaccagcgccgatgaaaaccatagtctaaggctagatataaagactccagagcacattcagaaaagcttatccagtctacctactaatgtattggtttttatagcaaattgttttgtgactttagcagatgtagagtccaatagcgtaggcccatatctgagcccattttccaccgacgtggtttagttgctaactaacttcacttgagatttggatttgacttattggtaaaccaatcaaaacgcatcgtttctcttccgattttgttttttttttcttaaacgaaacataaccagagaaaaaatccttcgttgagaagcaataaagatctttgtaatcttctctgttccaaagcttcgcgatcgatcttcagtgatcatcaaatcgtaaccagtaaaaaatcgatcatgtcgatgctcgattccttcttcaataagggtttcaaagctgcaaaatggtattatcctctctgaatttcatctcttatgattttgccaaaattatcaatctagaaactttgacgaagattctgattatcaatcatgtgttgtgtggtttttatacacagcaaaaccttgctcaagttaacgatccctaggattaagctaatcaggaatagaagagaagcacagattaaacaaatgcgtcgtgaaattgcaaagcttctcgagactggtcaagaagctactgctcgaattcgggtttgttttttaatccatggccttattagtttaatttggaacattgtttgactctttggttatctttactaggttgagcatattataagggaagagaagatgatggctgctcaagagatccttgagctcttctgtgaactcattgctgttcgtcttccgattattgaggcacaaaggttttaactttttgaaatctttggtctgcccattattgttgttcacttatttaggttttctgtgagaattatttgaattattgaggcatcaaggttataactttttgaaatctttgatctgcccattgatgttgttcagttgttagttcttaggatgatagtttggaatttgtttgtgtaaacataaatactatgtttattgtctgtttctgagtcttctgttcaatcattgttgttgtgcttctgaatccttgcttttgaaattttgtagggaatgtcctttggatctaaaagaagcgatatcaagtgtatgttttgctgcgccgaggtgctctgacttgacagagctgcagcaggttcagatactgtttgtatctaagtatggaaaggaatttgttgcagctgcatctgagctcaagccggattctggtgtcaatcgtaaggtaatatcagagttcattggtggtataacttaaaacagattgatgtatgcaacttatatcagattgatgtatgcagctgtattacatgtccatttgtagaactagttttcactggcattttttatttatcttgcagactgaatcgctgatattcattgcatggttcagtctagtagaaacaagagatttgttcatgtttttgtatttttccaattcaattttacagttggtggagttgctgtctgtacgtgcaccttctccagaaactaaactgaaacttctcaaggaaattgcagaagaacatgaacttgattgggaccctgcttctacagaaactgatctcttcaaatctcatgaagatctccttgtcagtactcctgtcttcgcatttctttattatctcttctctgcttagtgcttacatataatgggtttggtcagaatatgttaggtgctttatttctgtttgcatcaaactgagtatgtaccgttgggtgtgcataataatggacccccatggttttttctgtggcatagatctttttcccttcttggacctctgtgtccagatatccacggccttaagtttcatttggccccagtctctctatttttttctaaatttctttattttcaggatggaccaaaacaatttggtgggggatctaagctgccgttaccagaggaacaaaatgaaaagacaaatttaacatctctttcagcggcaaaggagaaatctgattctgactcagagtatgatatattggactttcccgaggttccaaatgtcttgctgcgaccaactcctggtgctacctctgtaaatgcaccggatgcagcgaaatcagccagttatgaacatacctctcacgacttgccctttgattcagagaatgcaggagtcgaaaaaacggcttccaaaagagatgaacatcctgcaaaagcaagcaaaactgtcgtggaaggccaacaatcttcacccattctgatggaatctttcgaaaagaagaattactctccgccatccattgatgcagtagggcccatccctacaaaagagagtggtgcttccagagatactccaaggaaaatatccgatggagacttgcaggatgtcttaatggctgctcaagctgctgctgactcagcagaacgtgcagcatcagctgcccgctcagctgcaagcctggcacaactcagaatcaacgagcttaccaggaagacttctgatcagtatccagaaagtccgtctgagaaccctttccatgctccctcaatgggaaaccttcaatttgatcatcagaattcttcggccagcagtagcggagatcttacagagctccagagagcagaaacttcgtcacttttcaactctgagcagaacaaccaacagccacagacacactcttcaatggaaaaaccgcagtttgatcgtcagaactcatcattcagtagctatggcgatcttaccccacagagattccattcaatggaaaaaccacagtttgatcatcagaactcatcaggcagcaactatgacgatcttacaccacagagattctcgtcattggagaaaccgcagtttgatcatcagaactcatcaggcagcaactatgacgatcttacaccacatagattcccgtcaatggagaaaccgcagtttgatcatcagaactcatcagtcagcagctatggcgatctgccagagctccaaaggccagagacttcaccacttgacagactcagccctgaccaggaccatcagcaaatgagactgccttcaatggaagatgatccctattactcataccctaatctcttcacatcgcagaagcatgatccctcatctggctctcattcgttctcagacaatacaagacccgcccatgattcgtgattcttacctgcatatgttataatgcaagcttggtgtttttcagtgtgtttcacttgtgctgttccttctcttgcggaacaaagagctcaaaatgttttttggaatagccttttcttcctctttatccagtggaagacatatgtaatgtatagaacttggtgtttgtgattatgtttaatttaaaggccttggttttcacaagaaatgaatgaagaatgctgatagatggaataagatttgattagagactacattatttttctaccaaagaaataaagaatacagagaagtgattctcttaatatttctctgttctttctcttttctgttaggcaaattacaatgtcgtttatcttggaccagacaactccatagcatgaagattatcagtcgaatcaaggatccagtcagaggtggggtgagaagagagctccacttcttgcctgagaacttccactttctgccactcgtcccatttctccgctaaaccgtcaccttcaagcattcgaacaacctcagacatcttaggtcgttccataggtgagctctgtgtgcagagaagagccacttgtatgagctgttctacttctgcttctgtgtaattgctttgcaggtcaggatccacaagcatctccagcttcttctccttcaaaagccctttcacctgagaagaccaaatgaacagataaatcagctttttgagagatagccagatatgtgctaaaagatctgtgttatacccaatctaggagcataacgtcatcgtcattcgccagtcttgcaagatcaaaagctctctgacctgtaatcagttccaaaagcatgatcccgtagccaaaaacatcagttttctctgaagattttccagttgagagatactcaggagcaatgtgtccaatagtcccacgcacagccgttgtgacatgagtatctttatagtccataagtctagctaacccgaaatcacctaccaccgcctcaaattcctcgtccaacagaatattagcagctttcacatcacggtgaataattttggggtcgcaatgatcatgaagataagacaaacccctcgctgatcctagcgcgatttgctgtcttattgaccaggctagaggcaactgtgatggtggacgttctgtaatcatttcaagaaagctcactcaattgtattggaaagttttaaaaatggataagatcaaaaacaacacttatacatcattgtgggagtctttctactttatgatacaaacagttaaaattccaaggttacctctcaaacaggaagcgacacttccattagccatgtaaggataaacaagcaatctctcggtaggggtcatacagaaaccgcgtagcctgaggagatttctgtgaacggccatgcttatcatctccacttctgtctgaaactggagctcgccacctggggttcgctcttctttaagccgtttgactgcaacaagtgttccatcagcaagacggcctttgtagacttttccgaacccacctcggcccaaaatgttcttgttgctgaagctatcagttgctacttgaagttcccgtagagagaaccgcttaagctgccccaagtgaacctcagggtcctcttcggctgcatcacagaactgaaaaattaagtactaaatactaatccaattctgaaatgaaacaaagcttggatattgcagactcagtgacttaccaggaacatcaaagaagaattcttgaggttttcttctacgccaccaagcaaaagctaaagcaggggcagcaaatagtaaagcagcaccagcagcaactcctcccgcaatggctccagtagcactatacccaccttaaattttatttttaccaaaatagttaactaccagtgaagttgatcacaagcttcttaaactgtgagatagacttttttccagtcaaaatccagtaaaaaactctataacaaccatccaatatgtttttccaagcatgagtgaaggtaaaagatctaaattttactgtctgcttcatttcattacctggtgtaggaactatgggaggtggtataaaaggtggtggaggagaaaacgggggagatccaggacaaggacggctagtaactgggccgcatagatccaagttgttagcaaaactgtgcagaagaacaatggtcaactgctgataatttccatatccaccaattaaagtaatagaatttggaaaatgtagtatgtctattgagtaaatttacttaagagttaagatgatcaaaagaaacttaggttcagactttaaattttattgccacttgtgcttaatcttaacttatagcctcagttcccataatgcgagtaactaatgtttgcatagtatggattcaatcaaacctgatgggagtgaagagcgagaaggaaccattatcaggaacagatccggataatcggttgttcgacagatccctgcagtttgcaagataataaggaaaactcaggtgatccattaagagtgagaagttcagaagagcagaaagtaaaattgaaaagtaatactcacaaaacttgaagggtcatgatattagtcaatgacatgggaattggtccggtgagactgttattgttgagccgactatccttgcaacaaaaactcagaccacattaccatcttcccataccagagttcaatcaaacaagtttattcagtgttttgaaagacaaagccaatttcttttacttctattcaaatgtccaacaagtaataacatttagccaaaagagaatttaatcctcagtaaatttctaatatagcaaaacatttagccagtgcatgatgagaagagcagactaagtgttcttacagaaagcgaagcttgaatagctttcctagagaatctggaattggaccagtgaagctgttcaagtaaagatccaagctcactaagtttgtcagattcccaagatcgcttggaaccggcccggttatgttattactataaagctccctgccattaagagtatcacaccctcagaagaaaattaacaatgtacaatgacaaatgggtattgaataagtcctaataaaatgaaaaaacaagattcagtgtaatcgccatattcgcctatatcatgtatgagaaactacaagtctctagaaataaagtagttatgctacacatagtcaatgccatcaacttttcgtttatctacagagtaacgattcatcttccatttagatatcaaagcaaaaacttacaagtactgcaagttcttgagctgacctagctgaggaaccaactgaccagacaagtctgcattcccaagatcgctgaagaagcaacaacaaacagagattaaataagctaaacaaagaacattggtcaggtcaggtataagcagagagacactcacactcttataacactgttctcgttgttacacgttacgtgaaaccaagtacacggattaacaagcgtaggatcccagctttgcaagacattatttggatcaactagattagctctcaaactgtgcagtgcatcacctgttaatataccaaacaaaagcctaagcctttcgcaaagaggaaatacttaccaaacaaatcaaacatgaaacaaccaaacagtttgcattgaatacttcttcagttcctcattcttaatgtgtttgctagtgacataaatacagtttcttttacatgtcgttatcagagaaatagcattgaatcaaacagtaaatcaattgtgatttttctaaaggagcctaaccatagattatgaacaaaattctctatagaaattgaagctttcaaacagaatcagattcttaaaaagtcctttttgaagaacagagacagtgccagatggaaatttcaattctcatgtaccaactaaaacaggcaaaagtagtcacataaataataaagaaagataagagaagagtaacaaaccttccatgttagaagaggcaagccataacgaattaaacagaagaagcagtgagattaagcagacaaaaccaaaagcttcaaacttttttctccccatttaccaaaaaaaagcaaatttctcctcccagatcctccaagagggtaaaaaaaaaaaaacttgagaaatcaaacacaaaccatgatctctccaaagttgagagctttgagatagagatagagaaagagagagagaagtttacacttgatgatgattttactctcattaatgacaaccgagaaaaatgccaaaggggaaacacaagtggtaacagctacaaacagagaagtgaaaaaggtgtgagatttttcaaaactttgcgttgctttttcagagcaaaaaaggtttttgggactttctttctcattcttaatgaatgagtttttgtgttctgtggttatctttcaacagccgtctctctctctctctctctaaaagcctactctactcactagtcactacaaaagtgatgggctcaagtttagtctctctctctcttaaattcttaatggagcgtgattggtaccagtggagagagagaggaagagagaaacaacaaaacgctacctttgaaatcttaagtacaatcacattttttttgttttaaatcttttctttctttgtcaacttgtaaattattatcacaattcacaacttatggaaaagagaaaattagatacacaacttttgtttacaaaaaaggaatagaaactttatttacaatttcttggcaaaactccatgtttatagacaaaaaagtaatttttgtttatttgttttggtagctcattatttaatttaatttgcttcttttaatttttaatcgaataacttacaaaaaaaattcatactgtgttattgttctttacggatatatattataactagattttaacccgcagtatactgcggagacaaattattttttaaaattaatatatataaaagtttgcaaattatatctatctataaaacatttttattttatagtttacaattgttattaagtaaagttcttccaaacccgtcttgccaaacccgttccgtaaaaaaacctgtagtacaccgctaatttaaataaatattttacgggattgcaattgtattttagtttgtcaaacaaatttttgttttaaatagttgccgaaatctagttcaaattttggagaaataagatttagtgaattgtaaaaaatgtatttaggtgcgttttgctcattttaagggattgcaattgtattttagtttgtcaaacattttttgttttaaatagttgccaaaatctagtttaaattttggagaaatctgcgtgatatataggattgaaatatatttcgaatgtttttcgtttgttaatcaatttattaccaaaaaaaaaaacccaataattaaaagccaatggcaaccaatgtaaataagtatacataaatggctgcaaaaatgtatatgtagataagttttcaaaattgttaactcacgtgaacacaacacataccaatatttgtcgaacaaatattgacatgtgtgttttttcttctttaaaaattcaaaaaactaaaaaaaaacatagttacaaatactaatttataattctacatcaaaataatttgaacttttatttttggtcaattatgtactcattctctggattcttgtaaataaacgtataatctaaacttctgaatcataaaccataggaaaaaggaaaacaaaaacaaaattaatccaaggtggctgctatataagaaaggtgcagagattgtgaattcaacaaaacagtagctagtattgtcgatgaacttatattgtcttatgagcagagatttttgtttggacacctgaagatgtcacatcggagaaagaagtcacataatgccaaagtttaccagccatagtcactacctctgctattaaagctggaggtatagatttacaagcaaaccccggtgccacattaaacacagcaaaactcgtgagtgacactgcaccaagtctttgaagctctatgcagtatatatccctagaatttcttggtgatggatgaaatgtattgatgaaatgcttgcagccatgcgccaaggagatctttaattgacctctccaccaacggacgccgagaagatatcatacataaacccctaattactacatctactaaaagcatcgacacaaacaaatctgatctaacttctgagctctttctcaccggccggagagaaacaccggttcaaggttattatcaatcgactctttcacagcatcaacaagcaactgcgtattccggctaaacctcatccaaaacccatccggtttagctcctctgtttttgatttctccaaccaaccgagcaaattccataaccatacacgcctcttgtgaaagctcagtcattactttatgttcactaacacaacctccaccacttgtagtaaacacagcctcggtttccatatacggtataacaaaatcatgaacacgaagactacctttcgtaccgatcgcagttatctccatcgtcaaattcgccaagaaagaacagtaaatcgttgcattgaccccatcttcccaatcaaacaacgcaccacaagaaagaacaatccccgcatcgtttaaaacagaaccggacaaagcagtaacggtcttcggaagtttaaagttgttaacaagaagaatcgcttggatcgtataccatccagcatcaccgagagctccaagtccatcaagaccaggctttacacgaatatcatgttttaagaaatcatcactcgcagcaaatgagaaacaactatacacctgcataagcataagaccatcgttctatactcaaaatttcaataaacatgattaagttactaatttaagtacttaaacacttacagatttaatctgaccaaaactctctaaatcattcacaaattctttaatcttatccgttctagggctatgcatccactgagttccatccataaattgaacaccattaacctcacaagcttcaacgatctgatcaaactcagctacgtttaaagcaacaggcttatcaaggagtatatgtttacccttaatagcggcgagtgtagcccactcgacgtggaggcgagtggggatagggaaatagacggcgtcgacgtcgggatcttctagaagtgactcgtaggagctgtggagttttgtattcggagggaaattgttggatttagcaaatgattttgcttcttcgatggagcttgtggtggctatggcggatatagtagcgtttggagagagatttatagctcgagagagtttgcggactttgtttgtgcagcttaagagtccgattcggatctggttatcaccggacattagctcgattttttcgacggtaacagaaaggagagagtaaagaagaagaagacttggtcacttaatttcctctttagtgttttcaatttttagtaaattttaagatgttgatattaagccttctgttttgggaataatttgtatagttaattgttgaaatatgtttgttactaaatctgccattattgaccacatttagtgttcttggaattttcaaagagagcgcaataacaagttgtttcaatttatattaatgtaaaaaagaagaaaaaacagatttttttccttacttatataaaatagaaaacaatcagatccgtaacaaacacctaataattcatttttttaactcgctaaacattatccgatgctaaaaatttcacataatttaattttaggggtcgacaccaacggaatattcaaaattgtaatattatttgttatccgatttgttttatccgaataattagtgttctgatttatatttgtttcgaaagtaaccgaatttttggatattctttaaaatctgaactatttgtcaaatattcaatttgttatgtatatattaaaaaataattataaaaattaataaaaattataaaaatcaaaaatttaatcccaaataaataatgattcactaaaaaaatatttaaataattaatttaatgaacataaactgagtgtgatatattcgaaggtgacaatagaagtgtggcagagtgtgtcaatggcaaagcccgaagttttgagttacacaacttgataagggagattcaatactggcagaagaaatttttcgaagccgaagtcacatgggtgcctagaacgtgtaataaagttgctgattgtttagtgaagactccattcccaaataatacttctttttctcttttctctttggttccattttttattgtataattcatccatgaggattacacttcatcactataataaagcctaaagtttgaagttaaaaaaaacaaaaaaaaaactgataaaacttacataaaaagtgttaaattattaatatatatgtatgtaattatctatatatatatatatatatatgttttgtgtataatagatcgaaacagatatccacttatttaaattttagtattagttatttgtttcacttttaacaaattttttattttttaatttgctttgtaaaactatagatatcccgatttttcgaattgaatcgaaccaaataacggatccgatcgaatcaaactaatattttgcccagccatacgacttatattgtagtcggcaactagtaacttcattaaagaatggcggcgcaaccgcctcagcgatcaataacagaggacgggtgatagataaaggtttaagctttctcttggaagctgccatgagtagaacagaggaaacttcggttggttgcgtcgtcggtatctgctctctagtttctcaagcttgcagattcctacggatcatactctctttcctcagtggcaacagttccacaaatcgggataacaatcaccgtcaacacgacacagatcaccggagctcagcctaaagtatctacaacttcaacagagatgaatacacgagtttgcttcacgattcacagtacctcttcaagatcatgctttgatgaaaccaaaaccagacagtctactttgtgaatattgaaacccagaagatatgcagaaaaaaaaacaaggacaatcgagaaggaaaagaaactcctttatcacgaattattgtactttactctttcaaactctgtacatattcaaagtttcatatattatagataggtcaataatcccatgaacactaatgtggatcatggtttcttcttctaacttaccagtagttaagagttcaagagaaccaccactagtctttcaagagaagacttctacctgagactcgaactgtggctaccaacacccagaagatggcacacaaagcacccacgattgataatagaagaaaacctctgtttctaatacccttctttgctatggtagtactcactggcgttccattagcctttccattgaacctcatacggctgaagctagacatacgtacaaaggttcggttaaggggaccctcacacgcagaggctggcgttgaaggtattgagtccattaatgcccacaaagccgatgagaactggcttgttgttccaccaccattttggatttcatggccttgggcattcacactcatagtaggattggtggaatcaggcatcacacctaagcaaatgaggattattcacaatgtatcagtggaaaggcttaggcttaaattcttacgttttaagagattaacaagggggtttgataatcgaggaataacaacagccccagtatcatatatatacatgtcttggtttaagtcaaagacaaacgcagaaaagaaaatcgtgcatagtggaaatagcttagcagacatcaaaaggtgaatgctccaagacaagcatgagtctaagtacctgatgagggtgaagcaaatgctccagaaaaggattgttgttgatcaaatagaatggcctgatcatcctcgaaccaaatatcgctagtgatttgattgagagttgtactaggatccatgatgttgttcagctggttctcgggagtctggtcctggaactgttgataaaggagttgctgtttttggtctgatgtgtagttagcagaatcactcagagaagacagatttgcagaagttccctgatcaataggttccatatccaaagacatggaaacgtcatggaacaattggtcaaactcattaaaatcgtcgaattcaccatggttcgagaactgtgcggctttctcagttgaagaagctccgaattcagggatcagaagaagatcatccatttcaatgaaatcttccttctcaaacaccagaggagctgaggtgacctcagcggtctctaatgagtcaaaacttgagggcctgttgtattgctgaccgtttggcaagaactctctagcagaattattcaccaacgtactctgcagctcttcttcactattcacctgcaagtacaatcatcaaattagtgagcaaatcacaaggaaaaaaacatgtgcaataaggcctaatccaatagatagatattaaaaccatctttcctcatttaaagagagaactaactgacctgaggaatacatctttgaggaacaccaggtgcattagggattccattgagaagctcatcgatatcctctaactgaagaataacaggattaaaaagtctcctctcatccacacgacgagcatcctcataacgaaccacaggttgctctggcacagctacagcaatagcattcacatcttcattatcatcatcaacccattcctcttcttgaaacggagcaccatactgttcaccattcttaggaccagccccacttttcttgaacaacttataaagagcatagtactcctgagggttcttacatctccctagttcatcttcatccatcgtatactcatgcatcacccaatcagtccgctcaccactaggagcccggcctctatagaaaacaagagtctttttaagtcccaccgatctagaattatactcaatgactcgatccttccctgtagccttccaatacccattttcagttcctctattagacctagctgcgtttggatacttcctactccttggagtgaaatagaaccactgtctatctcccgtcttcaacattgattgacctgtatcaatcgaaatacacaaaatgaaatcagttccagtataatgataacgaatttgatgtagtcatcaacaaccaaaactatatgatcaagaaacaatacaaatctaaacaaagcttaagctaatttgtaaacgagagacgaaatttaccaggcaattcctcaggatccattttgtaaacatcaacaacaccgataacattaactctaagcctcttcctacaaatcttcctcttcaaataatacatcacaagctcttcatcagttggatgaaatcgaaaccctggagcactaaatttgcctcctttgaaacacgaatcgggtgaagaatccgccatctacgtaacaaatcaaaaccgatccctcaaaaaaaatttgaaaatccccagcgacgaaaaaaaactgatcgggtcaacgagggagaaaaatctctctctcagaaaaactcagatctcttctctcttcgtcactcaagatccagaagagaagatgaatcaaacctacatgacagtgagaccaaccgccgggaatctgaacgaattgatacacctagggtttgatcggcgagagagagagataacgaaaatggaaattaacgagaaatgagactttgtgtagattgaggtgattttttggttggctatttgatggtctcagctttttctgctacttagtttgtgagaacctactgggctcgaaatatactagctcaggcccattaattcgacaggcccattattgttatttttttccaacattcttgtctgacacgacagaggttcaaaaattctgcttaatatgataagtgcaagcaaaatttcaaagccatcagagaatccaggaaaaaagaaatcttttgttaagaattaaactctttcaaactctatacataatcaaagatgtggatcaggctaacttatgctgaatcaagattcaagagtctaggtcacgacaagagaggtcttcccataactccaacggtggctttgaacacccagaagatagcacacaaagcacccataattgataacagaagaaaacctctgttactgatacgcttctttgctacagtgacttttctactagtcactgacgttccattgaacctgatgcggctgaagctagacatacgcacaaaggtctggttaagaggaccctcacaggcagaggctggtgttgatggtattgattccaataattcccacagagctgatgagaactggctccttgttccaccaccattttgtccttccttgtattggggatttacactcatagtgggattcatagactcaggcatcacacctaagtaagttggtattcacaaagtatcagtaaaaaaggccctaggttattatgtttcaagatcttaacaagagggtttgatatcaacaaaaagaaaacagagtataatatatacatgtcttggttaaattcaaaaactaatgcttcgtgggaaatataacttggcagacaacataagggaatgctctgagatgagggtgagtttaaagactttttaagtacctgttgactgtgaagtgaatgctccagaagaagattgtggtggttgaacatagagagcagcctgatcatctttaaaccacatattgtcagtgaactgattaagagtggtactaggatgcatgtagttattaagctggttctcaggtgtctggtactggaactgttcataaagtaattgctgtctttggcctgatgtgttattagtaaaattactcagacaagacagatctgtagaagttccctgaaaaacagatatgtcattgaacaattggtcgtattcattaacatcaccaaattcaccatggttcaagaactctgtggatttctctgttgaagaagcaccgagctcagggatcagaagatcattcatttcaatgtactcctccttctcattatctagaagaggtgccataccagaggtagcctcaaatgaattcaaatgggactgaaaactcgagtccctgttgtatagctggccatttggcaagaacattccattcgtccgagggtcaatatactctccagaagaattattcagcaatgtgctctgtatcacttctgcactattaccctgcaaatacaagtatctatttagtgaaggaagcacaacagaataaccaaaggacccaaaaaagaaagaaagcataagccaatatgttattagagaagaaactaacctgtggaacaccaacaaactcatcaaactgtctttggttaaccccgggtgcatctgggatttcattgagaagcttctcaatatcctctaactgaagtttgacaggattgcaaaatttagtatcatccacacaaggaccattctcataacggaccacgggataatccggtacagcgacactatctgcatcttcactatcactatcaacccattcttcttcttggaacggagcaccatactgttcaccattcttaggaccagccccactcttcttataaagcttataaagagcataatactcctgaaggtaagacagattagttaaactacaaataaatcaaaaagagaaacagatgagttttggctataatactaaccttagcgttcttacatctccctagctcttcttcatccatagtgtactcatgcatcacccagtcagttctctcaccattaggagcacgacctctatagaaaacaagagtcttcttgagtccaacagatcttgaattgtactcaatgactcgatcctttcctgtcgccttccaataaccagttgcagtacctctacttgacctagctgcgttaggatacttcctattccttggagtgaaaaagaaccactgtctatctcccgtcttcaacatcgatagacctgttacattcaccgtgttagaaaaccaattccaacataaatttgatacttgcataacaaataaacaaattggaaacctaaacattgtgaaaatgaaatcatatgagcataaatgaggatcgatacgaattaaatagtgaataaagacgtttccttgtcatatactcaacaaatcatcaacaaccaaaacttttccttgtcatatactcaactacatcattaataacctaaactaattgatcacgatacgtagagaaaacatgaatcaaaatcgataagaaggtgttgaaaattaccaggcaattcagaaggatcgactttgtaaacatcaacgacaccaatggcattgactcgaagttttttacaacagatcttcctcttaagataataaaccacaagctcttcatcagtagggtgaaatcgaaaacctggagcactaaacttaccagctttgaaacacgaatcacgagaagaatcaaccatctcgatcggggtcaacgagaagtaaaccctttgaaacagaacacacaacctaaaaccctctttctctcttcgcctcttagtggagacaacaagatcaaacttacataacagtggaagaaattctagggttttttgatcggcggtagatagattttggatagagtcaaaaaaatgattttgtttgtgattatatgtgtcagcttttttctgactaacgaagtttccgagaatcttactgggcttttggaattacacgcccaaaggggccaaactgataaattttaatattcgttaatttgttgttgttacaaaggaactaaatgttgaatccaccactcactactatttttcaaacttacaataaaataatcgtataaaatcaaataaaataaattttgtagagtaaaaacttgtacaatataaatttgtagcatcaattcacttcaataaattttatgtgactgattacattttgtaagataacataatttactattacattattcataataacttaataatatttgatatattagttagtatttgataaaggtattgaaagtatataaatagtgcttagaagttatgaaagtcttaatattattgtagaaagtaacatatttttcattataagatttttttttttttttttacaattgttaatatattttccaaccgaaaaaattaaaaaatcccataatagagtgcaattcttgcagctcccatgaagagagtgaataatccaaagacgggaagagtaagctttgaagacgagatagctatataggaccgaatatcggcaaacgatctattcgattaatggaatgaacaacctatgcatatagaactttattcttattctaaacaaaaactaggagacaaacaaaaaaggacaaaaattacaagacatctaaacctaaatgtggcaaaaacatatggatttatttagttatgaagactcacaaatctataagatcaaggatgagaaaaaagaaaaatcgacatgtgaatcaacgttctctatgcagttgtagaagatgttttaattttcacctcttgtcatgtggaaaattctcgaaaaatccatgaagaactcgttcaattctccagagagcttttgtgagggattctgatcactggtaaacaacattagagaaggattcatcccaaaatgaggagttattcgacaactagtaataagcatccaagcaaacacgctaaaaaaaaattaatcttaattacaaacaatggaaaacaaaaagagaaataaacaacatcgtcgaaatcaaaagattctggacactaagaactaattaaaacaatagagaaattatcagattaagccaaaaagatagtagcatgaacaaagatagaatatatatagttatagatatatattaattcaatagaatcaatatttacgaggtttccactttccatctaatcgagtcaaaattaataataacctataaccctaattactttttgtaaaactcattaaacaactgttgggcttctttgaccgtggagttttagtaggttcttaatttcccaaaatacattaatttcttgcgtgtaatatggtagctttattatgtatatcttttggtgacttaataaggtcttaattctctataaatacatgcttattgtatacatcaactacacatcaaattaaaaaattactctgtgattggtagccggatctagagaaaaatagtctgcctggtattttaatccctaatttaaattttttcactcaaatcatatacgatttttaaaatagtttaatagtttgtagtaatttcttctcatttgtgatggaaagatataattttctattacaaaaattactttttatcttttatcctgtcaataagtgtactcttaacaaaaaaaaagattttgatgattttcttgctttatgattcacagaatatcgatctttgcaataagagctcatggaaaataatggagaaatgaatgcacagcctgaattatcaggcataagtaaagatttttttttatatatattttgtctgaacttattttatatattaaatatgaaacaaccatatattttgtttcgttttactagttgatataaccaagacttatatgtatgagaaattatggaacatatgtgctggacctttgtgtgttcttccgaaacctggagaaaaagtttattactttcctcaagggcacatcgagctcgtgagtctatatatatttcttttgttttgcttctcgatttggtttttgaaacattttgatggcacttttcagattgagaattc

SEQ ID NO: 72 - DNA, 88512 bp, Arabidopsis thaliana
gaattccttcttgcgtcgaatgcgtgtactccttctaagaggtggtggaggtggaagaacttgtgtaggttcttcatcttcacttgagtcatcttggatttcttgaacatgttcagagtgttcttgtgtgtttggaggatcttcttgcacgtgtgtaagattttcttgatgttgtagggacacctcctcattctcttgatttaagtcttcttgatcttgtgtcatctccggttgatgttgagttgtcgaagttgagtcattgcccaaatgatccaatagaaactttagagtttcaacacgatcggaggtggaatgagtaagatcttttaggttctcccaatccttcttgttgttgtagtcttggttttcaagaaacttgacatctcgggatataaatgtgcggttcttggttggatcaaagcatttatatcctttttgagtagttgagtagccaagaaacatacacttagtgctcttcgcatctagcttgcttctttgttctccgggtatcaaaacaaaacatacacaaccaaacactcgtaagtgatcaatgaacggtttagtattgttaagtacctcgaagggagataagtcacttaagactttagttggtgttcgattgataaggtagcacgcggttaagaccgcatcaccccaaaatctctttggaacacttgtatgaaacatcattgaccgcgccacctccatgagatgtcggttctttctctccgccactccattttgttgtggtgtgtacgggcaacttgtttggtgtattattccacgtttggctagatgatctcgaaacttttggcttgtgtattctcctccattatcggtcctaaacactttaatctttgcattaaattgattagtgacataggtttcaaagttagtgaaagcttcaaacactctatcttttgagggtaatagtgttatccaagtgtactttgatttctcattaataaatgtgacaaaatatttgttgttgtctctagaaacacatggtgaggtccaaacatccgaatgaactagatcaaaacatttctcatagatagtaagagatttaggaaaaaccgatttgcaatgtttaccaagaatacaagcctcacaacttgtatgatcaaaagaaatatttggtaacatgagtttaagagctctagtatgaggatgacctagcctagcatgccacaaagtattaaaagagatgcctaaatgtgacttagaggaaaaacagctagaagagtttggtgacaagtcttcaagaacatagagttctccttttgaaccaccttctccaataacttttcccgtctcaatatcctgaaaatacacatcattagggccaaaaatcgcataacaatttaagtctctagtggtccttttcacggataataagttagatgtgaacttaggcataaaaaaagcttttgaatctttgttaaacaatttcaagtttcctatcccttcaattggaactttgtcaccattagcaataataacatgtcctagagccggttctatgttatcaagaagattagagttactaatcatatgatgagaagcacccgagtctatcacaattgaaccactagatgtttgtgatgagaaagtgataccggattctttgagtgaaacaatggacttgatgagtgcttccaagtccgacttcctcacatagtctccgaatgatgtggatgtctctcctttcgatgacccggcttgactttgctcctcatgagtttcttgagagaaatgagctcttgagtctttgaacttggcgggcttgaggtgtggatgtagcaaccaacatttgtctttggtgtggcccttcttcttacaatgatcacaagtcaacagttttctatcctcattcttgtacacacctttgttcgccactacttctcctttgttagccgtgatgagttcactttttccaccaaatagcccggttgatccttgctctttctgaatcttagaacacacctcatcaagacttggtaacttctccgatctaagcaagtgtttaattaggtcattgtaccctggatttaaggtgagaaggagtccaaacaccttgtcttgctcacgcctttcgtggagaatcttcgggtcaagcgttcccggcctcaagctcttaagttcagaccataaggacctgaacttaccaaagtgtttagtaaactctaagtcttcttgacttagttcgttaatcgccttcttcacttcaaacacgcgggtcaaattcgattcgttcccatacacgtttttaagtgtatcccacaactcttttgctgtctcacagtaagagtatccctctagaatagaggtttcaagagagttttgaagaagagcaaggacggcttgatcctcttggaaccatttttcttcctcgggagatatagtctccgtttcttcttcttctttgtcttcttttggagcttgagatgagattacatggctccaaagcccacgaccacacaacaccgtttttgttgttcttgaccaagttaggtagtttcccccttgaagtatcaccgtagtaatcaccttttgagaagtctccatgattcaagcacaaacggactgatgaataaagctattatctgttggttaaaagagatgaagctagagaatgatgaagagatttggagaaaatgaagaatagaatgagaatagaagatttataagcataaagacatgatcttaagctctgataccatgaaagaatatgcggaattgtattaaagattaagagagttatgaagaacaagagagtttgtatgtgagagaatatgagaccaaatcatattgatagaattagatagtaacctttgtgtgtttacaatgcttttaaagacacacaaagagaatatggctgtttacaattaacgtaagactgaaagagacataagagaagaggttccttggtcttggtgatgagagtgactggtcattggttgaccttgttgctaaagacactcgtgagtcctcttcaacggctacaagagatatttgtgtgccttcacctcttctagaagctcttcatagacttctcatatgttcggcccactctcttgtagtacatatccaatactaggcctttcttatttgagtcttgatcaatactccccctcaagcgcaagacttatgcaagagtctaagcttggaacacatgattcatcacctcattaaaaaccttagtaaagaaaaccacatgggagaaaactttactaagggaaaaagagtgtgatgtccatggttagagaacatgagatcaagagtgagatagatccacaagtcctaatttgccatgtatgaagttgcaaactttgagacttgcggctttggtgaagatatctgccaattgatcttcacttcttgtataacacggtagtgtgactccttcgatgatcttctctcggactttatgacaatcgacttcaatatgcttggttctctcatgaaacaccgaatttgaggctatgtatattgctgccttgttgtcacaatgcatggtgataggcatgtgttgttcaatgccaagatctttaagaagagctttaagccaagtgagttcgttggtgagctttctcattgctctatactccgattctgcactcgaacatgagaccaccttctgtttctttgtcttccaagttgcaaggttacctccaatgaacgtacaataaccagttgtagatcttctatctcctctatcacccgcatagtccgcatcgcaatatcccactatctcggtgcttgagttctttcccatccatatgccttgtccggagctgcctttgagataccttagtattctctccaccatgttccaatgatacaccatcgggactttcatgtgttgactaacctgatttacagcaaaacaaatgtcaggtcttgtgtttgtcaaatagatcaacttacctacaagtttgcgatagagaggtgcatcgccaaacttctcatcttctttctccccctttcgattgaccttgtagccatcttcaagtggagtgcgagccggtttagcgtccataaaacctgtctcattcaacaagtcaagagtgtatttgcgttgtgatagaaagagtccagtcgacacacttcaattcctaggaagtatttgagttcaccaagatctttaatatcaaaacaagatttaagaaaagtcttggtagagtctataccgtctttgttgtctccggtgatgataagatcatcaacatagatgagaacaacgacaataccttgaggactttgtaatgtaaacaaagtgtgatcggactcggacttcttgaatccatgatctttaagagttcggctgagcttgtggtaccatgcacgtggagattgtttaagaccatagatagctttgcgtagtctcaacactttatcacatggaatggtatcttctagaccgggtggaggcgtcatatacacatcatcttcaagttcgccttggagaaatgcattcttgacatccatttgccatagtccacatgataaatttgttgctaaggcaagaaccactctcaccgtgtgtagcttagccaccggagcaaaagtctccatgtagtcggagccatatgtttgcgtgaacccccgagccaccaagcgagttttatatctctcgatatctccattactcttatacttgattgtgaatacccgccttgtcattatgccacgtgatttcatcacatgtcacttctctaacaactgccgccttatcattatgccacgtagcttaagtctaaaattatgcacttttaccttctttttttactaatttacagatgaaatctttatctaataaatcacaagttacttttctctaaaaactgcagccttatcattataccatgtgtcttaagtctaaaattatacattttcacctttttcactaatttaaggattaaaataaaaataaaacaaaaaattaattgactttttcaacaacggtttttttacttcaattttaatgttcgtgattttgagtatgttgttactttgaaagttactttgaaggtgatcatattactcatcgacttaagttaatccaaaggtgagcaatcaaccctactttagcaaatcccagtttattccttttttatcaattaattattatagccctctttaatcttctttgtggggattcaaaaatagaggaacatacatgttgtggccttgaatgggaactccaagcaatgagagttgcaacatattgcaagccgagtatgttagcaaagctacatatttgatcgaaactaccaaaatttcgaattcggcacaaaaatcttactctacttgaaggtaatctttcacaaaatttgttcatataatcattgttcttggttaaaatgttacacaatcttcttaatatgtcttcttttgtgtctttagtattgctgaaataacaaaattattctcacaagtaaaatacatcgttggaaattagtgtcaaggtatgtgtcttttttatttagacctttgagcatgaacgaactaattttttcacacatacagcttcatcgatttctttacaattatgactctacttcagtattggtaatcctctcactttttttattaatcaatctaagattctgtaacaattttaatttgtttgaaaagccacgaagtgatcaatatgttttgtttaaacacttccgtttcggattcatgtctagttttataaatctatgctcttgatgctagtcccaactaggaagatcgattggttctggagctgataccctggtttggaatgcaccatggatctctctctcatcatccgtaaccccaatgggtcctcctactcaagagacacaactcatgactgttaaggacttaatatgtcctatttccaagtcttggaatagagaaaagattgcaacttacctccctcaataccaatcagagatctttcagttcagaccaagtaggtttgttgctagggataaatttatctggcttcccacgaaatctggtgattatagcaccaaaacaggctactacgcagctaagactttgcggaatcttcatacacaagttccacctcaacctgtgacctcaattggaactcagagatatggaaaaagaaatgctccccgaaaattaagtttctcttattgaaagtattgaagaatgctttacccctaggtgccaacttgaaagctcgaggcatcaaccctacaactgcttgcccacattgtagtgcagaggaatcaggtcttcatctgtttttcctttgtctatttgctgcacagatctgggagcaagccccattcaaaaataccctttcgaccttcacttttaccaatcttcagatgggttttgaagcggctaaacatctgatttgcttaccactggtggaaattggctcaaaccctcttttcccctggattatttggacaatctggacctgcagaaacaagaaaatatttgagtagaaacatctatctagtcgggatgtcatatctcaagcaatttcggctgcaaaagaatggttattggctcagcctttacctcagggacaccagactctgctttcaagaccaattgtgccggaatttgaatcggatgcaatcttgtgtttcacagatgcagcgtggcgagaggattcacatgatgcgggattgggatggatttttgtagataactcaaatcactctgagatccaggatcacgcagtggcgagagaggtatcttcccctttaatggcgaaggcgatcgctctcttctctgccatccaacaggcgtcaaatcgaggattcaaaaaacttgttgtagcttctgactcgcagcagcttgtcgaagcaatcgtgggggagcttcatccaaaggagcttcaagggattctacatgacatcctttttatctctctcagtttcgctgatattagctttcattttgtcaagagagaaaacaatcgtaaggcagatgcagctgctaaagctgctttactcgcaatcaattctgtaccggtttaacatttaatgaaaaccagaattttcgacaaaaaaaaaaatgctcttgatgctctgttttctttacttatattctaaaataaacatttctaattattacatggtaaaaatgtgactacaaaacatcgaaggtacattgaaacatatattcacttgatgtttttcttctaccttgagaggattccaactctaagtacacttcaggacttagacaatcaccacatcaacaaattgtatacaagaattactctttcattgggaaataaaaacaaagcatgatatggtgggaaaaaaaactgtatataaagactttgcggaaaaactgtattgaagaagacttgaactctgcaaaagggagagatattatcgtattgtgcataaggaaccaaccgaattgtgtttataatgctaatttattaagaccattatggtcaaatataaacagtgtcgataacttaatatgtttcaatgctcatattaataaaaacataaaaaaaaaaacaatctcaaataacaattaactgtattgagtaaacaatataatttttaattaaagaaacactagtagtcaataatactctttcttcccacgtgttgaaatatccaaatattagttgttcatatagtaatattttttataaagaaaagacctaaaccaaaatcgaaatcaaaatcgtattgaagcaaaaattctgagtttactaaaaaaaaactccggtttattaaaaattctggtttagatttttttttttttctaattttgtcatgactttgtaagattttttttttttgcttaattgctttgttcctacgagcaataacccagtacccagcagcaaccacaacctcttcttcttcttcaatatctccctcaaataacagattccattaccgctgcataaatatctcttcagtaaagaaacatcattgattcaattcccagaaacatcaacctctcacctgtttccaatttgtcggcaacaacaacaaatttctattctgggttctgtgaatttcgtagggagagaaatagagatagagagagagagagcttctgggtattttttaatggagaaggagatcttgttgttgctattggtcatcatgtttttaaccgttgccgacgtcgacgccgttagggttccgttttgtgctacgaaatctgctaaagattcaatctttgggcttcgagatcagacttgttctgtttctggtgttgaatcagacgagcgtcctcgttttgttgctgtcaccgaggtaatttaaattagagctcggatttcaatttctagggtttctgcttgataaagaatctatctttcgtttcttatgaatgtcatcaaatgttggtgaagggtgatgagcgttggttgcaaatagcattggatatgattcataagaacaagtgtgattatgtggctttgcttttctatgcatcatggtgtccattctcaaggtcatttagaccgagtttcgatgttatctcttctctctattcctccattcctcattttgccattaaggaatcatccattaagcctaggtgataatctttaaactggtctcaaacgaattccttttggttctgttttggtgatgatcttttggttatttgttgtgctgcagcaccctttccaagtatggagttcatgggtttcccactctcttacttttgaattcgacaatgcgggcacgataccgaggaacccgaatgcttgattctcttgttgctttctacagtgatgttaccggtaaggcttcatatatctagtcttctgttctgtatttaccctgatgtggatagtgtttttgtagtgaggttaggcatttagtagatactaaagagttggttttgtgtgatggtagtagttgtttatgatcaatagctcaactagtggaactaacaaggaatgttatgagattgtaggcattgagacattggataaaacttctctcgagagaagcgtatcagttcctcatctcggtaacgaaaacaacacagagccagaaaactgtccattcacgtgggcaagatcgcctgagaatatgcttcgacaagagacctatctagctcttgccattgtattcgtcctgttgagattgcttcacttgatatatcctacactcgtcgtgtttatgaagttcacttggagacggattgctcagaacatgagactagaaagcctgctagaacataccgtcgggtttctaagccgagctgtacaattatgcatgcatagaagaagcaatctgcagggaggggctatgaacgctagagcatgggcctctaagtctttggccactgtctcaattggggattcaagctcatcaaacagaagaagttcatcttctcagtgacttcataattctataattttagcaaatatggtcacagctaaaatgtgtttggctgtatcatgtttctgttacagcttttcaggttaaagttttaccctttgtcctgtataatcagcagtgttcctctagaccaacaactttggagagggcttaattcatagctgaacattttgtagtagaagtgtatatgtcatcagatggcaaaattataaaagtcaaattcatatttttttgtcaatattatatcagaattggtctattgcttatcttgttttctcaagaaacttcacatctcacattgcataatcaaggcaattttacaaaatacatgagtcaaagacatgcaccaatctgtttggttaagtctctaaggccaaatcttcctctaatcattaagctctacaactgctacatcattcttaaggatctgcatttcacataataccaaatcttagtcaaagctgaaaatagatgattaaaatcaacaaagaagaagtatgttctttatgtagtacctgtgaaatgtaatcttttactttctcgctaacttgaggatctagcgctctctctgcaagatcgtaaaacaaagtactaccctcagggccacttactttctccttctgcaagaacctgtaaaaaggacgaaaccttttgagaagaactatgaaaaccacctcagtcgtttattccttgcagagttatgcacaaggttaacgaaaggtctcacctttgttggactaatgtctccagggtctgcttgttgttcccaaacacaggattatgctcatcattttcatgcaatcccattcgcttcaaatgatgccaaagggtttctaaggatgttgagaaacatatagatgcaagaaaaaagacgtcaacaaacaaattcttaaatcaagtgtgtgactatcatatactcttgatttcactctaaaaactaattcatcatagagactttaggatctgaaacaaatctacataatgtacttttgacttccactctacaactttgctctctaactatgattcccagaactgtgagaacactacatcgaaaccaaaaaagatcgtaagagatcgaattaatgtacttttgacttccactctacaactttgctatctaactacaactttaggttcttaaacaaatctatataatgtacttttgacttccactttacaactttgctctctaactatgattcccagaactatgagaacactacaccgaaaccaaaaaagatcgtacgagatcgaattaatgtacttttgacttccactctacaactttaggttcttaaacaaatctatattatgtacttgtgactaccactctacaactttgctctctaactatgattcccagaattgtgagaacactacaccgaaaccaaaaaagatcgtaagagatcgaattaatgtacttttgacttctactctacaactttgctctctaactacaactttaggttcttaaacaaatctctataatgtacttttgacttccactctaccactttgcatagaacattacatcgaaaccataaaaaagatcgtcgtaagagaccgagtaacagcataccttcagggattttaccacctgcaagctgcacaatggcaagaaccacaaacgtaaagccagtcacaggactcgtggtttcatccacaacatgtttcttaaacacttccaacggcaattcactaacaagcacatacgatttcgagtcaacagaacctaaaaattgaacgaaaacaaacatttagctatatcgccgagacgcggtgcagccgcttcttaataaacaaatgccaaaatcttactctgtgactgaggaagcctagattgaccagtagaagaagaacgagcacgttgaagttctttcaaatcataaccaaagacattagagagcttcttcttcgcttcgttaatcacgtgtgtagcgagatttcgttgacgatagttcttagtaacaatctgagtcaaatcttctcttttaattggagttcctgagctttggtgaaacttgaacagtatgaatctaatcacctctgaaactaacttatccgtttcctgcattcaaatcaaactcaaaaatcaatctcaataccaaatcatattcggaaatcaaaattccgataaattcccaaaattgaatctgttacctctttggatatatcgaattgagagagagaatcttcttcgtcggccattctgaaatcaaattcgcgtcaaattaaacacatgaatcgatgaatttcaatgttttagagagatttttacctggaagaaattgggaaggagagacgattaaaagcttcgtaaaccctaatttcatggtattatcaattggcgggagaaacgagacagtctctggttcattgagacggttttaagagtgggtacaagtgttattcgactccgtatttcggtttagattcggtttggtttttgtgttatagattttttggtttatataaataatggtatcaaactaaaatagataatttggttgaattttgattttgattttgttaaatccttatttcaacgaaattttgatttaagatctgactattattcttcagtttggtttaaattttgttcggttttttatatatattccatttattctttggagattaatgacttttttttgtcaacaattaatggtttttttgttccacgaaaaataaatgttctatttttttaatgcattcattattattttagaaattgtaaattccaaaaaaaaatatgtgaaaatatttaaatattatgaattgttattagttagtgtagaaaataatatatgcataattaaacattaataacttttttaacagacatatgtgattttttttttaaaaaaaatcattgtataaggtacaaaggaaaattatattaaaaacaattcattgaaagtgtggttccgtttttggattgaataattcggttcagatcagatcggtttatccggattgaacccctagttattattataaccaatgaaaaaacaaagaagcatggggcacaccaaacatctaaatccaacggttgagattcgttgttatcactatttgaggctctccactatctagagacttaatctcagccgttgatttgcttctcctgtcttaaaccaaaccgccaaaattctttttatatcgtgacagcagtttttgatcagaacaaaagtctcaattcgagagagaagagagaaaggagaagctatggagaacgagagagcgaagcaagtgtacttggcgaaactcaacgagcaagctgagagatacgatggtaaacaaaagaccgtacttgtttcttttatgtttgaaatttctaagtaatctcttaaaactctgttagatctgtcctttcatacttttgtctgaaaatgtattgactgtaaaaaatggttacttagaaatcaagtaaataaagagtttgtgaacgactttggattattggaatctctatatagtttttctttgtttccttgcgtaaaatcggagattattcgattattatttacgcgatgaaaaaggtttaaaatgtaaatttcttgatatacctcatagtttggtaactaaaaaaatgggattgttgtactttatgatataagtcaaattcaaaaaatttacttttgttttatttggagttgatttgatgagtaatatgctttattgtgttgttcttgtaaatagagatggttgaagcaatgaagaaagttgcagctcttgatgtagagctcaccattgaagagaggaatcttttatctgttggttacaaaaatgtgattggtgctaggagagcatcgtggaggatcctttcttcgatcgagcagaaagaagaatcgaaaggaaacgaacaaaatgccaagaggattaaggattacaggacaaaagttgaagaagaactctccaagatttgttacgatattttggctgtcatcgataagcatcttgtcccattcgcaacttcgggagaatccaccgtcttctactacaaaatgttagtctcattcttgaattaaaaacttaaaatcaaaacaagaaagtatatgacacacacttgaattggtttttgattattttgtttgttgttgttaggaaaggagattatttcagatacttggctgaatttaagtccggtgctgatcgcgaggaagctgcggacctatcactcaaggcgtatgaagtatgtttgtcatattttctcttgatcaattagctgaatagctaggaaagaaagctgatatttctgtttaaatataggctgcaacgagttctgctagcacggaattgtctacaacacatccaataagactcggcttggctctcaacttttctgtcttctactacgagatcttgaattctccggaaaggtattgtccgttaagagcaagtaacctatcaggctaaactacatccaagttataaacatgttttgaaaatttcttgaatcccttagagcatgtcatttggcaaagcgagcgtttgatgaagcaatcgctgagcttgacagtcttaacgaagattcatacaaggacagcacacttatcatgcaacttctcagagataacctcactttatggacctctgatctagaggaaggaggtaagtaattaaacaatacacgagacacaacatctctttaaaactttataatagtactttgtattaaatgaatgctttattatatactttttcttttgtcttgcaggtgaacaatctaaaggccataatcaacaagatgaggtaaacaaaatctaaaagcaaagctttacactttcctaatatctttcttcttttttcatgaaatgttatgcatgacataaccttttgtagaactaatgaagtggagaacttagttacggagccatacattcatttggcaccgagcggtttcaacttctcttcttgcgaacgattgctttaaaccatcatttgttaccctctttttcttttggatttatgtttttttttttttaatcgaaatgaaaacttatgtgtcgtcctattgtcttgaccgattgctttaaaccggcacgagtgcgtaaatagtaatataacaaaagaaaagaaaagaaatatcctaaccggggaggagacgggacgtgagataacacctttggtttcatgaaacgagggcatgaagaagtttgtttctagaaatttaacttacatacataccatccaaaaataagttgcatacattcaatattgacgaagatactgttactggtttgtatgaaaccagggcataagaaattctaacatctctcaggagtgtgtgcatccctctacaatggaggaaacacatttttagtctgttcctagaaacttacacacataccgtccaaaaaatgaagagtctccgctaggtgcttgaatatagttcaggaaaagcctaaattgcaacataatctaaatttatagttttagtcattttgcttacataagtttttaatataaaaaaaaaaactagttaacaacccgcattatgtgcgaaataaaaggattattaattaattttagtttattgctaatattgaagttgttctatatatgtttatcaaattttcttacatatatattaatatttatgtttatcatgatttataatatatgtcttgatatattaatcgatacacaaaatataaggtgatccattttgtataggtttgtatcttttaattgcatattttatttgtattgttgttttaattaattgagtaaaataaaaacataaattaattgaaaaaataatcataagtacaacaaattacaaaatttataaatattctaataaatgttgggtgtttaattaaatggattgaggtttgcttttctgtccatggtcgtcccatgtactgcaggaggtttgttagtcagacgaggccaagaaacgccaatgcctaagtttgactgaaacccttttgttgtatcaacgaaagggtttcttgaataactttcgttgttgtttttaatttcgtgaataaagggagtgaactagcctctcatgtggtatgtaatcacctattttatctcatttcaaagatatttcaatgttgttgacaaaaactatgttgaagtaatctgttttgttttaagtggttgaaataaaaattaaatggattgaggagctatctgagaatgacacgttaacatgatatttttattaatcatacatagagataaggttattttttaaaagtacttcccattaatatataggggattgcataacaaatacaaatagttactagatatatagtttgtaaataataattgttttaattaattaaaattactatttacacattatgtgcggaacaaaaggattattaacataattgtgttataggaatttgagacgagacaaattaatctgacctattacataacaaatacaaataacataattagatcaaattttgtttatacttttttccatttttgctaaaattttgccttttcttttcttatgttttcagtttttttttttgttattcgagaaagttaaatatctatatatacaattaagctaaccacttacattaaatttaatactagagaaaagtttggcggctaattttcaaatatctaaattttttatgaaacaaaaattatcaaccttattattttcgacattttattttaattagaaaaaaacttgaaatgtggatactagtgcctatcctaggagcactcgtcattctctctatatccccatgcacattcacctactactacatttggaaacgaaaaccacataatggaagaaacacaaatcatgaaacaggagagaatatgtccatattaagcgttgatggcaaattcaaataccaagatatcatcgaatccacaaacgaattcgatccatggcaatctaagctttggctcttaccttcttaagtcgtaatacatcgtagagttgttatctccacatcagaaatccggtttagctagagaaagagaacataaagaaacaaatctatgaggttgtaaaatctcgaagtaccttgaggcttttaaaggttgattagtgttttgcctcggtttgcgtagctaaaaaccgcttgattaatttcttaatgttcttagtacttgttgataataagaaaaacaactcaaggtttgttattactttaagagatagataagaaacaaagtattctgttatggtttctgacctccacatacactatgaaaattacatcttctttgataaaatcatcttccttaagaaaattcaatgctagtaaaatagattatcctcttccttcgattgatggtttgattggacacatccacaatgaatttcttggagcatgggatcactacaccattcaagcaagagaagaatatctcagtatgaagtgttattttttcaaaagaaaggatctagaaaaacactatgagaggatgtcaaaaagattctacaccttgcgacactagaaaagttatgcaagtttttcaagcacctgcaagaggaaggaaaactattaggaagagcgtgtgatcgcccataactctctataaaatgcaaagagaggaagtgtggatgttcaacaagttatcggaaagaaaaaagattcaagaaaaaatggcagaagaagtatcctcatctgtccgacaaaaagaagtggaaattcttcaggaaaaagtcacaaagagtttcaagtaatcagacagatgttacatctgcaagaagaaaggccactatgcaaaacaatgcccgaataagaagaaaagagataatcttcttagatacttagccaagatcaaagatattgatgactccgacattgaatcaatcttttcccttgatgatgaaccaaccgatgatacagttctagcaatgggtatcgaacaaaaagaagactcttcggatgaatcaagcactaaagaagaagaagatgcatatgatcaattcatgttatttgacctctacacatttcatgcttacaaagtcgaaagaagaattggcgtacatatcccaaccatcaccaaacgccaaaatctacatctttcccaacaaatatgacaagcccatcaaattcaaagcttatctcgacattggagcagcatcatctataatcaaaccagacatacttgcagcttctcactggaattcctgttcagtagctttcaaggcggcaaatggccagatcttccacatctccttaatcaccaagcccatctacatccaactctttccaggatacatgatcaaagcaaagtatataggtctgaactccctggaaaagatttcatacttggagttgatgtccttcatagccttaagaaagtatcttggaatccaaaaagacttaagcacaagaaccaactgctaccatggactaatgtctcccatctctaccccatggaatatgaaattctatcaaagacgagattatcaaggcttcttgtgctacttcacattcagagttcctcaccaaattttcatcacctttatgaaagaatccggactttttcatatcattacccttcaagaagaatgaggatgtcatccaacaaaagcaagccttccaggaatgaatccaaaccactataatcttgctctcgaagaagtcgaccaactccaaagagaagacctcattgagaagaccacctccccatgggcatgtgaaaccttctatgttaacaaaagagctgaacaagtacgaggaaaactgaggttagttatcaactaccatccgctcaaccatttccttgcagacaacaagtttcctctaccaaagcgagaatttctattccatctaaaaacctctcaaattaattacaaactctaacaatcgagaatgggaaaaatgtcaaaaaaagcacgaactttcaaatttgggaagaaaaaacataaactttcaaaatgccattaaaatcgtaaagttttgtttgacttttgattaaatagtcaagtttcgttgactttgccatttcgggcatctcgttaagtttccgttaacaaaaaaatcacagaattaacactccgttaccattttctgttaaaagtgaaacgacgtcgttttgaaattctaaataaaagaaaaaagtaaacccacaaggattcgaacctatggtcttttgcctttcaaagaatcattaaaccactgagccacgagaacatattaacaaaatgaaaaacacatatatatataagatataaatatacaattaattaaaaataaccaaacaaagatctatattaatgcatttaatttaaattattctttcttaaattatataaaaaaagaaacatatgaaatagagaaaatgaaatatattgcctaaataaatggtttcttatattgtttccatctaattatgaacatcacatttaattatttgaagatggaatgattatattttatgtttatcttatatatatatatatatatatatattacaagttaatttatcgaatagatatgtttttataattaaaaatatttataaaattaaattgaataaaattctatgtgcatgtataaattaatcctatatttatttgagaaggattgtataaattttagcctattttctaatttcataagtttcaatttttttcataaaataaaatgaagaaaaaataaattttcagataaaaattcaatgcatttagaagaaatctctatatgtaaaattaaaaatatgatatttcgaaatgtatatttatggtatgtatatttaatatttgtacatatttggttatttttaattaattgcatacgtatatgttatatagatccgtttgcaatctgtactagaataatatcgtggccccaatggttgagtgcatctgaggaaaacaatacgtatctggatcgacgtcgttattttattttagattttcgtggactcacaatcgttattttattttagattttcaaacgacgtcgtttcgtctgtaacagaacatattaaacggaaaattaacgctgtattttttttgttaacggaaacttaacgacatgtctaaaatggcgaagtcaacgaaactttactattttattaaaagtcaaacaaaactttacgattttagtggcatttttgaagttcatgttttgttcatcccaaatttgaaagtttatgtttttttgacatttttcccgttctatatttcacaagttatttttaattagttttgtgtatatatataaatatttcagtttacaataatatcaaaacgttatcgtagcatatttggttgagcgcttgtaataattctggagagtcatgagtttgattccttcttggcacatattgtgtaatatattttcattttgaaacgacatcgtttcgcttctaacggaaaatgttaacgaaaagttaactccgttgttttgttgttaacgaaaacttaacgacatgtccaaaatagcaaagtcaacgaaacttaattattttatcaaaagtcaaacgaaactttatgattttagtggcatttcgaaagttcacgtttttttatcccaaatttgaaagttcatgatttttttgagaatgctaattaatgatttcaagagttttctttaattgagaatgacgtcgtttagcaaatgaatggatacataacatgtctgattactctcttaaaccagttaacaatatttaaatcatattgaaaacaagaggacaaagccagagcgactctgcttttaagacacggcaaaaaagtcaaccaacgaacccaataacaaggaaagagatttgtttttcatttctaatggaaaaaaaacagcaaaaattgaagtctactcgtcgtagtagtcgtcgtcttccactaattccgtggtttttttatcgaagacttttgaataaagtacatttgcagagtctgtcaataaccctttcttcacggtattgctctcaagccgcgtactggtaggctccaaaattatcccttctttatggtttttggaacctgggttctccgattttgaggtaatccttatgtgggttctttctgatttcgtgttttgttttattaaaaggacttctatgtttttttgggggtttctgaaaagttcggtttttgcaggttgttgaaatctttgagtagatttttgtggaacatctgactctcatggcgaagttatgttgcttcggttcttcagactacgatgtatgtaatctcaaatcttgtcttttttttcttttctcttgggccaataagtggttaagatggtactatgtcttgttgagtttgagagatgtcttaaacattttgtgtctaatgttgaacaattatgagatatgaatttgtctttgttggttggtgtagcttgtggttgggagggcatcgactagttctggaaaagggagaaataacgacggcgagattaaattcggttacagcttagtgaaagggaaagctaatcatccaatggaggattatcatgtgtctaaattcgtgaaaatagacggtaacgagctcggtttgtttgcaatctacgatggtcatttgggtgaacgtgttcctgcttatctacagaagcatttgttctccaatatcctcaaagaggtgtgtagaaattttcactattatataggctcttcactgcatctactggctcgtgtttgaaacggtgtgtgtgtgtgttcaggagcagtttaggtatgatcctcagagatcaataattgctgcctatgagaagacagaccaagccattctgtcacattcttctgacttaggccgtggtggctcaacggctgtaaccgctattctgatgaatggacggcgtttatgggtggcaaatgtgggtgattctcgggcggttctatctcaaggaggtcaggcaatacagatgactattgatcatgagccgcacactgaaaggttgagcatcgagggtaaaggaggctttgtatccaacatgccaggttagtcttctccttcactcgtttttgaaaaccgtctttcctaatcgttttataaagatgtttgatttattgcaaatcaggatttcgcggtcctacagataataccaaaacgtatcaaattcagataaaagttatcccaacacatgttttatgttctgttttttttttgcaggagatgtccctcgggttaacgggcagctagcggtttctcgtgcttttggagacaaaagcctcaaaacacatctacggtcagatcctgacgttaaagattcatcgatcgatgatcacacagatgttcttgttcttgctagtgacggtctatggaaggtaaacaatgatgtttgtgatttgtgaaggaactggttggcgtttttggattaaaacggttttgatgtgtaaatgtgtaggtgatggctaaccaagaggcgattgatattgcgagaagaatcaaagatccattgaaagcagcgaaagaactaacaaccgaagcgcttagaagagacagtaaagatgatatttcttgcattgtcgtcagattaaggtgatgaaagatcttttgaaacccaccaaggaaaaaagatggaacaactagaaatggaagaaaccaaataaataagtttgattttgaagagtagaagatatttttacttgtgtttttttacctccggtgtagaatggttgattggtttgcgcaatgtttggtaatttgattggatttttttttttgtggtttgtgtaagtgaaaatgaatcatatcagatttggtgtataaaaccatgagaagattactctcaagtgggtggggagtgtatataaaaagctgtgtgcttcttctgatctatgttattaaacagttctctattttcgttgttttttttttcgtttacaatgtttgtttttttccgataatatactcgctcatatattttaatcaaccgaaaaaaaattcaatagaaattaaacaatttataaaaactatttgtgattcttcattggtaaataaactgtgtttatcttaaaaaaaacatagttgaaaaatttattaacaaccaaaacatatttcgaatacatcgacaaccaaaaatattcaatataaattaattaatttgtaaaaactatttgtgattctccattggtaaaaactactcgcccatacattacacaattagatattagaataatttacatatttttagagtaaatacttgaatctcttaaagtgtatcgtattatagacatcaaatgaaatttattaagcgaagggtcaaaatgtaaaaagtattaatataactaagttaataaattaaacatatgtgttttgatagaaaaacaagataatatcaacatttaacttacgatcgcctctatatgttgttcaattttatcttgcattaaatcgaagtaacatatgcttcgtatatgatattttgtgttgataaagatagagttatcaatcatcggcaatagactatggtacaaaattctctaattgacaacataagggttcagaaagagaaggcagtggtacaaagtttgaaaaagtactccctaatagacggattatgtgcatataacacgatctaacaaaaggcagtattgaaattatcaacagtatcatttcttcttgtaaaaatcgattttatattgagaattttgagttattatgagaattggctgggaaacaatacatctgagtctaattagtttttcaatatttcattctaaaacagagaaaatattagtccttctttttgccaaaaataaccttatgcgttttttcatttaaacacgataaatttaatatatgaaaatatcaatatgttgtccatggatgtccaaaaaactttacaaacctatgtgtatatcttaaacggatcatcttctttgtgtgtcgccatcgttcatcttgagccatgatcaaacagagcatcggcatgtaaatagaagaatttgctgggatctgtcaatcaataccttaaattcaataagattagtgttgctattaggatggatctccttaaattccagtgataatttaacataatttgatgaaaatgctatgactgttcgatgaaatctggtgaagattcggtaataattcgaagaaatcttgtgaaaacttgaacacaactggtgaaaatctatcgaaagtttgacaaaatttatgattgtgattgtgatttcaatgtcagattgtgattcattattcacttgttctgttcaacacattgggatacgatggttgtagttttatttgtagcgtacatacaagtgaattaatattattaatgctttatatttgtgtttacattagtactggcttagataggagggtgagaggtgcgacggccgggggtccaatcccatatttcaataatgagaatattacgtgattagacacttttttgaaaattagttcctaattaagcactttaaatggagaagtcactttagataaattattttgcttatttaccttttaactacattttttccatcggtcatcttttctctctccttttcccatctcttctctctttttttcttttcttttctcactttatcgaagaaaaaacatttcccacaatatcttcaattccaaatctgcaattaatctccaaatccactatacgcgatggctttctcttctctctggactaattggagaatacgaggtcttggtttctttaagattgtgatttattttgcaatttaaatatttgttttgacataaatttgagatttagttatctaagaaacttcttcttcttcaacaatggcggcttgatttgatttttgctctctctcatgtgtcaaactcgtttcatctatgtagcatcgagattccggttaatcgaatttcctgttattatggacatggtatacagaatggatatagagcagtaaaaaggtttccgaatagatatatttaaatggactcgttattatggacaccaaaacattgtttgttgatttttctttcggtttgcagagacctctaccttcaaaaccttatggacatggaactttggtttctttacaaaacacagttaatcgaatctcctgttattattgacatggtatatagaatggatatagatcaatagaaaagtttctgaatggatatatttaaatggactcgttattatggacaccaaaaaattgtttgttgatttttctttcagtttgaagagacctccacttccaagaccttatggacatgaaactttggtttctttacaaaccacggttaatcgaatctcctgttattatggacatggtatatagaatgaatatgaatcagtaaaaagttttctgaatggatatatttaaatggactcgttattatggacaccaaaaaatcgtttggtgatttttcttacagtttgcagagacatccacctctgagaccttatggacataaaacttttaccaaattcctgagataaacgagatcgaattgtttaagaaacttctccaaaagttatggagacgtggaaagagagaggcgctacaaatcattagagagagagagagagagagagagagagagagagagagagagagagagagagagagagagattttatttatgggaatgttacacgtttaggcacttttaaagaatttttttctatttgaggcactttgcagggatgaagcactttttcattgaatttatgacaaatttgcccctagaaataaaaacgagaatactttagcgtttgaaagttggtatatgatgagtgggtcgttggatggaagttgtagctattatcagattatatatataatttaattactcaaaaaagcataatatatattctttctctatttgtacctttttttttcttctttttcttcttcatcgtctacttcttttatcttcatcgactcttctccttcttttctttctctatctatctctttcttcatctttcagtctttctttgcaaaatcagacatgagagactttctcaaaatcgtgtagcttttgtattttcctttacggagaagcctctctagatttaagtaacgattaggcttattcgattggtttcggagcggcagcgcttgtgactaacgatggaagcttgagtgtagcagacagtaacatctagagatgaaagaagaagaagatttgttccctcaatcttacaaccaatcgatccaggttttgcgacgattcttcaattctacgaatagaatttagagttttgttagattgtgtaaatatttgattcatattagcgaaattgtgtttgtgaagacgatgagatcggttgcagatcgaaagttcctctttcgttactctcctttgtttcagatctgttgcaagaaggcgacgagagaggcggtgataacgtaacgtgggacgtttctcgacttacttaatttggattttgaaattccacctgagaatttgaactctctcccgaaaaagaagaagaaatggcagcgtacatggaagagattccgtgagaacaaaaattgttaggagtaacctcgatattacggggttaccgagatgcgaggtcctcgttactctgttctattccatggagcaccagattggcaaattccagtattgaatttcatatccatatgatcagcttgtttggtaccatttgattctagcttgataaattgatgtttcgttgaacctctaagctaagagcactttacttcgcacatgagaataaatcatttccacatggtcacatcttgttggacaagttttcatggaaacaaactatcaaagcatccaacacgatttcattatgtataaactaataatcctataggtcttcaagccccaagaacaatatgtagacattgctttcaaatagcaacactcaaaacccaattagttaatgatagtttatatccattataacttgtccaattagactttaacatgtggagtaatggtgaaacatgacaaacacttgaacacaaatgattcatgtgtagagctttcatcaattttctatcgaatgaaaaagagtgtcatggtgatgcaagaatcacaacttagtcaaaacaaatcatgcgtctttttctttttcaacacaatatccacaataacaatacattacttacataaaagaacgagacccatcaaacatgctttcatataaaggcaaaaccataccaactaaaacccaaaatcttattaacatgttttctttcacgtattcttttctctgcatttgttattcttatctgatctataataatgtgtccatttcaaatgtgttcatacggaatcttgtttactaagcatatacattctacacgaaagttaatgtataagtctgctcttattcattcaagactcatataatcaaaattctacacgaatttatttgtaaaactacaatcatcttaagtgattatgttcctcttgtgtatttctttcattttctgttaattaaccaaaaagcaagtttgtaatcagatacttagttgaaacttatgatacctaatatgtcctgtttactaaaatatataacgactctccctgtcaaatgtacaataattcatatccatcaccccacgtccatacaaccatgtctacaccgttgtagaatcacaaatacacaatttctacagaaagcataagtaataaccaccaatttcaaaaactatgtccattacgatgctttgtgtttatattctaaccctttacaagtagccatccactagcgaccattctatgttgaccatatagttgtagggatcaattacaattttcttgggtagttttataccaataaacaagtctatacatgaccaataaacgccaatccaaagtacattgtccatttttctttgaccatttattcacttgtgtataaacaatcccatcagtaggacaatgtcagttacatagcttttataaaaaaaattaacgaagatcttatttgtattacactctcaatgaagaccattagttcacttggatacacccgtctatactaattatttgtaataggtagaagacagaaggatatgtcaattcccaaaaattactgatttttattcaatagaaattcaacaaatatacatcgattgtataacgtcataaactcacaaaagttactttgattttcatcatgtctcaacctctcgtttctttcttcatcttgactttgaattagaagtgattaatctcaggaaatcaaacaatcagaaacaatactttcaaatttacagatctgatgtggaataagattaagaactttctaattttgtagatcagagataccagagtcattaggagcagagaggcaccaaacaaaacgacgaataaggcataaagctccctccgccaccgctactaccaactacgccatcatgtcttgattagctttttaaaaacaatcatagcaaggagtcaaagcaaatatgtcggagattagaagataaagccctcgtttttgaactttgatttttcgtaaaagatttgattttggttttggaaatagaaaaataaaatcgatggagaagcgctgagaagatatgacaaagagaatgagtttgcagttaaaaagggtaaattggacaatttagtttgacaaagtgctttatcattttaaagtgtctaaatccgtacatagttttttaaaagtgtcctagaatgtaatattctttttatttattttgggtaaggatcatagaagaagaataagagaaattgagaattaaaaacataaatattaaattgagggtaaaaaagtctaagaaaaaaagaattagtagaaaaagtgtctattccctataaagtgcctcaaatggaaaaacattctctaaaagtgcctcatagtggaacattcccttcaataattagagggcaccattttttttttttcttctaaatattaaaaaaaaattagtaacacaaaaatgaaatttagaatggacctataatttttttaatgtattgttttttgtttttaactaaatctttaacaaaattatcatagaatggacctataatttggcctccttagaaaaattgaaagaaacattttaagaaaatgtagtgaagattgacaacatagttggccgagtttccggatctgcttgttaatacgataaagcaatttccaccatttttgtgagcttctctctattttttccctgtgaaactaatacacgttcatcggaaatgcttctcagtgacagagtttcttcgggagacgatgataaactcgaaaccaaatctctcggatgtttcccaattatcacttccaatatcaaaaccccgaagctatacaagataaataaactctgtttatcctcaaaacaaatagttgaaaaattattaataactaaaacatatttcgtatattttgaatacatcgacaaccaaattttctttttgaaatttatactaatattttgtatttattatattttaactttttctaaattttgaattctgttttaatttattaagaaaataacttttgttttaaatctggataaaactgtcattttcaatattaaaaataatgtttttattaaaaatggagaacaatatattttcaaatgaaaacttaaaatagggtagttttttttttcaagtttttttcatgtttttttttctaattcgttctaaaataccgaaaataacaagattgataatttttgtttcataaaagatttagatatttgaaaattagccgccgaacttttctctagtattacctttaatgtgagtggttggtttaattgcatatatagatatttaactttctcgaataacaaaaaaaaaaactcaaaatataagagaagaaaatgcaaaaatttagaaaaacataagcaaaaataaaaaaataaatataaacaaaatttgatctaattattttaataatgagtttttgagcgcactaattgttatttcatatattaacaatagatgttttgtattattgtggagatatagtatattgttggataaataaataacccagaaaaaatgtatgaaaaaaagctataataaacatgtggcaccaccgcaccgaaggtaaaccaaagccagattaatttgtctcgtctcgggttcctataacacaatgatatgataccatcgatcgtatcaagaagccttgaactattgagaccgttttgttaggaaactaggtctgcgaggaagaagaagaaattgaggtatgagggtagaacgaggaacatgacaaacagctataagaagaagtaacggagaagagtgagtcctaaggttaaatataagtgcatcacacaaaatgatgaaatttctaaatatttgtgtgttttgtataagtctttccttcattcttcatgttgtcactctaagtaatcaaaacaattattagtatgttatatgttatggtgccaaaacaaccctacagcagttggtttcggtttagttgatgcggttcagttttgaaaaagacaaaaaaaaaaaaactgaaacgaagaaaccgagaaaacgaaaaagagaataacggagagattgagagagaatcagaaagcgaaacgaaattcagtatccattgcttcaaaattcgacataacttcgaattgttgggtagttgaattgtgccactgaactcccacatccggtgaagtgaaagttactgtttttcccggcgaagccaagagaaagttactgtttttcccggcgaaaccaagagaaagttactgttttttccggcgaaatttgaacctccggcgagatagcatctttagctatggctgggaataaagctaacgacgaagtcccgaggaagcagcatggtccagggaaggagaagcgtgtattaagagtttccccacggagaaaacgctctgcgacaaaggtaacggaggaactgggttagaatctctaatttaccgtttgttgtctttgggtgtatcagaattgtaaagcttgtttgattaaagtgttagaatttgtcggaatttagcatatctttaggatgaaaaattgagaagtagaattggaaatctctgtttccgccaaaaatatgattttgagttataatctggaaaatgtctgtgtacgtacactacttctgtttgctcaacagtatatgacttttaattgcaggtagtccaagtgttgctccgactgaagatcttacagttgaagagttaccaccaagactctttgctctagaccggtacccttccgagacgaagatgaacgcgtactctaaaccggagtacatttctgacctagcaaaagtactaaaggggaaaccagagatgcagtttcttctcgattctccatttgggaaactttttaaaatacccaaaaacaaggcatctttcaatgctaagcttgtccttggactaatatgccgtcagttagtgacaaagaaggtgaatgagatgtggattgtattcggcggtcatccaatcagatttggactaagagaatttagtatcttaactgggctagaatgtgggaagtatcccaagaagaaagacgttgatgatgttatcagtgtgaaacctgagtgtgagagtgtttggaagactctgtttggtgagaggtttggggacacggttccaacaattgctgatttggtgagctggctgcaggaggaggaaagcatggaggggtggaagtaactggcactatctcttattattttggttgacggtgtggtagcggcccacagtaaccccaacatgcctacttcgaagactgtcgagatgactaagaacctggagtttttctgcaaatacccatggggaagggtgtcctttacccgtactttggggaggatagcaaatttccaaactccttacgatgctcagaaactaataaggggtatacttgtagggtcttatgcactccatggtttcccattagctcttcagcttttagctttcaaaacaatcccatcaattgctaagctaggacctgatgatgtacctaacaggacatttgctgagaggtctatccatcgtcttgcctctctgcgagcaatccggacatgtcgcattttggagtgtgaggctgctgatgaggtgtgttaaattgtgtatgtacgtacataataagtaaatgtacattatctatggttaacatacttatttgtgtaggttgaggtcaactatattgtgaaaccagctgataatgtttgtcctccatctctttcatgggatgatgaagttgatgatccaagggttgattacattgaggcactgttgatagatgggcaccagtggcaggaggatgaatgggttggaggctatgctagagtaccaaagcagtcgcgcccaccacaactagaagagacaggtaagtataagtataaatgtttttacaaatttttttggtattgcacctagaagaaaaccaattaatagcagcaactggtctattgtagatgttaagaggaaacgaaatgcaccgggcccgagccctaaagaacctgctatgaaaaaacagaaatctgaaatggactgtgataaagaagagactgctgaggattgttttggagagcctgtgcctgagaggtttattgttgaaatgaggaggtctttgaaggagctggaagaccaaatgtatcaaatgcatgaagatatgaaagactttgtccgtgaccagatacgtgctgcccttgatccaaaaggcaaaaggccagaacaaaccataccttcccatgattcgcgggaaccacctacttctatggataaggcaccggttactgcgaagaagccatcgagaaggatgtctacaaaaggaagcactggaacgagaaagtcttcaaggctgactcgtgtttctcatgatgtggacactcctgcactttctgttggctgtaattccaaagaggaagatttggatgtccctggagtacataccactgctttcggcggaagaagaaaaccttcaaagccgaagaaaaatgtttcttttgctgttaacactattgaggaacctgattccaataaggaagatatgcaaggattcattgatgaataggtaagtcatgtacgtatattgctaaatattttataacacatatgtataactgtactgtctggttcgatacaggatggcgctaataatgaaagtgattttactacaaatgatggattgaattcttctgccgctgaagaagagatattagacactggatttttaatagttccttatgctggatccacacaatcccatctggtatgtcgtctactaatactcttaacaatctgtttaaatggtgtacgtacatattcgcttaagaagttagttaaactatgtttcaggatagaggaaatgttgttgttggtaagactgtcttcttaggttcaatgtctgggactgtctttgtaacacaggaagagaggcctgtggaagaagctactgttgacaccgagatggaagaagttccatctaatgtgtctgcaagagtttcagaggtagatcttctggtaatcgttatatacagatttccatgactatatgcataactattacattaatttcttcacttatctaacgcttaactctatggtagcctatgtttcaggataatggaccaaaggatgttgctgaacctggcttagttggtacccatacaggggccgatgaaatagctgatgctgacatagagatggtagacaatccatcaggtttaccttcaacatctgcacaggtatgtgttagtcacttgttctttttccatatgtgtacgcccataagactttgcaaattatttttgtttcaggatgaagcaagagatgccagtgcatcgactgaagctaatggcagcaagtcagaagaaacttatgagccttctgatggagacacagctcacgtacctgccacaagtgtacgtacatttttgtcactatgttctgtgtacatatatattgtttcatacattactaaaaagcatacattactaaaaagtttctttccgatgctaaattctacaggttgaggcggcaggagaatccaaattagtgacagtgatggaagttgaaatacctgagaagacccacagtgatcccccgtcaccatttcaagtagttaacaatgtaagcttactcttgcaacaaataaaatgtactatttactgttcaaatgtataaaatttatattatgcaggtcatacgggagttggataccaaagccgttggtgatttagctgcagccactgatttggaggtaataatttgtgtgtttcaattcctattttcggaatagcatacataggattatatgtgtacattatatatacttgtgtacgttaacttgcacaggtagtcatggaagagccgtgtattgtcgaggggtctgtagaaactgaggatcctaacccagggtcagatgaagcagacaagaccgatattcctaaaaataatgtatgtacctattttaaacatagaaaaacgtatgaaactgttgttgacaatcatatttgttaacaggatgaatcagacaatgctgctgctgtcgaagcaaaagaagaaaaaaaatcgtccccaaaggtcccaaagaaagtgaagaaacaacttgtctatgaacaggatgatgcccatcctcatggttttaaggcaaaaacagtattggtgcccgatgtaccagctcaacagatagaggttgttatcagggctggaaatgtctcatacaaccccctggacatggttgacccttcaaaagtagaggaattcagcaatatcattaaaggaccctctgtgtaagtacattatagtaaaatggattatttaatatctcaatcatcatttttaaggttgttatcaaatatttttctggattttacaggattcacactcttttcgggtttccaaaagtgcccaacgacttttttgcgaaccttctaacacctggtgaatgggtcgaaagtacggtacgttgcatttatatacgtacattccttgttataaattgtacatagatgattaaatttttcgtggaagtgtatgtacactgatatattttttgaacatttcagcatttagaaatgatggcaatgttgatgtggcacaagaacggggaacagatgatagcaaacagatgtattgtattggacatgatgctgacgcatcttcttaccaagcgggtgggcgacttcaagaagtgtattaataagaacgggttcaaatggggtaaattactgtccgacattgctaatggagttcacataaaccgtgaacccaatatgaagtggatgaaggatgtcgatgttgtgtttgctccgatgaactggaagagtgaacattgggttgctttgggaatcaaccttaatgaacggctaataactgtgtatgacgctttaatatcgcacacgcgggagtcggctgtgaaggcgagaatgactcctatttgcgaaatgatgccgtacttagtcagagcgatgtgccaggatgtattgatttctccgtactcagttgaaccttttgagtatgtgcgttgtcctaccgttgctcaaaacccaactacaggaaattgcgggccatacacgaggaagttcctggagttgcttgcgtttggacaccctttttcggatctgacaaccattcgagaagcagatatggtcttctaccgtcagaaatactccgttgacatctacgagcacggcaagcgggaggccggtactgtgcacttggtttaatcgtccaagaacaatattctggttctttgcaaccaattattatgaacaaacctgacttatatatatgattgcaactacatttaatttggagattgtcagaagttaatttattgtcctctattatattgtcgtacacatcgttcacttataattacataatgtaaatgtgtacgtacatatctatatgtctcgtacactgcatattaactttataacataactcaagtgataaattgatttgacagccaacgcttaccaacacaagtatgacattcatttcaaccgtaattgccccaaccaaattcacagtagtggttattaaagtgaagaaattactgacgacctctgactatctcatttcaaacatggttaacccgactcttcccgacgatttactctcgaagatagctaagaacctggctgaccaatgctggtctgaccttggtccattggtacgagccggcactcgtggaagagacattgtctaccgtccggatgtcctcaaagatgctaatattctcaccttgtgtgactcgcccgatgacttccaagctggagggggccacaatccctctggatccgctgatgaaggccgacatcgaacatttttcttaaggtgttttgcagctaataatcccacggccgtgtattacgaatgtattcgtgttctaacgcatgaacaaaacatcaatggagccatcaggctcttacagcgtcatgctccagtacgagcaaatgcaacacttgcatgcgccattgtattcatatgtgctgggtatgattatatgggcggcttgtttctacagctcttcacccgcaaccattatccattggactcggttgccactcgagttttgggtgatgagttcatcgaggaaataaagaagtttgaccctccatacagcaatacatatggtcctacgttctcttatcctaccagccatggaattagtatgcctccttgcgccttatattgttacatggtatcaggagctttccaaaacgtttgcaaccgctgttacctctggtcgtgtgccaggcgtgttagtcaaatgctatagttattccattctactttatatgtttgtttatgttatccgctatgtcatgtttcaaattatgataagccttctactatgttgtttatgtttatgttgaaattatattattgcttaagaaatttgcaaggtgtgttatgtttctcaagttgaatatttttcagccaaattcacatatgatatttagacactgcagtaaatgtaaatttggatattaaaatctaagcgtccacaactccgtacacgtgcatctaccaaataatacttagaggttttttctttgtctcggaaaactagatatggacgttcactagcatgagatatcaactctaacgtacactaaaaaataacacatgcaaacatatgaggtctttggtttgtctcataaatggtgatatttatgaatggacgtacactaataatacactacatcgttcactgtttgttgagtaaatgtagaaatgtaaatatggacgtacactaaaacgtacacgacaacgtacactgtttgttgggcaaatgtagaaatgtaaatgtggacgttcactaaaacatacactacaacgtacactgtttgttgagtaaatgtagaaatgtaaatgtggacgtacactgaaaccgtcagtaaaacgtacacgtctaggtttaagctgttattaaaaagaggttgctcataacaacgataacaaattatatatggaatactattactttgatttgacaatatgaatacacatcatcacttaatacctttgcaataaatacaaccataacttacccaaccatatcttcaatgatgcttatttaagtgttcaaatttcattttctcgaaacaccttactcctaaatatgacaaacccaaatattcctgacgatttgcttgcgaagatagccaagaaaatggctgacaaatgttggtggtacctcggacctatgttgaaatctggtcctcgtggaagagacattgtctaccgtccggatgtcctcaaaaatgcaaacattttcagcatgtgcgacgatcccgatgacttctacgcggcaggccacgatccaaatgacatcaactccgaaggtcgctatagacccttcttcaaatggtgcttacaagctggtaaccccacggctatttaccatgaaggactgcgtctcgttacacatgagtctgacatccagggagctatcctacacttagagcgaatcgccccaaggaacgccgctgcaacccttgcatgcgcaattctttacatatgtgctggtaatgctcacatgggtggtgtctaccttcggctcttcggaagcaaccattatgctttggaatcggaggacgcacgtgacatttgagaggaggtgctagaagatataaagaaatatggtaatactttaaaatacacatacgctaacagtttttcgttcccggaatgtgttgacgtaagcactcctgaatgcgcggaggtgtgttacattagatcgagactcttcaataatctttgcaaccaatgttacatctggttgtgtgctaaacggattagccagatcctgtagagctcacattcgccacgatcctgtcatatttataagttttccatgcaacaatatgtgagctttttacgttgattatcagtaatggaagtttgtttttaattaaattaccactttgtaattgattcaaacatactagctcaaagtactctaatatgagacatcattaaaataataaaataataaaatatctacgtacacgatatatgataatgtacacgtggcatagtttaattccaactataaagattacatagtgagcgacgatatagtttgtaaatgaagacaaaaggaaatttgatttgacgtcgtataacccatatatagaagatttcgctccatattaattactcgctgtcaaatacactctagaagtgacctccatcacactctcattaatatctctattagacgtacacggttaccgagcaatgtactcaattgatttggcagataaaataagtaagttaatgtttatttgaaaagattgttagtaaatgcgttaacccctaatatagcactatacatgaagccatattgttccacttatatgccatacaaacagacgtcaactcaaccttctgtcagagaacgtaatgagtattttgtagacgtacacggcgcgattatgagtggtacacaggaatttgtttaaattaaaagttactaatatgatgcactaaatatacatccacgtcacccacccacttacattgatggttattctcctctttaaaactcatgacaaacacacttagttgaatacacgaatccgtctaaacctcctcgtttgaaaaacaatgcctttcctacctccgctaacccctccaaccgagttgtacctaggaatccaattgccaaaccccataagcatacttgtcaactacctccccgtcagccagactcccatagagacgctaaggaacttagtctacagttgtgacatcaacacccttgcaatcgatgaattcatgacgtggtcgtcgttactccaaccggggtctcccttccggccatacttcgagctgcttgtagaacgtggatccatcccggcggtttaccttgaaggtgttcgccaagcgagcaacttcgtgacagtagctcagggcctttcagtcatgacaacggtcgctttatctaatccctttgcttgcttcgcaaccggtttgttccttacgtgtaccgggaatcacttggatttcctccctatcagcgaaaagttctgggaaatgacatccacccttgaagctggccacgcggttgcagagatggtgatgtatcacatcagccagcttcacactgaaaatgctcgccgctgggaaaggtcttagaggtttgtccaaccgccgagttgcgtagggcaatgcacgttccatcatagctgcagggtttgttttttctactggtacgccagggagatggctatattctactagaagcaaagctgctaaggtctaagctactctactcggctctactctcgagtcttttggtatgacggatgcacacatattttgcaacacatgtgtatgcttcgtttaaaaaattatattttttgaatcgttccagtttatttatcttatcttatgaatttccctttatataaaccgcctgtccttttttatgtttctggcttttgaatgaattaccactttaagtattactagatgtcttcgtgtacgtacactatatagtacattgggaaattgcatacacaacataagtataaatctaacagtttttgatgttgaaggcaccaaaactaatatacgtacacgataccgtacaccagaaactatacgtacattgcgagaggatttgaacaataaaacaaggcacgtacataaaacaacaaattagattaaaatttaaacggaaacaagaaacaacaacgactgaaatgtagtttggttcttatggaaacaacaacaacaactgggaaagaaaacttaattgaaatgtagtgttatattatattaaaacggagaataatggttcattccctctagctaaaaaaccaccatcgagatatccgcaacttctgctctgtccggattggcaaccacctttgaaatagcaccatggctctcaagcttcgggttagacagttcggttagacgccaaaagctgagtgcgacaacaaaatttcccttacccaaactctgaaagtaaccatccaagtactccgcctgttgattgcgggcttcgcactccaagacttcattgctacgttagaaataaggactgttagcgtttagagtgacattgtaaataaaacaaatgaaaagaacacttactatctatcttttaacttgaaactcagtttgagaccgtaatagtctgtagtcaatgcgccaacatcaaccaacgctccaatgacatctagatgatggagaaacaaagataataaacaaacattttcaaaaatgtaataaatgaagcgttagagttattcctcctcaccgactaaaacgttcttgtaagcagatttatccaaaatgtagtcgaagggagtgaaatcgaaatctggaactggtggtgatctcggtggggcatgaacgacgacggtccgatccataaacagtatgccgtattcatgctttgttgctctgactaagtcagttgacttacggaccaagaaagaggtgatcgtcttccactcattttcaacgaatcggtcttcgtaaaatggagcaaggcgacgatcaacggtggcctcaatacggttattctttacatacagaacatgatagtagagagtttaatatataagttaagcgaatgaacgagaaaaacacataatgatttaacggaaataacctcgtaatctgccaggataaggccgagttcgaagacgttgggcgatataaccttcttgaagactctcacgacaaagacataaattcgccacctagtgatcagaggacacaattctgaaaccgtatgaaacccctccatctcacggatagcaagaacaagcgattcgaaagactaaatttttttttgtgaatgatataactgccggcacaagaaatgggtttagaatgaggattgtggataaaattaaggaagggaggagacttaaatagaggaaatctggaacggctacagttattaatacggttacaactacacttgattcaaatttttggtaatagcctggtaaccgtcatatagggtaatcataacgttgatttgacaataaacagcaacaattacgtcctttccattaaataccaacacaaccacaatatacccaaccatgtctccaactccgttcatttaagagggggaataagttagattttcaaaaaacttatttcaaattactcaaaatattgagcaaccacctctgtgtacccttattacatgaactttaacacgtacacagacaaaaacgttcatagttatacgaacgtagagtttaaacgtacgtacacaacgtacatagttacaggtggattatatataaacttacgtacaccgagaaaacacagaagcgtacactatattggccggctcagaaacttgtcaccggaactagattggatttttgcacgtcttcttgttatgacctgcttgtcgacagcgtgagcactgatttggtaaaagtcttttctgtctctttttctgaagtgacaaagacacaaagttacaaatctccgcatggtaatactcaaaatacaagtagatgaatgaacgatgttagtacatacccggttttcacctctagatgggatccttttggacagtggtcttcttggtggccgtctactgtatggaggaatgagtatcaaatccactatatgttgtgggatgacaacatctttcggatccgcgataggtagaattgattcttggaaagaatcagaaaacgtttgaaggccataccaccatccgacacaagacttcggatcaattccatgctcgattgcagctgctagagcgtgttcacatgggattcttaacttggtgtacctaagacacgtacacgtacactggtccagaacgacatgaaaatgctccccggatttacttgtcacttgatagctccacggtccagacatcttcacaacgtatttacctgacgcaggcaactcatgtagaaatctctcatcaacctcaggtgtcacagaagatttgcacctagcaactttcttcctcctcgatgcgaaccatcgcattaggacatcccgaatgaactcgatcatgtaaacaatcggataagttttcgcttttgttaacacatgattcatggactcaaagttgttgctagacatgatattgtagcgttctcctctacagtgagctcttgtccaatgctcaaatcctatgtcctctaggtattttccgcatttagcactcttttcccttaacagttcaaaatatttctcgaaatccttgaccctataagctttggcagcgctgaaaaataaagcagacacaccaaacttaccataataggtggagaggtttcgctcaaggtgaacagcacatgctccatgatgcgctctcgggtaaacaacacttaggcctttgtatatagatgaatgtctgtccgagacaatcattaaatcgtcactgtctggaataatctcagctaacttttcaaaaaaccatgcccaagaagcatcggtctcaccatcaacaacaccaaaagctattgggaatatttggaagttcccatcttgggcacatgcaataaggagacatcctttgtaaggtccgactagctgcgttccatctaccacaactaccttcctcatatatatcagacatttgatagaagcgccaagagagacaaagacatacttgaagcgctgcttaccatcatcttctggtgtatagtgtaggtgtgttattgtacccggattagctaattggagaagatacagataggtcggcaaaaacctgtaatttgctatctcatccccccgtacattttccactgcaacctcttttgctctccaagcggtagaatatgaaatacgcacattcagatcatttaggagcagctgtggtaagtcgacagctcgcggcccaccctgcgtagaactgtatctgctcctcacaacttctccgaggagcttataattagcatgtttattgtagttcttccgagagtcgatgttacacgtatgtgtcgtagcatacgaagtgattttgaaactttctgaatccttcacgacgcgagcagtcaattgccatggacaagtctcatcaacgcacaccatcttcaatgttttaggacatgacttaggttgcttgaagcaaaagcattgctttatcgcttgaagagacattgtttgttgcaggatttttctattcttaaaaacacttccaacaaacaaagtttcgcctgtggtgctgatttcaacctgtgtctcatcagctcgaaaattgaggaagtcatcgaacacaggagcagcatcgttaccgagatacgccaactcgccaccatgtaacttaggaaattcattatacacttggtaagcctcagctgcggtaactaccccattatcattttgtgtcccagttgaggaagctccaataccttcgatcacttcatccccggtgacttcgtctatacaaataagattggaatccctttgcccttcgcagcgtgtaccgtaacccaatggagagattgtttcttcgccaggtacactaagatcagtgtacgtacacgtttccaagagacgactgaattcccctgtatctccgccaggtacactaacacccgtgtacgtacacgtttccaataaacgactgaatttccctggatgttgagcagtctgttgagtgagactgacgtcttcctcaagatttccttgtacatattcttctactattacatcgttccacttgttgtaatcgtattcttcgccaataccttcactaccgtctgtggtaggatacagggtacttcccccaatagatccatccacaccaagataatcatcacacccatcatcatcttcgttgccctcctccaattcatcctcttctgttgtatcgtcttcaacatcggcttgctcctctgcatcctcattattttcatcaacatttgtagcactatcaaacacacggtcactttcagaaacttcaccatgagacctagagacagtattcccgaacgccttcactgtattattgaaagagacgaacaagttgagagaaagatacccaccacgaaccaaaaaaaacgtctcgagacccatctgactgtcaatgtatacaggagggcgtttagtatctatcagcactgacatttcacccggcatccagtagctaattatgggattgatctcggtggacttcaaactgaaagcctctcggagtgtacggacaaagtccgtgtacgtcatggtttcctgaacgcgtacacaacgaccaaagatgccttcctcaggttcaaatttccattctccttctttgcatttccactcaccgaccatggtaaatacgggaatatccataacccacctgcatcataaattcaggagacacacattaaatgcaactgaaaaatactatacatataaaaaacaaatggaatgtcgatactacacatttataaacctaaataccaattatcatttgactattttaaacaaacaaatatagattttgcaaatattctgataaaaaaatggagttcgaacacaatcaagatcctaatatgacataaaaaaaaacttcttaaaagaacttcattacttacacgagcaatgctccaaacttggtacaaaaacaagatcaacacttcttcagcagcaatgtacgttcgcaataattctttgttcctggattcatcttctttatctcaacaaatttttttttaattattattaataattttttaatattatttgatgtaatgatgattttgcattaattgtgacaatagtcacatctaaactttttgggggcattaaatgttgatatcacttcgtaataatctcacttgtaacggaaccgaatcgcgtcaacgtgaacaaaaaatcttcaactgaaccggaacagtgtacgtaactaaacctgctaaactaaaccgtacatttcaacagttgctaagagagaagcgcaagggcagaagcgtcattttgcaggcgaaaagacaaatggtaaaaaccacatttgactttgacaatctatggaaataaaacatggtcaacgggtgtggcctgcaatttacccttgattatattgacctttgtggttgaaaccatacgaaaaaataacattgcaatacattaacaaagtaatattttcatttattcatctgaagcggcgtatcctttgtttccagaatacatcttccgtgatatctaacataatgaattaaaggatcattgagcaacactaggatcgcccaaaaataaattaacaaaccctttgaaaaatgttgtatttttcatatattaaaaatatttcaaaaaggacttcataagatgtcgatcataagttatttttagaaactctaaacgctctcaagctctaatatcgaggaacctaacctaaccttgctttccgacgccggtgaagcttcggctcgttggcgtcgggatttgtcctttcttactcacgtctttagcattctgttttcagttttactctttttcgggcccatgtgtctttcttttcaaaattgtgttctcccagcaagcttccaaaatgacttaaccgatagtgacaaaggacgaaggagagggtcggcgactcctttcttttccctccctctatccacacccattccgacgaagcaaatacaaccatatctgccacaattcttccgatctggatcaaactagaactatgtaagagcttacctcctctggatttcgttgatggcaagagattctactcttggactgtcatatgcaccacgttcaggggagtcggcgatggtgcacggcgcaaccttcttatgggttgaaagcttctacatgtttaaatttgagacccttctttttatcctctttgctcttgtttctgaggatcttataaccatgaagctgatttcctttccggcgacgatgagcccatctccgacatctttcgttgcagcgcacccgcctaccaacgtccatctctcaaacctgcaaaaggaaactagggttacagcgaacgggcctgatcctctgttgtggcccattagcaatgcttaggcctaatttcattttgagtggagttgcagttgggcttactgaaaccctaacctctctaaagatgatatttaatgggcttggcccatattctcatcaacaaaacttaggccctgctgtttatccagagaaagctctctcttacgcttgtggtcgatcaatctctccagcttcgcaaaggtctgaatttttctctaaatgtactcaattatttgactggatttctcgattcattgtgctgcttgacttgggacatcaatctagccttgaattgttaattctagttacatattgtgttcaattgtctcgaatcctatttgcaagctcatctcggctttggtccgaagaactctttaatacgaaggatagcaattcaactgctctagtctcttctcatgtgggatgggaccattactatcggacgaaatatactaatcgcgacatgccggcttctaccttctatgatcccaaggtaacactacctttagtacccatctttaccaaggagcccaagcttcatttaaaagcttcctctcgatacctatctgttcttgttttcaaaacaattgtatacacttgtggtataagaatctgatggtacagcaatgctcctctttggcgaaactttcactacactccttcgatatggagagaactctcttttcgaactttacatggtttcccacttgcaaggtgagtaaccatccaagacttctaactacctcgtcacggttcgtgccggcaaccgttgaggtaaaagaatccttttcaacgtcattgtcacatgatatatcgatagtgactacttgtaatctcctcgaatcattcgcagacgtgcctttgacacaccatgaactcgcttgtggcatattgctttttagcctttgtctccgagttttcatgactctatcgccacagcttgttgtttacttttttgtttggtttagcttccatgtcagcttgttcctctgtacgttcattatgtcccactttaaagtggaagggcttgtaatctttaacccctttttttgggtctgaatgaatacaactatgtttgcacaaaaaaaaaagccgattataaatgcttgcatagaaagaaaaaaaatggatggattagtattcatacacatgaaaattatataagaacaagaaaaatcttggattcatattgattattttaaaatagaaaaattcttctagttgcaaagagaggcattttttacccggtaatataaggtttgaaccaagatttctagatggatggggtaaggtactagtacatctaaaacgtaattaaaatgtgcttatttgtcttctaaaggggaaatatcgaatgaaactatactattaattgggaatcactaaaaaataaataaccttataaaaggttgaatattatataggatgtcattatgatttttgcatttaaagagtaatcaaaagatttcatggaagggtaaaataaaaaattgctgtcaattgacacacggatcatgggttactggtcggatctaaatcgatagtcattcggtaaaacgcacggatcttcgtaagtcatgggatttaggtcccgattaacacatatatttgatccaaacgatattcgcgaatttttatcaatcaatgcttctggaatgttttgcgatatatcctgaagttaatgacaaaaccatatttgttagttatcattaaaagttatttccatacaaacaaatccaataaattttgaataccaaaatctcaccaaaaaacgctctttttaaatggagtacttttactcaattacttagtgtcgaaccacaatttgcaattaatcaactcattaataatacacacaaatgcttaatctaagctaacaaggtgatttagttctgtaaactttagtaacaatgcaataacatctcaacaatacaaaacaaggtaaagataaaaaataaacaaaagactaacggatcacagagatctcctgtttaattacataaagggataaacggatcacacattcgcaccttttctacttacaaaacaccaacaccaaataaaaaacttgtataaaataacagagatctaaaaaaaaaacactaaaccaagagtaactaagatataacgttcatgaggctttcgtcgaagcaaatgtcaggccaataaaacgacgcagcttcacaacctccatagcttgagctgctacttgcatccgccggattgttgtgtggaagagaagacgtgacagttttagggttattgtctataagagaagggagaacccatgaagatggattgtcatcatgttcatgctcatgatcagttggatgtttgaccaaattatctataaagtgatcctcactattcaaaggtgtttggagactgaaagggacatgatcaagaagtgggtcaccttgcgatggtagctcactaggactattgtttaaatggtatttttgttgttggagtggttgggtgggttgatcaatgataaaccctagtggaaataaatcttgattttgatcgttagcctcgagttcaagaaccggatcaaaagcggggttttgatctttgttccaagagaccatggagtttaagaggttcatggcatggtgctgatcgatatcgagaatactactcgggctaaaattgttgccgttgttgttggttaatgaagccgaagaattaaacatacgttggagatattgtagattggctagttgggctgcttcgccttgcatggatgagaattgtgatgtttgttcgattaggtcttttagatttgccaaggctatgagctgaggtaaacttgcgaagaggtcggttcttggctgatgagtcacaggatcgatccccatctggatcaatttcttctttagatgtgtgttccaaaagttttttatctcattatctgtacgaccttgcaaatgcgtcgcaatagctgaccatctatacatgataaaaaaaaaaagtattagtcattcaaagttttataacaaaaaaaaaatgaatatatgtttagtcacttacttattcccgagaatggagtggagatggaggattgtttgctcttcttcggctgaaaactttcctcttttgatgtctggtctcaaataatttgtccacctcagtctacaactctttccacacctattcaaatctgaaaagaaaaacaagaagtttcaaaactatacaattcaaataatccatatatacgtatacaagtttatataaaatgatcatggattgagttaagagactagggaaaggaaaaaacctgcgagcttggggagagctctccagcttccatgaccatgtttatgaatgtaatcaataagcttttgatcttcttcaggagtccatggccctttctttagaccattctcgtcgcaacaaggcgacctccccatctctctctgattaggttgtcttattatctctcttgtaagactaccaaagcttgaggttaggacttggtatttatatatatacagtttcgtggaagtttgatcataactttatatataatagtgataattcttcgtccctaacacttggctttctttaatgtaatatgtttgactaatgtttttttttttttttgggtatttttattaactaatttcttagacaaaatctatgtcaccgtttcttttgatacggtaaaatctacttctagctagcgacgaagccaatacgtaccatgaactgacgtatatctcatacatttgtgaagaaaacatatcttttatctctttacagaatttctgctgaatttcattacagcatttatgcatttatacatgggacttttgataacactagtttaagtccagatagaagtttgacaactgtctgactacacaactttctctgagtgtttcgaaatgaatagtgcatctcctaggatgtgtgtgatctaggtgacttcaaatgcaatatttaatcaaactacgatattcaaatttctggtagtatatatgcgtaaaagaggaaatggataatgtgtatatataccacatttacttccatcgtccatttgactaaccacataatatctacattatttccgtctgtagcaaattggtgataaaatcatgtataaaatttgcaattacttattagatcaaatagaaaaataaaatgtattactgatatgattatttttcggaggcaactttgagacgaattacaaaatctttgtggctgatctatgacgagtgtttatatataattttatatataaagttttttttttcttaaaactagtgtttgtctttggttttaaactatgttttaaatacaatttggaaatcaaatcagagtatcttccaggtctccggatcgaattggtctaactatgatctatcaaaagtatgtacattttgattgcaaattttcatggctactacaatctttcacaagtgtcttgctgaatatacttgctttaaagctttctaatgatagataagtaagtttttcataagccaaattaaaggaaaagatttagaaatatctgaagtctaattccatatagacacattgtttttgagctatatacagtatgttcaatgaccacatatacgtattctttttcagtttatgtagctatatcgttcgtggttttttttatatagatatagaatataaattttatgtcgggtcagaaaaaaattgttcaaacattctaaatcaaggggaaaatgttactgagatttatatgatcaatgggggggacaaaatccatgaagtgtctcccttgtgtaatgcgttgtttctgggggtttggtaaatcaaatctatataaaatagtcttctttgtagatggattagataagctatatttatttatggtaatgcagatcatttaagcatttatatccttttctttgtttgttaaagaccagcattcagatctgaatggattttaatatatcttgtacaaatatgaccaagttaaacgagcatgcattatatattaaacacatgtgctcgtcgttcactataatgtagatttgtcatgatttgcaacttttctcttccaataaattaaacacattgttgaagatgttgtggacgagtttatactcgctgcaccatcgtttgctgcggcaaatataatgacgtcaaaagtatatctacttcaaatgtctaatataattttcagcagacttcaaatgtctcatataatgtaccttgaatcttcgcttttaatgctaaattatttttgggtgaataaatagagtataaacgacgagcacatgtgtttaaaagttgcaagattcaaggtatacatttataattacattcaactcatacttttctttgttgttatgaaccattatttcaggaactaaatatacttatttttcatggacgtttgttctttgtttgctttttttgaagagtttaaaaatctcgaagtatattaattaatccgaaactttttttaactattaccaaattgacaaataaaaatgggtatttacggaatattatatcgagttggtaatggggagatcaaagtgaacttattgggaaatttagtagtaataaacaaaaaagtccaataataatggtaagtttggtcaacaaagatgtgaaagcccaaaacaaaggattacgtggttggacgaaaagaaccttgcccatgcacgtaaggcgacgatcatcgttttgtcatctaatgcatggcttcttcttactccatcatttctacgtaccaacaatgaacaatgtataccacctgccttttgtatttggtacacaaaatgaatatctccattcacacaatcacactattatcgttttcaattattcaaaatggatatctcagggggttttttttcgaggtgtcgaccttttaatttctatgattgtaacaaaaaaaatgattttcgggggtggttcatacttcatagtctacttatatatgtttttactacattcaaattttaattaattgaatttacagtatagtgtttgcatgttatatatgtttcttctaaaatcgattatacatatataggatggtagtcgatcaataaaaagccaagaagtatttgatgtccaagaacaacacatgccacacgtacatgatttaattcccgtattaagtacatagtatttgtgtttgtttgtgatggttttataaaacgcattgaaataaataaatggatcgaaaaactgaagcttgaagtgtttggttggtgcagcaaactctccaaacctgcaatgcttccatctattataaacacatcaagcacttacatactgtttaatttctcatgaataatttagtttgtttgtttacttctatcgtatgtcacataactttgaataaatactttttggttttgaatcatgtttcatttcttacttagctaactgcaataacgaaatatttttccaaagatgacacctcaaacccaatttttcttttccgaagtaaataaaagaaaccaagaagtatataatcagccattttttgacatgcatgtacaaaacttaggacttttgaaaatataagtttgcttgagacgattcagacgtgacagaatctaccaaacaaattcagacgatttgacattacaaagttctctttgtcaatttgttattcatgcatgtattgattaagaaaaagtaagatataatgtattaatcctcacgcggttgcttgagaagtttattcttcaaacatttgtcccgacgtttgttgttctctactaagttttcttaattccgcataatccttacatatagatttattatgtggaaaaaagtgttaaagtagaaactcggttatatcgtcttccacaagtcatatattgttccaagtttcttaaaattattctttacaatgaatgaaatattcagatcatgaatttattttcttttacatttttctcctaataagaatttggaattcgtatagtttattaattatacaatcctgtcctcatacgtacgactacaacttaattaaagacggtcaatgattaaacaaaggagcaaagaagtcagattatactaactatgtagagcaattgcataattatggatcataaaagaaatatgtcgttttaaatcaatgcaaaaacaaaataagaaagaaaaatgaaatggttgatggagaaatcgtacttttttcaagggtcagctaaacaactgaattgcttgtacttttaagtcttcaactaatacataatgtcttttaaaaaatgttatatgtaacttaacataataattaagaaaacgagaaagaccttgggaggacaagaaactgacgacattgtatttactggtttcaccaaagtcttactcaaaagatcttcacctttttggtcgttaacgaaattttatcttcgttgacttaccattttttatatgttagttgcttttttttcccaacatgtcgacgttcattaaaattaaaattatatatatatatatatatatatatatatatattgtattagaatatattattgaaaatgttattcattgttttttcacttcttttattcatatatacttgaatttatcataaatgatgtttacatatcctatttaaaaaatatattttatttttaatataattttaggtgatttggattatcatcgaattgggcttaaattgaaagatattaattcttacatacataactaaagcaactccattcacaaccgatttaagcctcttgcttaatctggggtgaattactccgaccgaagaaacttaaacgtaccaaattttctatacttgtctctattaccaaactagatcaattttgttcaatcatgagacaattgtttctcatatattggttcaattgtattttataacaaaaatttagttatataattaaactttatattagactactaaaaaaaaatatttgaggaacccaaaaaagtatctcatatagactttcactactatgcactcgtcttcgtatgaaattttcacatgttgcaattcttcattatatatagaggaacaggggcagatctaaagtgaatggaggccaatttacattttattatttctttctcatattttcattaattaaaaagaaaatttcattagttaaatatggttggtgtctcatacaattttcttccttaaatccgccaccgtagagggatcgaggtcatagaagcggattccaatggtttcacaaatgattttaggcagtgaatgggagatgcgtttatcaaacagaaaggtgtagaccgtttagttatcaaaaatgtgaccattcaacacaatttttaggtagtaaattttttaattagaaaaatttagaaataagcaagtgtggttcagatattggcaaaactcatggtgcctttgatatctctccattaagatgtggtaaaggtgcaattattatttatttatttaatacaaaaaatctggaaaaaaatcagataaataaaattttcacaaacttacacattttatctaaatttctgtttatgaaacattaatatattaaaaataataagctaaaattttataattattatatccgcaccatattttaaatattcttcattcacatattatcccgtaccacttgttttacactaaccatacttgtcccgtctaatgtgtttttcttctacgaaacgtagttaaaccgcactgcactattcaatccgcttgtcccgtattgcccgattcgatattaccattcggagccttagtctacaaatcttgttagtatgcattgaagaaaaaagtctgtttattccttttttccaaataaaaatctgattattcaacaatcaaaattacgtcgtttagttattgctcttttcaatttgtctgttattatctttggccttttatatttggaagtaaacacagctactttgtttgaattcataaagttgaaggtagcttatgaaccaagattgtccctcatagttactccaattcaggaattaaacaattgttagacttatgttcatctcgtgttaagtcccaaatcgttaacctaaccacagactcacaacattcgatggtatcacaagaaaccctttgtttacttttacctttatggatcagcgacatcatcatacacatatatacatatgtcactttttcactgaaaacatgtcaatagttttatctatttctttttaacttctgtggaaaaaataaattcgacttagttcgtccactatattgtaaatctccggctaataattaccagatacgtggtgtgggttatatatactaatagtctccggagatttttccgtctccagcaattttgtttactgccgatttttcctaaatcactatagtgagctgttttactatgcctaaacttattatcatcagtattattacaaaaccaattaaaaattacaagaaagtggaaaaaacgaatcttgcaggtaagtttagctattcatttcgcagtttttacgtgcgtgaaaactgcacttgattggttagctatttgatgtagataatattacttacaaacttgaaagctatacttgattggttaactagatgaatttcacaaaataagtaagttatattaaatatactttatagggaaaatcacattttaaatcacaatttggagtccattcacggatcgaccttttgaagtttttggagaccgagtttatgataggtctgaactaaacccaaagtccctagaagaccatcataacacgtagtcagacaagtaggctcttatttatctattctctatattatgactacgtttacttttactaatttagagactacaagaaaaaaactaaattccaaccgccatattagttgttaatttgtaggaattatatgtttctaacaaatttacaatagaacatatatttgttggaatatgatcgttggaaatttgcatttgtcacaaatttattggaaacgtttccatcgaataattttataaccaatttgttggatagttctgataatttttttatcggacatttgttggaatttaccgtgaaatttctaacgaattgttccaacatatattttgttagattgtcattaataatttgccacaaaatttcaacaattctgaaggtttgtttatgggaaactactaataacatatttgttagaattttgttgaaacgttttcttggaatcgtgtgagaaatttctgacgcttcatttgttggaacttcatagaaatatattgataatttaattgttgaaaatttattgatatttttcattgtaaatttgtgaataacttctgataatttaattgttggaattttatcagaatttactcgttgaaaatatgttgatatattctactaaatttccaacaaaatatctgatgaaccatttatcaactttgttggaatatatttttaggtaatttaataaataaaaatattattaaattacaaaataaataaaaataattaataaaatataaataataaaattaaaaatcataataatttaacattttaaaatctcaaaacactaaaacatccaaacataatattgaaaaacaatcctaaatgcttaaagtcttaatgaaaccaaattactaattgaattcaaagactaccattggtgttcattgtttgttctcatggaaggtggaacttcatttggaaacttgttctgcatcatagtaatccaaaaatcaacatctttaaacttcaactgcattccctcaatcacttgctccgatttctggagcttttcttgagtctcaagatacatttcttggtaatttggagatgcatcaacactaggatcaactaccggaattgaaccatagccaaatttcttgcctttattcacttgaacttcctggaatttcaaaaatacatattacaattcacataagaaaaaagtataaaaactggttgttggttattagaaaaaaacacaaaatataattaaaaaataatagaagtttcagcattttaccccttggtaaatggcatcaatttcttcttgtgtaagatggctagtctccaaagtgtcaccatcgtcattgtctctttgactgagaatttggtgctccatgtttcgacattttttggcgatcaactcagcttttttgcagacaaatacaccatcagactttctcttgtgggttgcttccataaaagtaaccatatctgggagctctcctgtcaccttatcacgctaaacaattttgaagcacacaaatatgtcattataaaaaactgggactgaatttgatagaaactatatgaatgattctttggtaagaaccgtcgatgacaatcaaaccaacaagatttttttccatgcttaagctgaaatgcatctatagtatcctgacagtagggacatgatagccttccatgcgttgtccacccagataacattccatatgctggaaaatcactaatcgtccacatcagaacagcacgcatcacgaaattgttctttagagaaacatcatatgcaactacaccctcagaccacaataattgtaactcatgaatcaaaggttgtaagaatacatcaagtgatcgcctaggatgttcaggtccaggaacaagaatgcttaggaacaaaaattctcgtttcatacatagagatggaggaagattatagggtgttaagattaccggccatagtgagtatttgcgtccagactttccgaatggattaaaaccatccgtacataatcccaaatacacgttcctatgctcatttgcaaagtctttatacatcgaattgaaatgtttccatgcttcagcatcagaaggatgcgaaatattcccgtcggatgaatgctctgcatgccatctcataggacctgccgtgcgttcagattggtataacctcttcaacctatctgttattggcaaataccacatacgcttgaaaggtactcgactttttccacttgtaacctgaaatcttggcttctgacaaaatgtacatgcatccagatttactgtatctctccaaaatatcatgcagttatcaacacacacatctatcatctggtagggtaacccaagtgaagacaccaatttttgtatttcatagtaagaaccaggtgccaagtttggttctggcagtaaatccttcacaaaatctgcgattgcgtcaacacaatcctccgacaagttatactctgtttttatattcatcaaccgtgttgcagctgataaacgagagtgaccctctttacagccatcataaatcggtttcttcgctgcatctaacatatcaaaaaactttttagcttctaagtttggttcttcaattccactttcagttgtttcacgaaaagcatttgttaccatctgtattacaccggttggatctctaattatattctcttcctcttcattactattattatcttcaggttccaacccatgaatttcatcatcttcattactatttgctaaagtttcgaaatctttcccatgagaaaaccatatgtaatatccaggcataaatcctctactatataaatgcttccaaatagaatctactggaagaaatttctcattaccacaagtagaacaaggacaatacatcttaccacactccaatggaatctcttgatttgcagcaaaacgcataaaatcaacaagaccttctttaaattcctttgttaattctccagtaccttcatctatataattatacatccactcacgatttttgttttttggtcctgtcattgaaaatagtttttacaaaaaaaagagagaaggagaagaagaaaagtagaagaagatgaatcttattttacctaaattttttttggggttttccggttttttttcattatttccgtttttttttttccttttcttttccaacaaatactttgttattaacttgttacaaataaattcccacaaaaaatttagtttctaacaaaagattttgttaataatttccaacaatttaataattattgctaatttgcaacaacatcatatttgttgaaaaattccaacaattgtcctacgacgtttgtgacaaatttaccataaccaaaatttattggaaatttgcaataaatattcaataaataaaatatttgttgcaattttataggatatcgattagaaatttgcaacaaaatacaattattggaagtatcggttggaatatcatatgttttcttgtagtgagagaatgttttattttgaattcatgtatgacagtttgacatctacatcatcatattttcctttgatgtgatggactcgctgaaggacttactgaaggtttcgctgaaggactctccgaaggatttgctgaagtacttttcatacaagattattcggtgccaaataaggaaagagacattacccttattaatgatgtgtctaagggaatcaagaagatactccaaaccgtccataaagttacccacccgagttatgctacacctcacctcacccaagacccgttgactcacttcttttttcttttggactcgcaggaaagcacacctcaacggctcttttcttttctacatgtatgcatgtttaagagcctccaagtgatgctaaagcttccaagaaaccgcatcttcctccccaagttttctagatacaaattaaggttccacttgccttatttggccgatcacaccatcaagcctctaacggctctattcctttattgtttgcgatttgtttcctttttttggcatatagccgttgtactaaaacctctatataagctctctttcgatttcatttgtattcaccaatcatattagaaattatctcaataaactttaagtttgttttataaagagttgtctttatgttttgtcatttcaagttgagtgtggattcacttctcttgtgtgattttctggcttaataacttttggattcaagttgttaaaaccgtgtgttgattgtggattcattcaacaaaccctccatctaccatctctatcatcattcatcaaccatcaaagcttcggacctttgcttccgttgataagatcattgggtggattcttgcgtttgcatcagtcttcatcgaaattactttttgttattataaacaacttatagttatcatatcacttatgtttttcttcttcaaactaagaaactctaaaccccaaattcatgtgaggatattgaattttaaaaacattagacaacgattatggtaagttgtcataatgatttttttaaacacttttactttctttctttatttaactgacaaatgttaactcttctgtaactttcgttagtatttcgatagtgttctgtatcttttaaagctgtacaaacaaaaaatttaatttggagagagtgttagtaaatataatttggaggtttatatagtgctagtgaaatatatatacacaatgtcagtttgaaggtttaaaatatgattttccctaactttatataaataaaacaagaaactataaaaattatgattaaataaaaacagaattaaagcaatatataacatcttatgtaaggcccttgcctttagaaattataagtccaagcaacaatatcactaaaaaacataccaacatgcaacaacataaatattgtttaactaaggcccttgccttagaaatttattgtaatgagtttaaaaccaacgaaaagcatgaaaaagtacgactctccttagagaatcaaacggagaatactcttctcacttatttcaagatttaaaaaaagaaaaaaacaccaaaagagtttagattttcgaactggtaacttaatcaaactctcactgaccatcattcgcagttaagcatggccttgatcctttgaacggcggagctaaccaaggtattgactgtggtggcagaatctttcaggttaagatctgtatagtaactcggaccggtgacaaagatctgaaaagccaaagtgaggagtgtcatgctgccaccatcaacctcgctagaggaaggatggctgtcacgagagatgatgaaaccggaagggagaattggaatggtggaaggatcgacttggccagaaatggcggagtatgctgtgtttagattcattggagcgtataccaccatacctcctaatgcatctatgaagccatcttgtagtatcatcaacttatattcccctacacttgacggctacataatgtataacaatagtcatagttaaagcaatgccattatgccaaggaaattgaatttgtaatgtgaattacttcttaattattcaagatttatgccgatcctatttaatctattctaacgtattcatgaccacaaaaatataaagcaaaactgaacaaacttgacccgttgcatggatttttagaactttttaacatctctatttgaagtaatgctagttatgataaacttaaagaagcaaaagaaatgtgtaatttaaactttaatcataaggttttagtaggagtaatatatacatttacctggagaaaagtcacgttgttcttttggtcaggtccggtgacaaaacgagcagcctcagtcactggatttccttggcagtgaacgtcccacttatgtacatatatacaaacattaggtttcttgttaattaatgtgaaaaaggacgacatttaaatatggacttatactgttaatgaaaccatctattctttacctggtgacgaacctccagatttctaaggaaatcgtagacttggagaggagggagagggagagataaagatgaaccggcgcagacgatgagaccaggcggttgaccggcctctgtgtttgtccgcaccgaaatcctaactccgctattgttggctccagactgttgcgggagatcgagtttgtcagacattttcattatccatgcaaagttcttcaacattctttctcccaaactcatgacgctccttcttccttctattgttttcacaactacaaaagaataaaaacattttaaaactttacaaatagttaaaaagctttaagtaccaaaagttttgaaactagcacttgtcaatatactaactaaatccgcatatataacacattttaagttacttatgcactaagtgagtcatataagtataggtgtaactaataatgacctccggggtagtcggtgggagggaagtcagtcatggagtagagagacagcctctcacacatcctctgaagagtagcggtccaacgtcgagctccatagccaaaaccaccgtataagaggtctctataaagctgatgtggccacactttatcagtcacttccacatgctctatccatgttacctgcccattttctttgttatttttgaagatttttttttcaatcacacattgctttaaaattaagacatatatcttatgtgtgtgtgtgtgtatgtaaacttataaaaatatatcaaaaagagagggaagagagaccttagaacgaccatggggcaaggcttggattagaacaccggagggacgtttggtgcaaataggagccgtagactcaaattcaacgttttggagataacaggaaacgtcagctatcaaccagagatcttctttcatttgctggcaagttcttaggattataaactctctaggtagcaccaatggtgacagtatgtgcagttgctcatatacctattttatttaccatccagtttaacatttatgtaagtgatctactgaccgtttaaaatagaactattcaaagaattataccactcttgagaaagtttgtcttggatggtccatggaatccaacacgtgaattgttttagcttcggtcacaattgttggaaaaagcctcgcccatttctcctgcaataatattgtgttgaaaatgtaattgtaagaattattattacatatatacaatcttctaaaatatgttatagttagtcgtcgtacagcagagcacgatgcatagccggaaatggggctgtttatatatggagattatacggtaaatactatttttattgaaaaatgtaaacgaaaaaattgttaatataattgtctatgcatataatcataatcactaattttatagttaataagtcatgacaataatatttctgataataagaaaaatgaatatacaaaaatatccgaaacttttcatgtttcaaataattaatagacattaaaataatatttttactcaaacctgcatttttcttattaattcaaaaattaaacgacgtcgttttgttttcaaatctttggaaaaaaagacaccgtatatgcgtcattaaatgccacatacacaacattgtttaacatatatatagaataaaacgatataacattttttaccatacaaggtattttaaatctagtatatcatgaagttattaatagtttctgaaatgaaaaattgttttgatactaacaaaataaaactagagaaagattttagttatttttgataaaaaaaaatgtatcaagaaatttgataatgttagcttagacataaaattgcatgagtacgtaccgtatttaagaacatgtcgaccaagtttcttgcatccatttgaaccaccacgacttccatagaagactcatgatgagattgaagagcacttcggctcttaagatggctattcttagtaaaatatctcttatagttccctggatcaatgatggctctaccatcaatagttgacttaatccacattgagtgttccatttgaatgagactcataacctctgccaccgcgtttttcgctatttcaaacatcctatttttctccagttgagatagctgttggaaatgctgcagtagtactggtttaggcagtggggtggtgttgatgagttcacgagtaaatggtcttcttaataagcttgattgttgggggagatggttagaagaggaaccatatgaagcaggacgattattggaggttgacccataggttgatggaccatggagatcaggtaaggcatcgacgctaggtattgagtaacctccgtgcttggttaggtagcttgagagtctttcgtactgatttcatattttgatcaacaaagatattagtgatttttattttcaatttagagatttagtgaaaaaataatctcatagagtgccaaaaaagatcactctctgactagagtgccacctcaacaacttttatttttttattgtaaaagaatataattaacatgaaatttcattgaaattattaattttctaacactttttccaactggattttaattagaagaataataagtttgactaaatttatacatatagaaataatcttacctatatttgatgtaatactccatatttagggtatcacctcaagaaaattctttcttaatatttgattcttaagtaagtattacactaccaataatttacttccttagttacttttctggagtaccaaaaataaatttgcttaaaaatatttggtccctaaatatttgaattcattagacaatcttttcctttaaaatttagttaatatcagaagtatttttaattatataagttatgagcaattaaaatattttaatatttaattttatatcatataatgtatacaacaacaataacttttttaaaaaatattatgcgtgcgaaaatgaacgagtattttgtaaaaccaaaaaagtaataaatcatattatctctctaataagcgtgtaatcacaaagtttgaattcagttaactaattagacaatttatttcaaaacattactagtagacaaactaaatttattagtgttaaaaattagagattcatttagtgacatatgagctcataaaattaatattaatcaaaagaaaaaaaatatagttttttggataagtatttgcataaacacatacctctgttttgagaatgacgttctttgtacgaagtttttggagattgcataattgttcttctttcccatgagggccaccacaaggagggcagagcacagtctcgagtgccttttccattgcttcatttacacatctaattttcatgttctctactctaagtgctatgttatctgctttttcattatgaatctacataaaataaattattctcagttttttggaggtgaaatttagacaaatcttcgtttaaattttaaatatgcaattatcgtgtggaatttacgatggtatacaacaacgatgttgaacaataatgatgactagtaaatcactattatttggtttaactcgattaaatcaatctgtattataaactaaactagattaaaaatagataagacaaaaacaattaccctggcttgagttcttctgttttgaaaccaaaatttgatttgtttgtgtttcagattcagttcgttacccaattgacgtcgctgagaatcgtctggatgtggacattcatgaaaaaaccttaaatcaaattttaaaaaaaaacattaactgtgaattaagaagccaaattttataagaaaaaaaaatctaaattaattaagtaaattaagatcttacgcttcgagcctttgaacttgatgattagagtgatggcggcgattgttggagtcaataccctcttcatcactagaactgtcattatggctagaatccatttttcttatacccactaaaaacaaaaatacaaaagatatcaaaaacttcaaagatatgaacaacttaaaagttgtttatatagaattctaatagaacacaatattaggaaaattatgtataaaagattttcttttgggtcaccaatttaaatatttattatattgcatttagtttcaattagtaaggcaactagtaggagaatcctcaaaataaaatagaactatttatggaataaatctcattatagattttcaactttttggggacattacattaaaaggtaatttatgaattatattttttcaattctatttcagtaaaaagaagaattatcttttataatcatatatgcaagttgaccaactctcttcatccttccgccaagtcagcagtagatagattggcatgtgtcacatcaatatattaattttatttattatttaatttaatttatttaagaattaaaaatcatgagagacatgtgtcacatcgatatattaattatagggtaatattagaggatgaccaaatttgacagcattattaagaaaatagccttcgtgcagaaaagttggataaataaccttttttgagcctgcgaaataactattttaccttttatagatgagagaaactctttcttttcgacaatagctgctacatgtagggaacaaaagacaatagaaagtaatgattacaccgctacttcttaaaaatcatgcaatattagaccactacttattaaaatcacacgcaatatctcttataccttaaaaatgtatacgtaaaagaaaatttagttaaaaaatagccatttagaaacagttgtgattgagtatagaaatgttgcataagatatttaaggacatgctatttatttttattatattagaacgtaggtttattgttttgacaatatggtaaatgggtttcaacagagataagcaaaccacatatgtgttatttatagattacatgtgattgtacaaatttgcatgtgattataaaaaaaacatgaatcatgaatcagtaacttacttgtgattttagtaaaaatatggattattagtaaaatgcacattatctttaaaaaaatattatcttatcaaaaaatacaaacgttttaggaaaatatacatatcaaatagaaaaatagcatgaattattcaaaaattacatgctatcgtttgaattgagacacacggatcattgtaattttagtaaagaacaagtattatttaaaagaaactttgaaaaatacaatgttttagaataaaaatacatgtcaacaaaagtaaacggcggtggtgatgaatagggaagaggcggtggtgttatggatatgatggtggtgaatacggaggcggtagtatttacagatctagtaatactaaatacggaggaggcggtggtgttacggatctagtggtggttattgttgtaagggatgaggaggttatggaagctttagtggtaaaactatttgcctataaagctatttgtcccttcaaccaaaactctattatagggatatgagagtaatttaaagttggtttccgacaggtactatacgcccatggttagtttctataatattatgaatttcatagtcatctagtgcatatacccttaattatatttattaattaatttaagaattaaaaatcatgcattaattctttcttgcatacaaattgacatgttttaacttattaattgaataaatttattttaattaagtacaaagtatatcaaacttgtatataaattaaattatttaaatttagttgtataagtcgtataaacttatgcataaataatatgatataagaatttatttcatggttttatatagtataatatatataggattagtgacaataaatattagttgaatttatggtttatttatataagatactaaattgacactagtttaatttcgtttattttaaaaatactttaaagacaacaattgttttaaaggtaagtaattgtaaataaggtttattaatgtaattaaaaacattaaaaaatagaatgaattatttacttgagagttagagaaatacattaaaatgataattcgataaaatacaaaatatgttttaccaaattaattcaatcgatgttatttgttataactaacaaattatatgaatatactcataccttgtgcaggtgttggcttagtattttaaattcacaaccatcgatgtttataacgagctaatgtataacacatatagctttaaatctagagtataataaaaaataaattttaatggaaatatagtaataataaataaaagatactaaatttcaaatattcaatggttccgtagaataatgttttttaattacttgataaattatttatacaaaattaattaggtgatagttcctcagtattcctcaaaaattaaaagccacccaatatatttttgtaaaacattatgcattactaaataaaattttattttttaattaaaaagatataatgagaatcaaaatttcttcttctcatctttgtttgtttctttggtcatttttaagagctaaatcatcttatcatttgtatttaaattgttttttctgcatatatgattcgaatttatcaaaaacaaaatgttgaagatgcatccaaaataattgagaagggattaagtgatattattacccaggtctagtcgacttaaatgattttcaaaaaatatgatgatctgttgttcttacaaactcagattcctagctagtgtagagcttccagagttctcattgtgtcttgtttgtgtctttacgagaggtttggaacaaatttcttgatcttatcgttaggtttgatcccacacgcgaagcaatataaagattgtgatttttagtattgtgcaagaattcacaaaacacataaaaatatcttgtgatgatcaacaagactagtaaacaagtctatcaaccttacatgtagaagtgcactggtcgaataacgaggatgagatttgtaggtcaaaactgtaattgatggtaaataaacattggcgatcatgatgttataaggggtatcaaaaccaaacttaattgagtgtttagcaatgtggcatcacagtaccattgggggaatcagtattatattttactttgttactgagaaaatattcaaatattggttagtagatatagactaaaatagttaccgaggaatagatattattaagatgtgaccacactttctcatgaacttttgtagcaagttcatagaaaaacatgtgtaaaagaaacatggtgttgctatttagccgcatatatatgagggcttaatctcgtcgctatttaacaatagaaatagtcgacgtcatttgtttctaccaagggacttaaacttgtcctttgtcaatgcgtagttttgtggcttcggattttaaaaaattgtttctgaatttatatagatctaacaacctttgtaagattaatgctttagatactaatatactatcaatgaaaaagagtatttactttgttttcacatttataggaaaaaattagaaatcttcatttacaaaacgacattcgtagtttgaggttattactttttggcgaaaagaaaagaaaagtttgaggttattactaacgatgccaactatcaaaacaaaatttatgttagtaaccaattatgtgggtgtttggttgagtagtaactttcctttttactgttgttcggcagtagctataaactttttgttgtatgattacatgtgttggttgtagatgtagagtttgattggtaaagttaattaaatattgaggattcaaaatttaagtttatcaatttaaaattataacataatattaaatgagataacaaataaataataaatagtaaatttcatatgtataacacattgtttggtcaattttataattttttttacctcaaaaatatgataagatttttttgttgtcttatgtttaaagtacaacgtactcatataatcttatgcttgtgaaagttaaaaataatttctgtcccgcttgatgattatgtcattttattctacaaattttttttggcaaccgatattaattagaattcaaagagttaatccgagagatattgtttatatatatggtatgatgcaattcggtataattctttcataccaaattatccgtttttacatttacactacaaaaaattaaaaataaagaaaagtttgtgaattccttcttgtcattccaaaatttatcttttttttcctaatttttcggtataattctaattactctatgatcaaaaccataaataaagataaaactgaacaaacacaaaaacttggatccaaaaatacggttgggacattaccacatttatggcggcattcaattcaattgattgccacgcatttttccaaaagaatataccctatataaaaaaatccattaaatattatctttaacacataaatgaaatctttctcctacatcctacataatctgtgaatcttctttccatgtttacactgttataaagcaacttcaactaatcccgttttaaatataagctatctactctctcttagccataatgggaaacgaagcagcactaagatcatcaatggtaggtcttgcagtggtgatggtagttgtatggttatggacacagtctttaaagaagacggttgttacttacgccgtcggtatttctcttattggcggcatacttttgccggattgggacttctttgatcggagtttctctcggtggggctatcctgtcaccgccgaggaaagatcagccgctctcgcccgcaaatctcatccttcaaggttacttgtttatcttatctcaatatcaaactagttgttttatcatatcattatatattaatctttgaattattagatctaaattttggtttagctttattgccttaaaacctattggataaacataaatcatacatacaattttttttttgtcaaccgatattaatttggattcaaaagagcgaatctcaaaccatacatacaatgttaggttccatttgcaatgtatgtattattgtatatctacgaattaggtgtacaagttatgattgaatttgtttattttcgtgaatattttctattgattttaattgttagatccaaattttggtttggtttactggcctaattaatggataatggatacatctttggaccaagtaatgcaggtttagagtgtaccctatgaggatggttttatacggcacggtctatggatatgcagtgtataggtggtggatgttcgtatcaaattattgaagccatattgtatttacttggtccatcttttttatggtttagtgttgttgattaacaaaatatttagcttcgttttattttaactttgtagaacatgtaagactaccagattacatattggtgtgtccacataagatggacaaaaattgtcaaatggattgtggtatacaaaattgacccaaaacaaaactcctagagactctaaatgagcattctaccaccaaattctgtcccacatcagaaagatctttaggttaaaagtgaatgtctctaggttgtttcgcaagaaggagcaggagggggaggaggaacaccgaagacccaatctagtacgttcaagtattttgatcgaaatacgtctctttcttgtgcgtaacaatgcattataatggctgtcgaaacgctgaacacaaccacatccgctcttcttaaactcttgggcggtcgaatgtatcctgcctctgtcatgcaagtaaagaagctctctatcgccctcgctaagcagtatagtgatatctctatccttctgcttttcttctcaatagctaaagccagacctgttgggaactgcaggagaagcctaacgttaggtattatattaacaatgatatgtgatgagaatggctttcgtttgtactgttgctatggccacaagcggtatgttgcatgtctcaaaagtgcggaatagtagacaagtccaagccctattttacatcattatagagatggtctaagttccaacttcaagtgagaacaaaacaaaaatcgataagagccttccaagaattgattctaaccaggcagaagagcagtaagtagcgagaaacaaacttgatctcgctgtgcccagaagacccttgccaagtatagagtattgcctgtgatgaaacatattatgaggtgatgaataaaatcagaggatatataccattcaatgagcagtttagacataaacctattacttttttagcaggtcttgacgatggactattagcgctggaatcaaatacacagggacatagacaggtaacgccctcttgtaagcttgaaggaaaaatgtaacaccatgcttaacacatgactcatttccatgtattatctgcaagtaacaacataagtattgcgtaaaaccatgcatgcagactcattgacgatacatcaactatcgacaaatgctttgttcgtcttaacaacccaaaaaagatagtatcatagaaaacttaccgtacaggggactttcatggtaggatccagtttgatatcaactccaacagacttgtaatatttctcaatcgctcttaaattagtgaacggttgcgcggttgcgatatcttttacgccttgtaagattgaaagatccttcccaccttgtttgttaaggaaagacttgtacgatgaaggaaggctttcttgtttcaaaatgtaagcagacctgaaaaaaaaacacaaaatcgctaatctaagaatctaataacaaccaagaacctagtaacaactagctgaaccacaaaatttaatatctttgtagagagaaagagaaagcatacaaaatctgtgaggaagagagacacatgaggaataaatctccatgtttccaagtaagtggcttgcaaatggtaccaaagcgtttacttttaataccgcaacgcgatgcgagaaccgcagcacgcatcaatatataaacagccaaactcgtatgttgcgtatttggccctgtgagaagcatagatggtccagccaccaatccagcaaacagggccctccattttgcagttctggattcagattaaattacttcacagtgatcaaatctgaagaaattgatacttcactatttttgggtttaaatcacaaaataaaagttacaagattagtggggacaaacatgcctcttgtctcctgctaaagcagcaatagcttcatctacagaaacaaaagtcccagcaaaagttcctaagaacaatccatatcttaacgtctccttaatccccatagcgatagcttcactattcgaaaactctccggttttcctaaaccgactacgattagatttcagatcagatgagctaaaccggaaaatttgaaaaatcgatttcggttacctagattgaggagaagatctacgacgacgagcgaaacgagcgacgattgagaaaatagctaaaccaccttttaaaccagtacctatagtgaatcctttgacggaagcgacgatgattcttcgaagcttatccgaatcattcaccgattttgatttcgatttcgaatcggagtttttgcattgtttgcatgtaaactcatccgatttaccgaaatcgttgccatcgttgtcgctggagatgcatgatgagcaacgagaaccgttcgtcgattcgtcggacggcgacatgacgacggcggcggcgagaatcttcggattgcgccaaagtgatgctttggtgggaaattgggaattggcttttgaataaaatagaaagaagaaagagagaaccagaaaaaggaagttagggagagtgacgaagacagcgaaatttttagatttacagggccactaagaattatccagttgtcaaggagtgactgacacgtgtcggttattttttttttttcctttgtgaatcttttgattcttctgctttgggaaccgtaatgatttgtagtatgggtttgtggaaggccatgggcttattttatgggcttgataacagacaggataatattaaaaatttggaacgttacaaaaagaatacgaatattaaaagagataaaaaaatgggtgaattagctcaataaccatattccataaaaatattaagtaactaacaccataaacgaaggaattgagagagtgacgctacgggtatgtgaagttacaacccactccctaagccacgtttctgtgatttcttgtacgcgcgtgagggtaagagcgagcttctttctaccagctgacgtgtctcctttcgaagccagtaaaaaaattatcctagcaccgcttgagaattgtcccatcagtaacataacctgcagatttttacattaatttgaataaaatattccccccaaaaatatcggagcagaagatgctctgttttctatttattgccagtaaatgctataccttttacgcagagatctaacctgcaaaacagaacagtatggatggtggtgaaaatagtacagcagtaaatacagggaatcaaaagggaaaggtacaaaaccatcgctttcttgtttctgtttttagtctctcgtgatttaattgcctagtgtaaagtttccatttaaaaattctcacttttacgttcgaatataccacttacctagattgtagatctgctaaacaacttgttagtatttacttaaattagatcgtgattcacgctgtatttgttattccgtaattaaaagctacgaacgattaaattggaaaactgttattattgattgatatttacatttaattttcattatgttctttctaaataatactgaactatttccataatccatgtagaccgcaggacaagatgaagtattgttggtgattggcgagtgggtcagggtggataatctagcctggcagtttgaacctaagactgtcgaaggatcgtcattcatccgactcagaactaacatgacgtatgaagagctatctcagaaggtgaaagataaacttggcttgcgtggaagaggcatcacagttaaaatggcataccaatttccagagtggatggcgatagatgaaggcaacggttctccacctcaatacatcagcgaagatagtgatgttacaatgttcattcaaatgcggcggcatatagaggaggtcaatctatgtgtaactgtcgtccaacacactattccaagttctccggttgctgttacggacaagaacttcaattcagaggacagtgacgattcagattatgactcagaggaggaacttcaccaatttgcacttgatagtgccgtgttggggcctacactagagccaaccgctgctacaacagagacagaacaacaccgtcgtaccaggcgagagctgttccctacaggaggaatcagtattagagagcctgaagaatgcatccgccttaaaagccctgactgtctccctactgacaaagggaaaggaataatggacccaattgggaagaaagggaaggctggtccaagcagagcaacggtgacagatacctcaacagacagtgatgatgacttgctcattgttccattcacactgccacccaatccaccagctatcaccattccggaaaatgctgacatcgaaggcgcagattcctcacgggcagctgtgggcacgcctcatggcaatcatgtttctcctattggtaatgctgtagcagaaactgaccttcagcgtcaaaacattcttttttgggggcgggcacaagaagctttaaacactatcctatccgatttcagtgatgaccctattctttttggtcgggacgccccaccagtatttaacgatggaaaaggtgaaggtataacttgcattccatatctacatatagattttgtttgatgcttgttgcaaaacaaatttggttatggagtaattgggaaaatagagttcacaccttatactattctatttatattaatcgtgtactatttatattacagactacaaccatgtcgctgatagatgttccttttatttcaggtgtggactctgctttctttgacgttaaatacgaaggagataagctgtttgttggcagagtctttaagtcgaagtctgactgcaagattaagatagctatacacgccatcaaccgcaagtttcacttcagaactgcgcgttctactcctaagtttatggttctgaaatgcatttccaagacctgtccatggcgtgtatatgcatctaaggttgatacttctgacagctttcaagttcggcaggcaaatcagagacacacatgcacgattgatcaaaggcgtagataccaccggttagcaaccactcaagtgataggcgagcttatgcaatctcgctttcttggtattaaacgtggtccaaacgctgcagtgattaggaagttcctacttgacgactatcatgttagtatatcatattggaaagcttggcgggctcgagaggtggcaatggagaagtctttgggatctatggccggtagctatgcacttattccagcttacgctggactccttcaacaagcaaacccaggcagtctatgctttacagagtatgatgatgatcctactggtccacgccgtttcaaatatcaattcatcgcattcgcagcatcaattaaagggtacgcatttatgcgcaaggtcattgtagttgatggaacatctatgaaggggcgatatggtggttgtctcatctcagcatgttgccaagatgggaattttcagatcttcccactggcttttggaatcgttaacagcgagaatgatagtgcatatgaatggttttttcagcggctaagcattatagctccagacaatccggatttaatgtttatctctgaccgccatgaaagcatatacacaggattgagtaaggttagacacaaccatccatctcacgtttcttcatatagtatacatatatcgatttacttaatatgccaataagctggttctattttgattggataatgaatgatttccctaatattgttgcaggtctatacgcaagccaaccatgctgcttgcacggttcacctttggcgcaatatcagacatctatataagccaaaaagcctctgccgcctaatgtctgaagctgcacaagctttccatgtcacggatttcaatcggatattcctgaagatacaaaaattgaaccccggatgtgctgcatatttagttgacttgggtaagtgtttttctcagcttacatatattgttattaacgtggctgagatgaagttgactccataacctctgtattttgtaattcatataggattttcagagtggacaagagtgcattccaaaggccggcgtttcaatatcatggatagtaacatatgtgagtcttggaacaacgttatcagagaggcccgcgagtacccgcttatctgcatgctggagtacataagaacgacgttgatggattggtttgcaactaggagggctcaagccgaagactgccctactacattagctccgagagttcaggaaagagttgaggaaaactatcaatccgctatgtcaatgtctgttaagcctatctgcaactttgaattccaagtacaagaacggacaggggaatgttttattgtcaaattggacgagtctacttgttcctgtttggaatttcaggggttagggatccttgtgctcacgcaatagccgctgctgcaaggattggcgttccaacagactcgttagcagcaaatggatattttaatgagttagtgaagcttagttatgaggagaaaatctatcctattcactctgttggtggagaggtcgcaccagaaattgctgcaggaactacaggagagctgcagccaccattcgttcgccgtccaccagggagaccaaggaagatcagaatcttgtctcgtggtgaattcaaggcaagtacctattagtaaacattacaatgtacttcttatctgttaacaagctaataacctatctacttttaatatgcagcggaacaggacaaggtcccagaggaggtgttcacgttgttgtggtgttggacacaataaggcctcctgccgtaatgctatataagccgtcaactactgctatggggtgctaataggtgttatgaagaaactttctggagtgggcttaaataatggttgttcccgcatatcttgcggaagcgggtttgtttacttctactaatgcaggagtaagtacatttattgaaatagtttggtatacccaactttgatgtataccttattattttgatttttatgtactacctgttcatcgtgtatatttgtgttggtatctctaatcccgatgtaattaagtaatgccctgtaacaccgcttttgaaatgtatatatatgaaaccccgcagtctgtctaatcacccttctctgcttctttccagtgcgtaatcatccatatcttacttacataaggtacagtctttctttttacgaaaactaaaccctaataatgaagtgggaacccaagcaatgatgcatcagtaattgtatacactgatttttcctgtaacataatcaatggggtaagccataacaaaccaaaaccatcaatctgcttttggaaccacagaaatgagtttgtttacacgtttgatgaaactgttggccgaataacatatgttttacttagtttcattatgctgtatgttggagatgcactttcagtcaatcgcgagcttgtacctgcaagctgttacagaaccaacgtggtgagctggcgagctggcaatgtgaagcgagctggcaatgtgaagcgagctggaaatgtgaagcgagctggcaatgtgaagcgagctggcaatgtgaagtcggggataagcaaagcacgtgttgtgagctagcgagctggcaatgtgaagtcagggatgttaagcaaagcacgtgtgttgtgagctggcgagctggcaatgcaaatggacgttaacggcgatcgttattaacgtggttagcgtttactttctttacctttttgtataagagcaacatgttatgctcatgctttcattatcgaagattgttatagaaactctctctcttctagaactttctttgtaatctctgggtttttctcatcttgagaaccagaggagaatcactccgcgtttcatgaacgttgtttgattcttaagtaatatacagagctttcaatcgtgttggtgttttggttgttaatcggagatcgtgatattttctgtatcacaagcatcacgtttataaatgttatgattatatagccaaacgggcatcatggatggcagcttcgtcataaatagttttgcatggtatcctattctatttactatttactgtactattccgacccatatgcaagattcaaataaaaaagctcgttttacatcaaataattggaggctcaaattgttttctcttgatgtcatgttttcagtatatatgtgaaaatattactcgtttagttataatgatatgcaagaacttgacatttcatttattagttgaatactttggagttataggagtttgtagctataggagttcagcatatctgttattgcatcactgtaatataacccaacacactaggctaataggctgaaacatttcacttcaaacataaatatacaaacatcacagttagtagttgagtttcaatacaactgttctctgattacaacagaaactccatgtttgttcaacataaattacacatctacaaatcaagcaccacgttctgttggagacaatgcattgaaagtttcgatagcgtactgtttagctgcatctcgcatcttcccatcatctagtttcccacaatactccattgcgttcactgagtgtagctctagtaagaccacacttgcaattccaaccagccctgaaataaacaaatgtaactatatatgtaaaccaatcacattgcacacaattagtgggagatcacaaatgaaacacaaacagacctagtgaagaacaactgcactgtatcttgggtctactaacagtcattggctccagcctctgtgttagcatgtacccgttaactccatgctttcgaatcaggtacggtagcatgattgttatgtgctctacgtacttctccacctgctcgtctttcaacacgtctctgttacagtctaaaactgtgactccccacttcttcaaatctatgacaagcccaacccaatgctgcctctcgacctgcatggggcagtagatgacgtcaatctcggcaaaccatttcggacgcaccatgaaggggactcttgcaagagtgctgaagtaaaaagcactcttatctgcagctcctacaaacttgttgtactggcgtcttagctctgacaagaaacttgaaggtaggaaatcaaaacgcagcggcttatttttatctaatcgcagctgtatgaacctcactaacagatcaggtccctgtggcaggaaaatgtttgttagcacaaattctatacatgagttacattgtctatcagtactcccacagttgctgcaaaagtagatgaatgaagtattctatagtaacttactgattcatctagtagtgtctggccctcaaaaatgttcaaaaattctgtattctccagtacaacgccatcagccagaacatatgagctgcatgttaacatataaaggttgcattagttgataccacaaagaagagcggttactattctatacttagtgtgactacttacactccccgttccatttgtttgagaaaccttttcacagatgatggactaggcacagagaacggtttaaaaggcccaataaaagcaggtgattgatttggagtctgcttctccacttttgcagaactactaacatgacttttaccagcccctctgctagctgtttgatgcggctggaccggtatgctagtcatattctctatactgttgctttgaattggcctgtcccttatccggttgctggaccgcaacacagaaactttgctggggaatgtcttcttcttccctcttggaggcaacctgcttctgttatcgttgatttcttgcgttagtcccaacgaaaaattcggctccacaatgtctacttcatcatccaatttctcagttggtgaaacatactgcaaggcatataaacatgtacatagttcagcggagcaacaacatataacgttacatttacataaatgggaactcttactgttttgggttcatgcacggcctctttgttttcaagctgccaataaccaatagcgaaagtaagtgggtttgctgcaacataaagtatgtatattgtaactcaaaaccagaaataaatataactacctttgtgctcgccacatgctccatatctttcgctcgcttcagtggcctattagattgtgcatccatttgagaacaagattttttctttcctcctttctgaatagaatcttcttctcttacctaagaggcatcaaaaatatatgtcattcttaccgaatacacacaaatgcgtcataatcttcactgtattctcacctccattctagtgttagggttgctgcgttctggaacagacactccaacgtttatgccgcacgcagccggcaagttgtcacttccttcacttaacccaatattaggttcaacctgttgggaaactccatgcttatttcctggctggtcagctcttatttgttcctgatgcatcaacagaaaattgttgtttaatgtgaagctgtccatatacatcaaatagcacctactagtgcaatacttgaagtctcaacaagcaaattgaggtgcttaacctgtttagagtgggcatcagcaacacatttgctgcattctccaacaattccagcctgtctatttagcccactcacagcttccctaaccgattcagtaagtattgcaaccaattctttcttctgcttaaccagttcagcctcaaagtatgacttcaattcatcgttgtttgattgttgaatcttgagaacacgtttctcaaactcatcagctacctctttgatgactgcctctctaagaccatgtccagcagagccactatcattgttttccatctcgccagctcttgggacttcctgctgcaacccttctccatccgcaaaactgacaccatctttatctgtcaccggtccatccttattcgcctcaccatccaatccgtctacaccttctccggctgcacactcttccctctcttctgcagcaacaccagaaccatcaacatccatctcatcgtcaccatcccccttagcctgattcacacagtcatcagccatgaactcatcttcagatggatgttcaacatcattagcatcaacaccaccactccaactgttatgctcgaatgggtgttcctccattatcaatgatagcagatgcgaaacttcttcatcatcctcctcatctgagaaagataagtcgatctctttcgccaggagctcttcattcagcagtgaggttacccggtcctaaaagttaagagtcaatagaatagataagtcaagtacacaatctttctacaccaaatacaaagaacaagctttacaacaatagaattaccatgccactttggtcgatagttcgtgcatcatgcacattgatgttcaaactcagccccaatacatactgaaccagcttctcgactggaatggttgggtctagaatgttaaacaccgagtctgccgtgtatataatagctggacaacatgccactgtcacaagaactaaggcatgaggaaacccttgtatagctgtggtatcttgtgcaagctccttggctgttctttgcttggcgcttcgaatagtcgcgagaaacgaagttctaccccaaggatatttaagaaaggattctacatcttttaccatctctacatggtcaggatcgatgatagttcgcgaacatgtcgggcaaagaatcccatcaactagtagcagcaacgataggcgaaatcgagtcaacgggtctttgtatttcttccccatagatagcttcccaacaatccattgtgaagtaggctttctctctttcccaaataatgccttgtagaacctcgtaggattctgaaccgctttcattttccctcttgtccttgcatcctttttgttgaatccagatttgctgcagttaagcccggtaacaagtgcaaaatcatcaatggcaaatcgaattggcttccctgcaaacacccaccacatttcatacttcttatctgtcaccaactgcctagatagaatgtaatgtaagaacattacagaaaactgatgcgtccccatttgcaacagaaatccaaactgcgaaccctccagctgcttcaaatggttttgatctagagcagccttgatgatctcaatccacctaagagtaaagtaattgtttatcctctttcggccctcaggttcagaacctagccgaaacaaacgctttggcaactctacatcccccatggaacagatacactgaaatacaaatgtccacgtatcacttttttgatgctgctacttacacaaatacaaaatatataaatcttagatgtaaatatatgttattaacagactcaaccaatatagcctcagctttccgttactatcaacaacaacaaatggattacatagaagttgagttaaatattaaaccttcataacaccaattagtggaatatcggattaaccagcaaagattcactaactaaagctactcaaatccgagtttatgctattcaatactgcaaataaaactaaaaatgtcattaacacatacaaccaatttgagtagcttccgttactatcaacaaacacaaatggattacattgaagtagagttaaatcctaaaccttcataacaactacaaatgaatatcgtattaaccaagcagattccctacctaaagctactcaaatccgagtttatgctattcaagctcttcaacacaaattaaaaagattttcccaaaagccaaaaaatggcatttcataccttaatttggctgaatcccttcgccgacaccaattgccacagaaattcgagtgttacagtggagacgacggagatataaacacctctactcccgtacaacaaaactcactcaagtactctcaacggaatcaaaaaccctcgattgagaaaagagccaacataagtgttgtacgaaactcggatgcttagataggctcctcctccaattgcagaagatttatgcagtccgattgccagaaatcgaagcctccacagtccccaaatcgaaacccacaaattcaatcttcgtaaactctagaatcgtcactcggattgcacacgcagtctgctcttcgaaactttcccgggtgtcgctttttaaagcccagaattttcagattttcttactgtaacttctctgaatgttcacctctatttgaatttttacagagtaatacatagaagttatcgattgaaaactcagaagaagaagaataagcgcgtgtgctcacgcacgggttaagtttgtcaatattgcataaagttcaatacatattggttgaagtgttagttttgcaattataatttttttgttggctatatttgcaaatttccctaaaaaaattattattagtagtattgaatcctttttaattttttttttgtgcaaagtaatagtattgaatccaacacaatttttctttttctttttggaatgctagttaacatttcttcaacaaatatgtataatacatgttttatcattaaaaacttgaattgtttaatctcatgagaatccagctaagatcaatattataagaatccaacaaatttcaatattataaataatttcatggttcagtcaattaattagatgtcgacatgtgtaaaaaaaattaacttctttttctctataaaaactactataaaagatatatttatattttttaaaattataattgttttggcgaataaaaacaaacaaaattatctataaataaagagattgtaattttattagtttagatttatgacaaaataaatttttgtgaatgtgacaaaatagaaataccaacaaaaaatataagacgttgagatgcacaaattgttggggtcggattccacccaggtaagcgagccaaccatgtttcaacgcctcgggagacatcgaagagttatcccgaatcgggccacaaaacacctcggagatcgcatcaagaatccataccgaggcgatatcgagaatgcttcggagcattctcgtgaaatggtcccccgacccgacctcgaaacgcctcggacataaaatctggcaattcgtcccgaggcgggctccaaaacgcctcgggaacgtatcctcgaataccgcggtccgagcatcccgagcacgacccgaggccagctaaatttcggctcggaagaacctcgggttagacgagaaaaccttcaaaaaagaacttagccggtataagttcaaacacatcatttccgaaaacccggaagagacaatcttcaaagatatcaccgaatacagaaattccgagaatcttcggaagataaggacaatctccttcaacaacttaaagataaagagaaatcttccgagaatatcgcgagaggcgatattctcgagctctataaaaagcacttcgaaggacaaacaaaaggacacgcacaaaaacgctctcaacttcatgctatcaaaaacgctctgactttgaagacaaaaacacttattttcatattctagaacatttgtacgatcaaatcattactttctcattaatacaatcaagaacatcgtccgcagtaattgagaattctgttgttctttgagaatctcacaaagattcgttctttgaagaaacccttaaaataaactctactgtgcgagttttgactctcacaatttggcgctagaaggaggggggatcgagatttctcttactcccggaacacagaaccaaccacccaattcacaatggtcaacaatcaaatctccggtaacacagttgatgcataggggaacccaatccctccaatccagacagacgttcctgaagccgctgttcccgcgaccctagcggaactaagaagtatgatggctcaacttaacttcaacagaaggtgaacgatcaagaacagacaaatcgatccttggcacaacaactcgaagcagctaccttccaaggacagatcaggactactcgtttcggcgcgaggcatcttcaggatcgacgagcagcaacagatctcaaccccacacggctcgtgttccacacgcctggcaatactacaaggcccgtccgcagaaccgcaccggaaatcggaagagaccgaaccgagccagcgattttgggatatcgagaaacgaatcaaacagaaagaaacgaaccaagctccctcttccttgagcagaggttaccgaggccgatcagatcaatgcctcggacaatgaagattcagaagaaaacattaggtgggctgaagagtacgccagagaacaggaaataagcgccatcaagctctgcctagccaaggcagagaacgagatgaagctcgtgagatcccaaatgcatagcgcagtctcctgggcaccgaacatcgaccgcattctggaagaatcccacaacacaccgttcacacacaggatctctaacgcgataatctcggatccagaaaaactaagaatcgagtacttcaacgggtcttccgacccgaaaggacatttgaagtcgttcatcatctccgtggcccgggctaaatttagaccagaagaaagagacgccggtctctgtcacctgttcgtcgagcacttgaaagggccagctctggattggttctcgagactcgaaggaaattctgtggacagttttcatgagctatcgacactcttcctgaagcaatattcggtgctaatcgatcctgacacatcagacgccgacctgtggtcactatctcagcagcctaatgagccacttcgagacttcctcgcgaatcaacgacgtggcggctctctctgctctgaagaaagcactgtggtataaatccgaatttcgaaaggaattaaatttgtccaaaccactgacaatccgagacgccttgcaccgagcctcggattacgtatcccatgaagaagagatggaactactagccaaaagacacgaaccgtctaagcaaacgccttgcatcgaccaatcccaacccagtgctctgaatcatagaaaaggtgcccaaggcgggccattcgttcaccatgaaggacgaaatttctccggagcccataattaccaggccgataaaccccaaggcgaagccgcccgaggccgcggtcgaggacacggtcgagaatcctacacttggacaaaggatcaacccgcaggaaacgagcaagaatattgcgagttgcataagagttacggccatcatacttccagatgtcgtagcctcggagcaaggttggcagcaaaattcctagccggagaaatcagcggaggtttgaccatcgaagacttagaagcgaaaaaaggtaaaaccgagcaggtcaacactgtggccaatcccgagcaagcagcccccgcggcgaaccccgaaggacccaaaagaggccgaggtaatcgcgaagcagacgacgatgagccagaggctgctcggggaaggattttcacaattttaggggattcggctttctgtcaagacacggcggcatcaatcaaggcttatcaaaggaaggccgacgcgaatcgtaactgggcgcggccatttaatggaccaaatgacgaagtaatctttcatgaaagcgataccaacggtttagaccgtccgcacaacgatccattagtcattacactgaccatcggtgatttcaacgtcgaacaagtcctagtcgacacgggaagcacacttgacatcgttttccttacaactctgcgagaaatgaagatcgacatgacgcaaatcatgccaactccacgacctgtgctcggattctcgggagaaaccactatgactctcgggaccatcaaattgccagtccgagccaaaggggtaacaaaaatcgtcgatttctttgttaccgaccagccgaccgtgtacaacgcgattatcagcaccccatggttaaatcaattctgagctatcgcctcgacgtatcatctctgcctgaaatttcccacaagcgacggcgtgaaaaccatgtggggaaatcagaaaaatgctcgcttctgcttcatggcagcacacaagcttaggaaccccgtcactgaatcgacagccgacacgaatcataagaaggccaagcttggccgagcggaagagaaatcaatttccgagcagttatagcagctaaagatcgaggaggctcgggaatctacaacactaactcccgatccggtcatcttaatctgccttgacgacgcaaagcccgagcgatgcgtagaaatcggcggagatctgggagaagaactaacagctgagctcaccgcctttctcaaagaaaacgtcaatgcattcgcctggtccccagaagatttgcccggagtaagtgttgacgtcgtatcgcacgagctcatcatcgactcaactttcaaacccatcaagcagaagaggagaaaattgggtcgggagcgagcagaagccgtgaaagccgaggtagagaaattattgaggatcagatccatcaccgaggcgaaatatctcgattggatcgcaaacccggtcgtagtaaaaaagaaaaacggcaaatggagagtctgcgtagatttcacagaccttaactaagcttgcccgaaagacagcttcccattaccacatatcgatcgcctcgtggaatcaacttctggaaacaagctactgtcattcatggatgctttcgctggttacaaccagatcatgatgaacccctaagaccaagaaaaaaccgctttttacacagaacaaggcatttttttgttaccgagtgtcgcaggtcctagccgattttattgtcgaactacccaccaaggaggctcgggaaaacccactcgacacaacttggcttctgcacgtagacggctcgtcatcaaagcaaggctcacgtgtaggcatccgcctcacctcgccaacaggagaaagcctcgagtagtcatttagattaaatttcgaagctaccaacaatgtggccgagtacgaagcgctcgttgccggacttaatctagctcggggactaaagataggaaacatccgcgctttttgcgatttccagctcgtcgcgaatcaattcaacggagaatacacagctcgggacgaaaatatggaagcctacctgattcatgttcaaaagctagcgaagaattttaacgaattcgagttgacaaggattccacgaggagaaaatacatcggccgacgccctagtggaattc

SEQ ID NO: 73 - DNA, 159434 bp, Arabidopsis thaliana
gaattcctcgaagcttttgtagtattgtgtaccaataaacccagtctgaataaaccaatggtggagtctattatgggaaagtgaaaaagcaaaaataactgagaaaataatagaccaaataaagcataaggacaagaattgttgttttcacgaaaaccacgcaatgtaaatcatcaacatggattgtttcaatatggtatcttcctctatttagtgatctagagattgtttcttgtttttttttttttttgcattctaaggagaagaggtgatcgaaaccaaccacacgggaggagcttatgccattttcctccccgtggaaggtctaacaatcacacgtctcctaatctcgtacgtcttcttaggtatgttctttgcatgttaaagaaactgtatcttcaattcttgtcattacatgataatggttttcttatacatgttttgctcataccttataggttttgaagaatggaaaatttaaggaggttgtcaaacccgggaaatttcggattcattggaagatcacaatcacgagttccccaaaaaaacatggaaaataacatttctcctcctaataatatgcaccaccatagtgcttctttagatgatcttttcacagaagaccaaccagcttggctcgatgagctcctaagtgagccagcatcacctaagattaacaaaggtcatagacgttcagctagtgacacagctgcttacttgaactcagctttaatgccttcgaaggaaaatcatgttgctggttcgtcttggcagttccagaactatgatttgtggcagtccaactcttatgaacaacacaataaattaggatgggatttctctacagcaaatggaactaatatccaaagaaatatgtcatgcggagctttaaatatgtcgtcgaaacccattgagaaacatgtaagcaaaatgaaagaaggaacttctacaaaaccagatggtcctagatcaaagactgactcaaaacgtatcaaacagtaagtagtcttatctttgtcatgtgtacttataataggttattaaaatgtcccacatcgattgagattaagatctttaggcattatctggcaatccttaactcttgagctaactgttgggataagttagaccacattcctaatataggttgataaacatatttctgatgcggtttaataatatacaattttatcgaaaattattaaaatgcagtcaaaatgctcatcgagcgcgtttgagaaggcttgagtacatatcagaccttgaaaggaccatccaagtgctacaagtaagattctaaaggctcgtgtatttctcgaagttctttaatttcattaataatatgaaaagattcctaatgttatattatacatgttggattttcttcaataggttgaaggatgtgaaatgtcatctgccattcactacttggatcagcagttactcatgcttagcatggaaaatagagctttaaaacaacgtatggatagtttagcagaaatccaaaagcttaaacatggtatttaacctttcatatcactactaaaatggatcaaaatgcatttattttgttctcttgtaaaattttgattttggttggttaatacagtggagcagcaattgcttgagagagagataggaaacctacagtttcgacgacaccaacaacaaccacagcaaaaccaaaaacaagtccaagcaatacaaaatcgatacaacaaatatcaaccacctgttacacaagaacccgatgcccaatttgcagccttggcaatatgatttaggaaatatggatacattgttcagattaagctgagctcctcttgctctaccttaatgtccatacaacataggtgaacttgatgtttgtagccttgaatgaaaacctaaaaaagcatcgttatgtaaatcaaaatgtggttgcccatatcctcctctattgcatttctctctatttatggcatggtagagaatctcttgtcaagaaacttcatgttatgtaataacttgtaatccttcttatttcatctattatatatatgaataagtaatttttttgacaatttcctttatctatatatatacaagttgtgaccgattctagtaataaaaggaaaaaaaaaatatatatatatatatatatatatatataaatattctgtatactattttatacaccagtcaagataatatgaaaattaagattaatatttaaaaaatgaatttacgaaaacatagtaatttgttgggtttatgcaacagtaaaaaaaaaaatcctttaagccgccattgtattttaattttaccctccatctcaaaaaatgcatattaatcatagtaagtaaaaaaactgatatgaaatataattctcatccatatcttttaaaagattttatggctacatacattatatatatatatatatatatttatttttaaatggtctttcagcatcgtcgggagaacttcaagttgagatactatatatacaaactttacaaatttgacaacgattaagaaagattgtattgcgtattatttagactttcaataactgatttgcagtatcatttgttattttgtttagtttctaaccctaagttacaaaaattaaccaatttgttcatatattttttctattagattaggaaaaattctcaaatctaaataatctccgaatatataactctaactagaatttaacccgtggtataccacggggcaaatgttttattcatatttaataatattaaattttacggttttaatttagtattaaagttatataattttatattaatgttgtaactaaaaaatttagtgatgataaaataataaaataaatatttaatctgtgttatatgaatccaaacccgtcccgctatatttcatatcaattcaaactcattccgctatatttctcatctcatgatattttaaattttttataagtttaaatattaataatattttataaagttaaaatatatttctcgtctcatgatgttttatttttttttaagtttaaatattaataatgtttaaaaatttaagatatatcaataataatatttaaaaaataagaattgtctttgtctttaatgtgatgatattctttctaaattgttactttactaacacaaaagtactttaaaaaggtacttcaaattttttaatatatataatgttattgttttggtaaaaattattataaataaatatttagtttaatcataatttgggattgatatacttgtgcttttgactaactttttttattttaatagcctaaatttgagcattttgttaatattatttgaatgagcaatattagattaatagatgtacaatttatttttgtcagaaaaagaacaaaatttaataaaaatcaaaaaataaagttttagggagtgataattattttgtacaattgcaaacttaaaacgaaaaatgtggattgggaaaataattagggtttcaaatatttaaaattttacgtaattaattttttaataaatatattaaagcatatattgtaatataaaatttgattcattttataaactgaaaataaatgatttaaaatgaaaaatcaggatgattaattcattttattgaaatcgatttttttacagcaaattaaaaccgaaaattaataaatacttatgagagattttaggaatgatttcgtttggtggagttaatatatgagagattttaggtaatatttttgttaggtaaatatttgatttaactgttagcataaattcagtggcattgagtcgtaaataagtttcaagtccaggatttatttgttaagatgactgcaaaaatgtatatgtagattttcataatctcaaaaaatgaatgaatttggttaatgtatgtttcatatatgttgtaattataaagtgagtataaggttctttttttatgttgtcaaaggtaatttcattcattcaaacaataagaaatacaaagattaagaagacatcaacttcatggttggatacaacaaagatagttcttacaagagattgataaataacatagatagggtaatacgacgataagtccatacattggagacaagaacaaggtagtagcttgccacaaacaatcgaatggtgagtcaaagaaaatttccacaaggattccaagtgattgttgaatggtcacattccaataaagacataatgaagttgataaagattcaatgaccttggatagcaccgactcaatgcacgcaccttctaaggagagcaataggaaacacacacgatttctcagcaaagagggcgaaggtcttaaaaaattctggaaattgctctaggtcactaaaagattcatccagcaggaacaagggatggaatttgtctaaattaactattggttttaaaacagagtgaggatggagtccccagccgttctcagcaaagttgtaaaacaagaataaattagggtataacaaatagataaatgggacaaacttgggccacgttaatgtaagggtccaacacatataacacttcgtgggctgaggggaaaaattaatgggccaccaaaatatgggcctatcacataggaaaagtccaacttaacaattatggttttgccttaagcttgttgtcgccgcttcaacggaatgatcggttgttcactattccgatttaacatcgccggaggcaaatgatcggatatggaggccgtcaccggatatgtgaagagaaaggatcttggaagagcagttgtacagacagatctcggaaatccgaaagcatgggagataagactcaccattttaaccgatgaagtgctatcagagaaccagaagctcgccacccagaagatagatccgtcgtgcgccgtcgacgtctccatcggacatggcgcatctgacagtccaagagggagttctcttgccattaatgaggtccgatgtgagtgttcttctgggataagcgaatcagatctagaaacgaggggcttagcgatgataatagattttgtcatgagagttgcatcgctggaaagaagtggtatcgtccgagatattattaacagatggtgaagtgggagggaaaacgccggaccctattgtcttccaccgttgctaatcttttggcctccagtaatgaacaagagggatctaaggtttgcaagggttgagaaacggtttccaaaagggaaaacgaagctgaaagcataggagacataggagagacaagagaaaactagagcaagtaaatcagaagagttaactcccgacgccggcgttttgcaccttcgccggcgtcgggaaccatgttcgaagagtgtctctcgataactgtgtctaagagagtttttagcaagaataatattaagtgagtataagtttcaataataataattcgtgtatttttttggtatgcaaaaaatttgtgtatttttgtgagtattttgtaaatatcaaaaaatatttggtgtattattatgaacttttcaaattataattacaatttaaaacaattaaaaacaaattcttgttaaaaatgtagattctaaaattataataacaatattcacattttaaaataataataaatatggaatatgataatatccaataaaagcccaataactaatataaatagagtccatatttatcgtatttagcctcatccaatgcttttgtgattaaaaacccacgtgagtgaaagtaatgtatcccacatcggatgtgaaagcaaacaaaaaaatgaagctgtagttataaatagttaaacatactaagtgttgaacatatacattttcctcaccccttggttgaaggtggcaacaacctcaaatatactagaaggtgtagatactcaacgactataggaggcaatagcttgagcaaataattgattgcagaagtccatcgactaaagctgtcacctgtttgcttccagcttttgtctccttacctgttcagtgtctaaactctctggtacattcatagttgttgccgcctttgactttttttttctgcacgcaattgtttgcaagaaatatttcttgtgaattttaaattatttatttatttgatgtctcttaccttttctaaagattctaaacaaacacggagtagagttttggaggtctggagaatttacgacgattttaatcttgttggatggatattgagaagttagaagtgtgaaactaaattggaaattacaaaattttgttgtttgcgatcctcttttgtctctaaaatattttttgtattacattttaaatcatccatattttcctaaatcaattttcagaagaaaaataaatcaatatgctaaatgtaaatgtgagtatctatcttttcttaagtaaaaatgtcttcaaaaaaatattttctttcaatagaagattttaaagaaaaaccaaaatcttataaaatcgtaattcaataagttttctttacggattcctacgttccagaaaaaattctttaattctatttatgcgaatttggaacacttatttgggagaataccttcagaatttgatttatctttatatccatggataatttggtacatttggaaagcaaggaacgaaaagatctttaaaaatgtggataaaaatcctttagaggtattatgtttggcggaataagatcatttagagatattatgcttggcggaaaaagaggctcattcgtggcagttagctcaagtcgaacttagtactgaaaaccatggctctttgaatttggaaactcggaatcgattaagagatttttcacatgataacaattattctggatatcgttgctttgtgaatggataatggaaagaaagcaataagttttctggattaggatagtattgtacgtcatcaaatggagagacgccaaccatgagacctgtgaacctccgaagaagtctatctccattacatacagaggttgaagctcttctttgggcgatgaagtgtatgattggtttcaacaaccaagatgtggtttttttagatctggtgaaaatagtgtcttccccaaccgaatggcggaccttctcagtgtatttggaagaattacaaaacgacaaagaagaattctcgattttctctttatctttaatctctcactatgcaactttaaaagcggataatttggaacgaaaaattcgtactaaaccgcatcatatcacttatgtaaataacattcttagaaatggctctttagagctttaattaatagtggttggaaagaaaaagtttcctttagtttgtcaataattcatgaaccgtttcatgaatgctcttaaggtttgaataggttcatgagacaaagacccaaatctcaatataatgtttcgttttcaaggaatctagagcaatgcttcaaaaatcagcgaataactgagtgaatttatcaatcaaaatttcttctaatttcgagaactaatggcgtgagagctcatagcttggaatttaaaacgttttgagaatcaagtagttagagtttatgggtttctacttaataactttggcctctacttagttttcaaggaatgtagaatttatggtatttctttgttttggccaaaagtagattacaatctaaaagtatcagcgggtagcactagacttcgatattatttcactcattataaaacaacaaaataattttacaaaaattcgaaactttaaaactagcttttatgtttgtgccaccataaaagatgacggattactctgaagagaaatatcagaaaatgtgtatacgatattactatcaccggtaaaaatggtaactcaacaatcatctttgaagattagccggtaaataaaatattctctatatcggagaatatatttgggagagatgaagttttcactctcttaaatagataaactgaaattaaattaattagaattaaaattaaacaattaaaatttaattattttacattggtaaacgttattttccgccatttttatggctgcacaaacaaaaaaatagttttaatgtttaagtaatagtataataatatcaagtttaaagtgctacccaatttaactttgaaagttaaaaatatgtttttttttaatttttactttccacataaatcaactaagtagtgatctcttaatccagcccaccatttacattatccagcatgaaataccaaaacacttatagcatgaaatacccaaacacttttaccctattaaattaccccagtaaatatagaagatgattggcaagtgacttttaaggttttaaaagtagtcttaagtgaagtttttttttgccaattagatttttttgcctttttatttttccttcttcctttctcttcttttttaagtccgataaacgagactttcaaacaaataattctcaaaagctttgttttttatcttctccccaacttaattattaactctccacaaattacatttttttcacaaaacatttttgataaattatttattatcaattttatatctttcttttaagatctatttcactaataatttcatttcactaataatattttattttttggttcatcattaataaatttgttgatttttttgataagtaaaacttatacaattactcaataaaaaaacattcaaaacagttttagaaaacaatttgccataataatcgttcaagaatcattcaagataagtattttaattatttcaatcttttaatttatttttctaatgtttatttgatttgttagcaaatattttaatctttcagaaatttaagtggttggacgagacgacatccatatttcaatctggttatggagaaacaaaatcaaagtagtatagttggaagtttaggtgctatttagaaagaaaacattctttagatatttaacgatcaactcgaagctaatttggagtggaaacatctaaaaaccatttcgattatttgaagatggagtacaagatatattattatgatctttaagctccaggccttcgtctaaattttattaagtttatccccttcttgctaatatgtttggatattaagtctcggcatgaaacaataaatatcaataaatgtatcttttagaagattcatttcttattttatttctaaacatttgtcatttcttaaaataaatattttattaattaacaatttgatttttagtaaatccaaattcataatgcaatgtttggtttttaaaaattgaatgaataataagtatattttaaaatcattaataaaatttattgttacataaatttaattctaaatttattttataataataataataaataacagtcacagtttctaaagtattgttctaccaatcaaattttaatagccaaagtttctacagccaaagtttttacagccaaattctctatagctcaaaatttttaaatcaaaacttctaaagccaaaagcagtgtttaagaaaacgttaggcactaatcgaataataactcaatgtctagggtctagaacgcttaatcggggcttaaacgattatagacgtgaaagcttaacgtcgactgcctaaaccgttttttttttaaaccgtttttttttaaaccgttttttttttaaacctggccaaaagtaagagtggctaccaataggcccaataatctataacaactacaataaaaccgtcactgtttttaatgatttatggcgcgaggccgcgaggccgcgagtactagtagtgttgttagtggccagctctacgaaaatcaatttataaataaacaatactcgaccacgaacaaaaaataaaataaagaccactcgaaaagctccaaatctcacgcgccactctctctctctttctctctcgccatcactgctttcttcacgtgattacgttaatttactcgaaaagactcaaaaactttccttctctttctctttcattttctcgggaaaattctccaacgaagcttttttttgcttcttctctaaattaaattttggactgaagcaaaaaagaaaattaaattcgttcatactctacaacgaagcttaccacacaatgcttcttctactaccttctctttccaaatccatctccgtcttgttctagggtttatcccaatcgatttcagatcatgcacggccttagccgtctaggtaacggcagtagcaacggtagaatcaatattccgtcaccgtcaccaccttcttcgcctcggattcgtcataccagaggaaaatctctcgccggaggtgtttataagcaaggattaggagagagacttgtgtttttactcttttcgatagtttttagaaggaaaggtgtcttgttgttagcgccgcttctctatatcgctggaatgttactatttatgggatcttttggattcactgtgttggatctaggtcatggtgttgagattgtgtatagacgtggttctcctggttcggtatatcggagtcctaaggtttttaaacggctttggccggtgatggaagctgatgttaatggaagtagtcataatgtggtaatgtgaattgatggattgttttgtgatgattttgggggtatttttgagtttgataagagtgttgttgttgttgatgatgtagttgatggaagcatggaagcctagagttaaaagtgtatggaagccgtgtattagtactaatgtttctgctgctggatcgaattcgaatggttatttcattattgaagcgaatggtggattgaatcaacaacgcttgtcagtatgtttactctctctgtggcctttgattgaattttagtgagatagtgttagtttgttgattagagaggtatgtctcgtttcttgatgtagatatgtgatgcagttgctgtggctggactgctgaatgctactcttgtcattccgatttttcacttaaacagtgtatggcgtgattccaggttactattgtggtttctaatcttcagatcaagttgctatctttggcagcatggtttacttacagattccttttgctttttcctattttgggttggttacagcaaatttggtgatatatttgatgaagacttcttcatatatgctcttagtaagaatgtgaatgttgtgaaagagctcccaaaagatgtacttgagcgatataactacaatataagcagtattgttaatttgagattaaaagcttggtcgagtccagcgtactatctccagaaggtgcttccacaacttttgcgtttggggtatgccattcactgacgttttctttttctatttagttgtcttagtcttgatagttaacatgcaaaatgacatggattgatagtaaggtagagaactagcatccggtctctgataagcttgtttctagaagtgagtactgcgtagaagctgtatctgtgtctgaggattactagaatatactatagactgttcttaggaaaaatctgtgatgtgattttggttattgagagctctccttctatgccttttatgtggtagcttattaaatggaaaaacctggaacctaaacacactctgcagggtcttcttactctatcttgcttcttttattagggctgtccgtgttgcaccattttccaataggttagctcatgcagttcctgcacacattcaagggctcagatgcttagcaaactttgaagcattgagatttgcagaacccatacggcttcttgcagagaaaatggtcgataggatggttacaaagagtgttgagagtggaggaaaatatgtttctgttcatctccgctttgaaatggtttataattcctgccaatttctccatttctgcaattccttatttgtagtaccctcttataatctctatttactttacttttaaaggacatggtcgccttttcgtgttgcgagtatgattttgggcaggcggagaagctagaaatggacatggcccgggaaagagggtggaaaggaaagttcaggaggagaggcagagtaattaggcctggtgcaaaccgcatagatgggaaatgccctttaaccccactggaggtatcactgaaaaactacctcgcctctccaagatttctgaaaatcataaattcagtttatctagtgactatcacaattcactttacggatataagacattatggaagtgatacattttggtaacatcactctgtaggtcggaatgatgcttaggggcatgggatttaacaatagcaccttggtttacgtagctgcgggaaacatttacaaagctgacaaatatatggctcctctaaggcagatgtttcctcttctccaaaccaaggatactctagctactccagaggagcttgctccgtttaaggtaacaaaactttaatttctttactcatttggacttaagtgttaatgtcccaacactgttcataaattgttttgtgagaaatagaaaagagtttggctgtttcatttttattgataggatagcgtttggttgtttcatggaattgtttcattttcctcgctctatgaatagtttttgtgagaaatagaatagagtttggttggttcatttttagtcatagaaaagtgtctcacacatttcaaacgagggaaacaaataatgatgagggaacattgatagcaagagttgggtgagaatgttgaaatgtttttatgatagcttttaaagttctgtctttttagaagccctgtttataggaaagagaaatttatgtccactggttggtaggaatcagaatgattctattattaggttgggagcgtgttaggttcttaaagcaatttgcccataaaacccgtgggctctcccataacatgcccttggaatagaaagattttgaccattatataatattctagttcactaaacaaattgctgtatttgtgaaactgtagggacactcatcaagattggcagcacttgattacacagtatgcctccacagtgaagtgtttgtatccactcaaggtggaaacttcccacatttcttgataggtcaccgtcgctacctttacaaaggccacgctgagacaatcaaacccgataagcggaaactagtccagctcttagataaaccgagcattaggtacttgatttctttataactcttgacatcaagctcttagattcctctgcctctaaagcattttcttcggtttggacgttttttttttttgtagatgggactacttcaagaaacaaatgcaagatatgcttagacacaatgatgcaaagggagtcgaattaaggaaacccgctgcatcactctacacgttccccatgcccgactgcatgtgtaaagaacccgatccggaacctgaaaccgatccagcttaaaccggattcctgctgttcagtgttaattattgtttatgacttcaaccatacatgtaacttatctatatatatgttgtatcatgagtcctgtataagcatttttccccttcaaaagttgggggaatctaagattagtatttttttattgatacgaatttttgtgtgtacataacattctttcaacattagtgaccattctcccttctgtcccattgtactatactactatgcacattttggtctcttttgataatctatgcaatggctattggacaattgtttcattctaatctgtagtttttttttttttttcagaactcagttacttcatataagatgcaaataatatatatgtttacatattcttattagaaaattcttacagtcagaattattaaagaaattttcatagggtatgggaaactttaggattttagtcttattttggtgttttgactgtatagttgtatttgcacataccccaaaatacaactgttttagcaagaatttgttttgagtattctttttagcaaattacatctttgtttttgttttgtaaaaatggacaagtgttcttaccacttttaaacccttaatctgttttatagtagctgtgtttcatagtaaagtaaaagtattgcgaaagtatatggagagtgtaattaaattaaacaaagaaagaacaaaaaaaatatttttcttttctcgaagaaaaaaatcttctcgaaaaggaaaacaaaaagaaagatagtgccaaaaaggcaggtaggatacaatttggatcttgtttcagtgtttctccaccactcattttccttctagaagattaaaacaacccaaaaataactagtaataaaataactcattcatatcacttgtaagttgtaacaaaaaaacaaatccatcaaaataatatccccaccaaaccctttctcttagtagtataaaatctaagaccatgttcattggaagggccttaacagtttcttaagggaaatcctcaaataattttaacaaaaaataaataaaaattgtgattaaagcttagaccatcttcattggtggtttctcactgagaaattctaaataaaaataaatcaaaaacattaaaataataattttttaatcaattttgttcaggatcgtttatgaaatgagaaacttagagaaactttctctctcttccacatgtcaccttgttattaatttcttttctttgttataaatacaatcatctatactttataacatcaattaaatactttatatgtctgttatttttttttattttttttacttttaaaattcataaaattaaattatctatataacaagctctattatgtatatgtttaaattatgtactaatattatttaattggtgttagttataaatacaatagttttttaattacaaaacaaacatttaaaattttctatttttattttgcaatattttcagattaatgtaaaattgtgatttcagatatatgtatttaaaatttaatcatcaataaatcttttaatttctacttatcttacataagtggtaatccattaccaagtgaaagacttaatttttattatggttttatatgtaaagtaatgtttaattatggttttaaaaataataaaactacttaataatataatttgtaaaaataataattgatatatttaaaaatattgtagagatattaaatttaatatatgaaaaatataataatattttaatattaataagatacctataagagtatctcaccaatggaagcacaattttagtataagtttctctacttaaattaaatataaaaatattaataatatattatgaggtattgatgtagtatctcaccagtggagatgctcttaggttcgcacctaattttagagtttattctgatctcaaggggcgcatacgtggccatatattattggctctgtgtttgacaaaacaattttttttctcgcttttggccttgtttattttttcatttcacgattaattttctttctcttctcttgtaaactccggaggccgatcgtacgattggtgattatcatcatcacgcgtcgtctcttaataagatagtttagagattgtgttcgtatcgattcttaaaacagttttataagtttcgtttaactgatgtttcgggctcgtggaattaggttgtgcttgctcgtaacagcaggataatttactgataccgacattgatcccattgcttggctagcacagttataggtgtgttttgtgtctggatattatttagtagttaatttttagattaaaccaatgtttcaatttagatatcactaaatttttgtgtgataacaagtgatgttgataaagatatgtgcaccttcgttttttgtttctaataaatatgtttgcaaacagcctgagagactttttcaaaggaatcgattaggtgtctgtagtgaagctttggctgcaactaggcctagagctgcttcaaggggtcgtgatatggagatagagcgtgacttactaaccaggtcaatttttacttgaaagtgctttgaacaattatagaatccatttcattgaaatttcctgatatgcatactgatgtgatttgctaaactgttgcagtcagttctctattgtacgagagaatacaagagaaaagttaaacgtaagttcaatcttgatgttctgcagtttctgctttgcagggtatatgtgacagggtggttgttaagccccaaaaactgtgaggaagcttgcaagagtgcaacatctatattctcaattggcagggaaactcacgaaggaagatgatgaggttatataatactattggaatagtttttacatttccaagctcttttttttcttcgaattagctttaaccctttgtcaaataaataaattagcatattttgtcaagtaaatatttatcatatttatttttttaagaaacccacttaaggattcactaatggactagaaaaaagtttaggattcaacaagaactttaatttcaaaaaaattcaaaatttattagtataaaaatgtaaggattccattattaggactccttaatggacatgctctaaggaaagaaagaaaaagaaggtaacctaccaaatctttttcacccacaaaatacaagatacatacaccaacttggtcaaagtcacttcctttttataacacctctctttagatcctagtctcactcttcttgtctcatcacccacacatgtaaccatcatcatgggaagatcaccatgttgtgaaaaggctcacatgaacaaaggagcatggactaaagaagaagatcaacgtcttattgattatatacgtaatcatggtgaaggctcttggcgttctcttcctaaatccgttggtaaatttctccaaagttttgattttttttctttcaaatttttatgtttcttgatctgatgattttatcttttctttagggttgttgcgttgtggaaaaagttgtagattaagatggattaattaccttcgtcctgatcttaaacgtggaaatttcactgatggtgaagagcaaatcattgtcaaacttcatagtttatttggcaacaagtaatttcctttctcttaattatgatttatgaacaaaccagttttactgtaaaaaagtaaaaccaatggttaaaccgtgaaagactaaaaaaaatgaagaatcgggttttggtcattagtccgaaccggttcactggtttaatcagattttaaaccgggtgttgtgagtctttttaataccggtttttggtgataactcaaatcggatagctattcgattcacagtcaaactggttcaaccggtttgaaaacactggagaaaactaatcaaatggttttctcttcagtttataaaaatgaataaatgtacaatttggtttatatacaagcagatccagtattgagaagatagcattctatgcgttttgaatggaaaagaaggttttgtaggcttctctctctcttctctcatttgcatcttttagagagagaaagcatctgatcttctttttccggcaacaatagcttctttagtgtttgttggccagttctctgtccagaatcttatggcttttccagcatggatgtctggcttttgtccggcgatgtttagggcaacgtttgattgtcgtggttcttctgacactgttcggttctttacgacgatggtcggtttgcgtttggcttccattggcttctttagcggcggtaggctagctaaggtctagagtttcaccgcctatcttcggtgtttcgtctaccttttggccggattgattccggtttagatttatgttttcttctctcgatttctttatattcagtttgattgagctcttttgcgtttcattgttagatctggcatataattccttgaacctcctttgtttaaagggattaatttgttttccacgcttatcgatttcattttttgagaacaaattaagatgcggattaaggttttttatgcttatgggttgaaactattgcaattgtggctgtttctctaactgatctatggagacgagtgcttttttgttcttttttaaggtgttgctgaaagctccatcggcttactctacgtcgatgttctttagatttcaggaatcaattgcctttgggagatctttcctttccaaatttgctaatgaagtttggtggattctctaattaaaaatcaatggacttctcttgaagctccggcggtttccggtggttttagagttccctgagttgctaaccagaacggtggtgaatggcgacaactaaggcttcttcagtcaacgtgtttcaactttgtttgttaacatcacacgtggctttgtggtggaagggaatctttaatttacttcctctaaaggttttgtttcctggtttgggctttctttatgggcctctgcttataagttagacttgttggttttttatgtaatatggatgactatattttagttgatccaatgttgtaaggtttaatatgtgtcaagatttgtaagtggaaggttccacagttgtatctttacaacataaggttttaaataaagtgcaacacttatgagaaaaaaataataaaaatacaagcagatccaatttgacaaaaccaaataaataaccggtttaatatacccaaatgaccaagttttaaaccaatgttccttacatttcgaatgtctttttttcagatggtctttgattgctgggaaattaccgggaagaaccgataatgagattaaaaattattggaacactcatataaaaaggaagcttcttaaccgtggtattgacccaaaaactcacggttcgatcatcgagcctaaaacgacatcgtttcatccccgaaatgaagatttgaagtccacgtttcccggttctgttaaactaaagatggagacttcttgtgaaaactgtgcttctacgagcggtacgactacggacgaggatttacggttaagtgttgattgtgattacagatatgatcatctggacaaggagctaaacttggacctaacactcgggtacagtccgactcgatttgtcggggtcggatcttgttactagctcgtgtgacgtttgtgtttgtaaattgggatcacatatgaaccttgtatgaattgctaaacgggttcttttaatgataataaatctcataacaagttatgtctttttggagttgtgtgcaccaaagatattatttagggtttgattggtaacattgcgtttaataatatagttgaataatacaaatttgcaaaataaaactcgcaaaataacagtgtatacatatataatgatatttacatatatatatttttacagttattttgtgaaataaattctgtagtttggacttatttacaagaaaagccacatgtatttacaagaaaattacaatctttccatatatattcaaaaacaaaatctgtgaattttattccacaaaatatgcataaatccgatttatagcaaatatgtatattaacattttctatagcaataaaaatactaatttataataattaaaatattcacacaaaagtcatatacacatacaagaaaaagaactaaatctatcatcatttaagccgttgctttatttaaataaaaaaacacaaaaacttgaaatcatatactttatatgataaatttaaaatctatattagtagtataaatttaaaatcattcaagggacggtatattacgggtgagatcctaaaattattggatttataataataataattttttttcttggattttataacactaataatttagctaacgagataatatagacaaatttatatgggatgacgggtggtcatatgcgttggggtattttcacggatgtaaacatttgattaagatggtagttaactcattgatgtcttcgtagtagatgaactactgttgagggctagaactggtcgatggttgcttaatgaatcagaaatattactataaaagaaattgatagtataaacgaaatagtcttatccttttatttggcaagtgagtaccatgttttagatctttcagaaaacttggtgaataggctactcgacagctacatttaccgtgaaaattttagccagatggtaaatgctcatattatctatggttatgaaaacgttactggaaaataaactaatatatgaagaaaaatatttaaaattagatgatgatgctgttttaaaatgtataaatgcattactacaattatcgatatgttcaagtgtgttttatactttttgttatacaatgacgtatatttgaatatgattttatttgttcgttacttgaatgcaataaaacttactgtatgcattggacaatagattttttttttgtaatcttcttgcatatatacactgaaacgtttattaaacaaatatgtcgcatctatgcaaccaatataatttttacaagagtgattattcatattattttctgttcgcaaaacaaatatattttaagatagaagtatacaacttggtcctccctccttttctcttccttccttcttgttgacattatcaattttgtccttctattcctgatttttcatataagttacattttaaatttccaaatcacatagtatctttttttgtgcaacaatcacatagtagtatcttattccttaatctctcaaaaaaaatctacattattgactgttttaatacaattcaagcatgttttagcgaactatgcgttttctttaccgcttggttttcattcgtttgatctttgcccggatattgttaagccggttttgttggaagataccaatgggtacacgatacccatgattgtccgattgtaatttctttacatttatttgaataaaacataggggccaattgcctcctatcactcaccaaaaaaaaaatacaattcaagcatgtgaaatgaagaaaaaactctttaccaaaatatgaatactcgtgatgccgttacaccctatctatgataactttttatatcattttctgcctctacttctttatttttgaattttctccaatcatgatagttgaagtatctattcacacaatactttattttatgtatgattacgacttagtagttttatttgaatatgaattggccgaaactccctagttttccatcattatatattaactagttatgagtgatgacacaattgtagtgatagatttaaggaaatatttactaataatataacatatttaacagtatcatttggtttatgtctccaaaatatccggttttgcaagtacaataataggtagaagaaaatctttaatttattgaataaccatatacttcgtgttacacaatttccttttcaaaatatcataaaataaatactatactcaaatgtttagaatgtagatgtgatctgtagattgtataaattagaaagaaagctcaatatcacgacaacaagaggattttattttatttatggacgatgaaaacaaaaatacataatacagatgcatgcaactacaaataagagaaaaataaaaatagaacgagacaccggtaacattttcgacccctttttattacatatgttttgattcttaattcaacttgagagactcttactggacttcaagttttttacctcctcttttgaatatatatcctcttcaccatgttgcagaattcactacatgcaaacaacacaaaaatgaaatatcaatgcctctcaagattttaactaatctttcaatcgatagaaatagaaaggaaactcacggccatggatcgtctccaacaagcatctcatcctcgtcactacctgtgaaaattattttccattggttgcgagtttgtaattggcctttgagatcgaagagcttctccaattctagtattagctgatcatatccattaagaacacttaaatccacagctcttcctattgttacaccttgcatttgaacctgttccatatcaaaattgtgtgaggtgagtataatgagaaaaagtttcatatataaggaataagaatatattgatcttatacttactttcgtacaagttctagtagaactgaactgcttgctttggatttttgttggtgatctcaaagtttggctttgaccaaacttttttccttcagtaagtttcgaaatatccgagccaatttgttcaatgggatctttgatcaccggaggagtggccagagagactccaaacaacctaaaattagtgcctgccttggttgttatattttcttctatttgtgtaaccatttggttattgtaatttcgtttgggcattggttggacagggtagctcattagcaatctagaaggattcatagcatcttctgttgtttcacgataaagaagagaaatattcatcggggaggccacgcttagttgtccaatttcttgtccttgtgtcaatataggaggcaagagatgtgatgatgaagaacctttatataaaacaagaatattgagaaggtattcaagaatctcaaattcattaaatagaagattaattctttaaataaaagattataagagtgtatttttataccgaattcattaacttctcgtaaacgcttgttcttgagaaaagatgatcgcggaacatttaacgcaggcattaaatgttcgatctcccagggtgacactttattaggtctcaaaaatgatgcaaattcatcccactgcacctgcaaaattaaagttaattagtgatatgttatttattgcactcaaaaacgtattcctaaaagaatgttataaagtgtgaatgaaaatttacttctaagctgcgccagtctgaacacttccaatgaggagagaaattactaactccaataattgtcccaaaatatcttaatcaattgaacaaaatgtgttatcatagataatattagacattataaatatatttatgcagaaattctttttcatctaatgttaccttctttcagataaatcatcaccctcaaaccgcattgtaaatcttgaaccgacattgaacttattgttcacagcgtctaagaatttgtcgtaactgacaataaattgacttgacctgatacttataaaaacacaaaatataaacctatatgttgaaggaactaatctattgataaatcaatataatctaaaatgtgagttcaaatggttctttgaattaccttggcttgtaaaccacaatgaacatacattggttatcaaaagcatgctttgcggaagcaattaccccatgtctcatacaatctattgatactattgatgaaggtatattcccttgttgatgtcttgctcgtctgataccaactcgtaactctccagtctctcccctaaaaccacaagtaaatagtttaaagtccaaaactcaagaaccaaaaaatatataacaagaaccaatattatacctaacgaatacaataacatctcctttaaccaatttttttgatgttgtaaattcattccaaccagttgttaataaatgtctttgcggtgtacctgcatggaataagaagattattagttacttctctaggatttattacttcaatagctgtggttgaattatttgaataaaatgaattattacctctatagctgtgtctgaagctccattgattaccatggagatctatagcaagaagttcttgtgccggtagaggctgagacatatcctaaacaaaaatttaatatgttatgtctaatgaaagcttaaaattcaaattcgtttaaaaagctataacattaaataccagaggagggagacattcaatggcatgttttttcggaacagaaaatacaccattagcacttatatcagaggcagttaaaacctttgtaaaggaattaactaatggcctaaattgattttcattctgagtagggattacaacttgctaaacattcaacaaaatcagaaaatcaatgagatataattggagaaaaatacaattaactgaaaataaaagagaaatactaaattttcacttacagttgtatctggcatcaaagtgatcttagcataagtctcatcactattgttttccacctaaaatcaaacatcaaaaaattaactaattacttctttttacaatgaaatcaaatatagatatcatgcgtattcgctaaaacacaatagagatataccttaagatgaattgcaataacacgacattgaagcttagaaggaagatcacaaattggttgtaactcattcaactcttctcttgtagatgcctcaacctgaaaaagccgtcaaaaggtttcatagacgagagagagagagagaagagagagagagagaagaaagggagagagaaagaagagagagaagagagaaagagaagagagggagagagagagaggagagagagagagagagagaactcacaagctctatattgccttgaggaaagtaataaaccttttctccaagttttggaatatcacacaaaggtcccgcacagagtttccataactgctcgtacatatagctcttggatctatcaactgccgaacaaaaaccaaaacattataaccaaaacaagtgttcaataagataaaataaaaaaagtcaaaatttcttacttatgcctgataattcaggttgtgcattcacaacgttgccagtttccataacctcttatccaaagatcggtataccaaaatatgttatctcaacaattattatacaattttctccctttcctcaacttctctcgcgaccatgagaacgcaaaatatcacatttataggtaagaagtatcaaaatacattaaaatacttccttagatttgatattaaatttaataaggttaccaaaaatttataaaggtaatttagagaaatgtcattaatattttgactacacataagaaaatcaatttttttatatgtttattgattaacttaccaaaatcatcatatgcattattcatatataagttgagtaatataatacagttttaatacttacaatgaaaaaaaaatatttgaattttgtttatagatagccatataaatctaaataggagttcttgctagctttttcttttcaacatatgcattattcatatataagttgagtaatataggaaaattttagtacttacaacaaaacatttttttctatgaaatttgtttaaaagtagccatataaattttaaatatgagtttttgcttgattctgattgcatgaataagaattctctagcaccgtgatcagatctatcatatgggatctatggtacatctcatgttagcttttttattttgcttcctctttaagtttttaaggatcccttataaaccggttttctcatatattgtcgctctttggagaaatctccaaggacatattccctttttcatttagcttcccctttccagttagctatgatgtgaatttgtatgtatcccatgactattaggatgtccttggcatcaggggtggatcaccggtggtggtgatggtatgatgaattcaatcaaaaatgtacaagggcttctcgctgcctctcaatccgaatgtcatttaagtatttttgctccatgttttatattgatgattataatagttataaattattattaatgataattatttagcttatagattttttttatcatctataaagaaattattaattgaataaacttattaaattcattaattcaataatttaaatgacgaatcgttttatctaaaccatttgctaaatgaattagattgactcattatctattagaaactaaatttctatggatatagattggtttgatttggtttaaccaacttgtcatccgtaaatataacacccacaaaaaaaaaacttataacacattagtcaaacaacataaaaataatacgatatttatttgtatagatttgtctgatccgataagtttaccttacttaatataaattaatatatatatttagaaattacaattaatatgatatatcttcacttaatctttaaaaaataatattacatttaaaaaacattacattttaaagaaaaatatagtctcacgatgtaccgcaggttaaattttagttgattatacaaaataccatgccaaaaatatattaattctttagagatattaattctttagcatgtctccacacggcatcagcaaagggacaattaaatagaatatgattcaccgtttcgtatgctagagatatgggtgtcaaaatgggtcaaaatttatgggtcaactcaactcaacccatgaaccctaatgagttgaaaattttgacttaaatgagttgatgggtcaaatgagttattgggtcaattggtttgatgagtaaaatgagttgggttgtaatggttaatggtttcaatggtttacccaattaacccatcaagttttgtaaaattgaattaaaccaaccaaaatctctaaaccaatgctaatttaagtttaaccaacacatctaaaccaatttaataaaatcaatatttttccaaatttcttaaatatacaagcgatgaaattgagaaaaagtaaacccgtgattttcccgccaaaaacgtaaatccgtgattttcaaaccaaaaacgaaaactcgtgattttcccaacaaaaaacataaactcgtgattttcccgccaaaaatgaaaacccgtgattttcccgccaaaaacgtataatggtaattttcccgccaaaaacgtaaacccgtgattttcccgccaaaaaacgtaaacccatgattttcccgccaaaaacgtaaatccgtgattttcccgtcaaaaacgtaaacccgtgattttcccgccacaaacgtaaacttgtaattttcccgctaaaaacgtaaatccatattttcccgccaaaaacgtaaacccgtaattttctcgccgaaaacgtaaacccgtaaaaagtggaatccgtaaatatcctaagtttgatgataatgaattaataattattaataatgataattatttattattattttataataataattaattaaattattacttaaattattacttaacccatttaacaactcaacccatcaaattaaatgagttatgggttgactcaacccatcaaattaaatgagttatgggttgacccaacccatttaacaaaatgagttgggtcaacccataactcatttaacaaaatgagttgggtcaacccataactcatttaaccctaaactcatttgattataagttgagttgagttggtttacctattttgacacccctaactagacaacctttttgacaatttatgtgaaaattattccaaacttttttatgcagcagattattgttaaaggttataaaaagcacattaattaaataaataaaaaatggcaaacaatcaagacattacttttctaatgctattttatcatcttcgatgtattttaatgaatttttattttaagactatgcgatacggtccaagttaatcattaaagttagactaagaaaatttttctataaataattttggatttttaaccgttatgaaatactaaattcaacaaaatcaccaatataaaaaaagggatttacaaaaatggcattaaaaagttttttttttcaagaatagcatctcttttgaaaaattccacaaatagcactcaaaactttaattagatattaaatataaataaatagtttaattaaataaataaatcaaagtaaatattttccgccaatattttttgtcaaaatttttccgccaaaaaatttccgtaccaattttttccgccaaaaaaaattccataaaaattttctcgccaaaactttttctgccaaatttttcccgtcaaaaaaatttccgtaaaatattcccgcaaaaaaaattcaagaaggtaactaccaaattccagaaggatgtcatataattcaggaaggctttcataaataaaaatttcattcaaaccttcctgaattttgtataatccttcttacatttcagaaaatgattatttaaattttgaaggattccacaaaattcaggaatgattctacaaaattcaggaatgatttcatgaaatttaggaagggtttcacaaaatattttttctaaatttcgtgaaactcttcctgaattgcttagaatccttcttaaattttgtaacatccgtcttgaatttattttatttttggcgggaaaacttgggcgtaattatttttggcggaaaaatatgacgatttttttggcggaatttttttttggtgagaaaatattgttgagaattttttggcgggaaaaaattatcggaatttttttggcggaaaaatattgtcagaaatttttggcaataatttttttatgtatttttattttttttaattattaattttattaattaaatataaaataattatttgagtgctatttatatcttaaaaaattttttatgctatttttgcctaaaacttaaatatgtgctatttaaagaatttctctataaaaaaccattcgttgatttaatatatccaataaataaatattattagctatctaatgttcaatgaaatttagagatttaattttgaaatgttcccataaatatatatttgcctatttaatatagagaattttctccaccttttttttttaactttcaattttcttccaaaatttgcccgccattctctgtgtctcttcgtctaagggtttcttccaaagaacgacgacaaaaccactgaacctaaaatccgaaatccaaaagattcatgcgaaaaaatcgttaaagagtaccaatttcagaaagttacattcttacagagaacaagtaattccccagaaatgggatctagggttccaatagaaaccatcgaagaagacggcgtaagttcaaatctctttctgcgttattgaatcaatttttttgattattcaacttctgggtttttctcctacaggaattcgattgggaagcagcagtcaaagaaatcgacttggcttgtcttaaaaccacaaacgcttcttcttcttcgtcatcccatttcactcctttggctaatccaccaattacggcaaatctcactaagccacctgcgaagagacaatctactctcgataaattcatcggcagaaccgaacataaaccggagaatcatcaagttgtttccgagtgtggtgttaacgataacgataatagtcctttagttgggattgatcctgaggcagctaaaacttggatttatccaggtttgttgagattgttaactttatgataaaacttttgtaagtggtgacgaataatgttgttttgtggtgttttagtgaatgggagtgttcctttaagagattatcagtttgctataacgaagactgctttgttttcgaatacattggtggctttgcctacgggacttggtaaaacgcttatagctgcggttgttatgtataattacttcagatggtttccacaaggtagaagaatcttcatcaagtagctatggaaatatcttgcttaatggtttaggaatgtaactgaaaagctgtcattgttgttgttaggtaaaatagtatttgcggcgccttctaggcctcttgtgatgcagcagattgaggcgtgtcataatattgttggaataccacaagtatgtgatttctctttaaacagattcttgacgtgttgtgtttgactctttagatattgagaatttgttttgctttggactgtaggaatggacgattgacttgacgggtcagacatgtccttcgaaaagagcttttttgtggaaaagcaaacgggttttctttgtcactccacaagtgttagagaaggatatacagtcaggtgatgctcgggttattctatcaacattctgagctgaaatctattaatgcttatttagtttgttctcaaattaccacttgttcacaaagactgtcccttttcaggaacatgtcttactaactacttggtttgcttggtgatcgacgaggcacatcgagctttagggaattattcttattgtgttgtagttcgtgaggtttgttcttcttttatgtgtttggacttttaagtatctttcctttgctatctatatctgtttttttctatctcttcataaatgtaaaaatgatcaaggtgaccaactaatgcatttaacttttagttgatggcggtaccgatacagctgagaatactggctcttactgcaactcctggatgtaagtgattgactttcttcttcttgggggttattatatttctgcacccattaacggtagatgttactttcagcaaagacacaggccatccagggtatcattgataatttgcagatatccacacttgaatatcgaaatgagagtgaccatgatgtttgcccttatgtccacgacagaaaattagaagtcatcgaggttcaagctggtttctgcattttccatttgtgttcctttccaaattgatgtctaataattttagtatctttctggcagagcaggttcccttgggtcaagatgcagatgatgtatcgaaacgcctgtttcatgttatacgtccatatgcagtcaggcttaaaaactttggggttaatctaaatagagatatacaaactgtatgtgcctcaatgcttatatcttcaccaatagcgtcaatgctcacattttcttatctatgcaaacatcaactcatgtttgacagttaagtccacacgaagtacttatggcaagggataagtttcgtcaagcacctctaccaggccttccccatgtaaatcacggagatgtagaatcttgctttgcagctcttatcactctttatcatattcgtaagctcctttctagtcatggaataagaccagcgtatgagatgctagaagagaaattgaaagaagggtatgctcttactttcttctgttgaactgatttttgggatggcttcagtggttttaggtataatagcttttgatatcaagagcatcgcctaaaactatcaccctttgcaggccatttgctaggttgatgagtaagaatgaagatattaggatgacgaagcttttgatgcagcaaaggttgtcacatggagcaccaagcccaaaattgtcgaagatgttagaaatactggttgatcatttcagtatgttttctttttgaattttgatctggagttgatgttagtactcagctggttttacaactgaacattgatatgatcttattctatggctgcagaagtgaaagatccgaagacatcacgggtcattattttctcaaatttcagaggaagcgtaaggtcagtataattgttgtttgttttcccttgtttagttgctcatcatatttcttcgttagcattcatccgattacgttactcttcagagacataatgaacgcattaagtaatattggagatatggtcaaagcaactgagtttattggtcaaagttcaggtttgttactctgattttttcatctgaaatttccagttacacataagtatcatttataattgttacaatatatgtttcgtgcaggtaagacattgaaaggccagtcgcaaaaaattcagcaggctgttttggaggtatgtctgtttccctgtatctgatttgaactttggtttttttttttttttttacattctcttgtatgataaactcatctttccaacagaaatttagagctggggggttcaatgttattgtcgcaacatctattggtgaagaaggcttggatatcatggaagttgacctagttatatgttttgatgctaatgtatctcctctgaggatgattcaacggatgggaagaactggaaggaaaaataatggtcgagttgatatcctttagctagcttgatttccattacaaatctttgaagttacactttttcattggaacgctatatgcgacgtctttgaagttacactttccattccttgactagcctttactagttcttgcttgtgaaggatcagaaaagaacagctatatgcgaaagcaagcaagtggacgggctattaaaaaacacatgcggaatggaggaacaaatagttttaattttcatcctagtccaaggatggtaagagcttttcttttttgataatttgttttccttaccttgttgcttcagttttcaacttctcttaacttcagatatctctgtcatgtgttattatagattccccatgtttataagccagaagttcagcatgttgagttttcaatcaagcaattcgttccacgtggaaagaaactacaagaggagtatgccactgagactccagctttccagaaaaagcttacacctgcagagacgcatatgctcgctaagtattacaacaaccccgatgaggaaaagttgagagtgtccttaattgcgttccctcacttccagacattgccatccaaggtgcacaaagtaatgcattcacgtcaaacaggcatgttaattgacgctatgcagcacttgcaagagccaactttttcagaacagagtaaaagcttcttcactgaggtgtggttcaaaatcctggtaaacttttgtttttccttgctttctgtgaattcatttttcacttacgtggaatcacttactttaatagtttcgagctcctttgggtgaaagagaagagcttgatacaggtctgagggttactaatgatccaaaaggtaaatatagtctcattgatcttgccgaagtatcaattcttaaagtcgcatggatatatattcattcctaaaccagctcgtaggaggtctgtatgcttataagctatcagctagtcggaggtctataggctataagctattgaacaatgaccaaaaagcctattttaggatatactatctgctctttttaggtattttatatagcttcatgtcacttctcatcaacccaaatgaaattgccaataatttataggaaagatgcttatagactttgatcagatagcttattgtctggtcaataatgtatctttgcattgcatatatatgaaaatcaggcctttcgttgtagtgttgaaacacatccattctattgtattaatgtgcagatctacactctgtccgtgatttggaagtcaacacatcacagagaaaggcaaaacaagttgaatctcccacaagcaccttagagacaacagagaaggattacgaagaatcttcacccacacaccgttatcttttcagttcagaatgtgcatccgttgatactctggggaacgtcttcgtaatgccagttcctcttttattctttcctaatgttctggagtcagacaatacgcctctgcctaaaacagaaaaacaacattcttgccggaatacatctcacattgacttagttccagtagatacttcggaaaaacatcggcaagataatatctcatgcaagttaaaggaaagattctcgccagacggtgccagcgagacactagagactcatagccttgtgaaaaggaactccaccagagtaggtgaagatgatgtagcgaattctgttggagaaattgtgttatcatcggatgaagatgactgtgagggattggagcttagtccacggctcactaacttcatcaagagcggcattgttccagagtcacctgtctatgaccaaggttagtgttatctcttgaacatttagtatgtgttagagctggagatataatcagatacgaacaaatggttatgatatctacttgagtgttcttgcatcaatcatggtgtttggagttgctgttgcaataggcttcaaccacagaaatttggtagtagaaaagttttatatatacataaggttctatgagaaatttagagaaatctagatatgcaaaacacacattatattgatgagtaagttgaatatgaaggtctgttgtatttaagatatactaaacattttgttatttcagactagagtaaccactacgagaacaggacatatatataaagcttttctaatcctattttcttagtgctgattatacatttgaatctatttgtgcaaagaaaaacttaaagtgagctaataagcaccatttgtacttacctttagcaactataactacctaaccataagaacttattatgtggtaattacatctttaatgctgcaggggaagcgaacagagaagaagatcttgaatttcctcagctttcttcacccatgaggttcagtaacgaattggcaggagagtcttctttccctgagagaaaggttcagcataagtgcaacgattataacattgtgtctacaaccactgaattgagaactcctcagaaggaggtaggtttggccaacggaacagaatgcttggctgtttctcctattcctgaggattggagaactcccttggcgaatctgacaaacacaaacagcagcgctcgcaaagattggcgggtgagttctggagaaaagttagaaactcttcgacagcctcgcaagttgaagagactacgtagacttggagattgctcgagtgctgtaaaggagaattatcctggtattacagaggcagaccatatcagatctcgttctcgcggtaaaaagcacattagaggtaactggttctgtattttcttttactacattgaaatgatctgggagttgacaatgaccgaaaatttacggattctgatgttgcttaacatcaccagaatctccccagtatatgtatgtataccaattggtttgattgattaggaatccataagatcttaatagaatattgccagtgtcatagtgaagtggaaaagtgctgagagttggtttacactttcttctgttgcttttgcgttggtgacaaaaaaggtcaattttcaattaaaatttgagttatttgtggtatacatctgcgttagatcaatgtcttgatgtgctgagagaaatgaaacatttgtcatgttgatctgtttgagtgattgctgcttggttgctctgtgtcttaaggtaagaagaagatgatcatggatgatgatgtccaagtcttcattgacgaggaagctgagtaagttcttctctaatctaaaaataaacatctgatggtctttcttacttccacaaaacagcgagagacaacataacaaaagtagtctttctgactacaaagttgatgttagttgtttcaaacctctctattttgatcagggtctcttcgggagcagagatgtcggctgatgagaacgaagatgtgactggcgattcatttgaagatagtttcatagatgacggaacaatgcctacagcaaatactcaagccgagtctggtaaagttgacatgatggctgtttacaggtacatacaaccaaagatatctttcttctactgcgaggtcaatgagcttattaaaaatcacaaggtatccttccacaggcgttctcttctcagccagtcaccattaccggcgagatttcgtgatttagccgcatcaagtctgagtccttattctgctggacccttgacgagaataaatgagagcagaagcgactcagataaatcattgtcttctcttcgaacaccaaaaacaacaaactctgagtcaaaccaagatgcaatgatgataggaaacctttcggtagtacaaatctcgtcagatagccggaaaaggaaatttagcttatgcaactcggcgaatgcccccgtgattaacttagaaagcaagtttgcagctcatgcacaagccacggagaaggaaagccatgaaggcgtgagaagcaatgcaggtgcgttagagtacaatgatgatgatgatgatgcattctttgcgacactagactttgatgcaatggaagcacaagccacattgttattgtcgaaacagagatccgaagcaaaagagaaagaagacgcaacggttatacctaatccaggcatgcagagaagtgatggtatggagaaagatgcaccatcttttgatcttggtctgtggtgattcttctttcatacgaagatactaagttatgtatatagattgacaaaggagacagtagagcataggcatttggatgtatgttttgtgtattaagtttaggtatatcctattgaagtacagtgcttaaggcagtgcacatggttaaatcaaggttaatgcctcaattcgttgaaccctttaagtaatgacacaaatatgactacatcggccaacactctcacacctctcaaccctaaactgacattacaaagcaacatttaccattggcacgaaaagaaaactaaaataaaataaaagaattagatgtacaatagacgctataaactctagaaattaataatattgggatcataaaattttattaatttataatgatattaatatagatcttataattttatatttattaatttatcgaataaatgaatatttattaatttaaagaaatatttatgcaaaatataatactattttttttatagaattttctttatttagattttctatgctttattgtttgcatattcaattatgttaaattttggttattagaatagaagttgaacttgaagttgtgattaacaatcctagttattagaatagaatagatgtaaatagtctactcgaccatctgagtgcaaatgaagcatgcttagagtttagaagaaattgtagcttatatctataatgttggtgaaaaaattgaagacgataatgtagaatctttggaaatagtgacatataaggaagaaattaccgcgtcaaatacttttcataacttttggattcagatcgaaaagataacaccataattttttgatgcaataagaaaattagagacgaatttcaacgagattctaagtttaagaaaaaacaaacaacactagattcatattatactggattatcttagaatgtatgtttaagatttattcttaatttatgatattattgggaccatatatatatatatatttcaaaaaaataatatcttattatcttatcgatttaggttaatttttacctaggtccgacttgagaccgacaaaatttattaatttatcgtgtttattattttataaagtattaatttatagagtttctattgtattcacttttgagttgtgtctattcatgagctatttccatgtatttataaaaattagatgtacattgtacacaaacaaattgagagtgatagtttaaaggatgctctggtggaacaagatcagttatcgccactaactgatgaagaagagtcagatccagcaaagaagaataagtggatcgaagatgaacaagcaagaatcgatcgagatgaaaaagcaatggatatgatcttcataaacgttggagataaggttctcagaaatattgaaaactcaaagttaactgctgaagcatgggcaacgcttgataggttgtatctggtaaaatctcttccaaatcaagtttatctgcaacttaaagtctataactacatgatgcaagattcaaagacgcttgaagagaatgttgatgaattcctaaagatgatttcagatcttagtaatcttcagattcaggtacatgatgaagtttaagcaatgttgatactaagtgctttactggatagttatgatatgctaaaggaaactccgaagtatggaagagaaggcattaagttggatgatgttataagcgctgcaaaatcaaatgaactagaactaagggatatttcaggaggatcaagacctgtaggagaaggtgtatacgttcgaggtaaaactcaggccagaggaagtggaaattaccaatctggtaaaggtgaaggtaatgaatctaaatcaacagaaggtaagaaagtctgttggatatgtggaaaggagggacacttcaagaggcagtgttataagtggcttgagaagaataagggaagtggtgcaggagaaacattacttgtaaaagacgatgctcaagatttggtcggtttagtagcttcagaagtcaatctaggagaacacaaaggaaaccatggagagtggataatggatactgggtgttcctttcacatgacaccaagaaaagagtatcttatagacttcgaagaagcaaagtctggaaaagtaaggatgactaataattcgttcttagaagttaagggaattggtaaggtcaagtttactaatcaagatgggacgagtatcattcttcatggagtaagatatataccagagatgtcaaaaaatcttatatccatgggaactctagattcagaagggtatgagttcaggggcaacaatggtacattgagagtcatgcaaggctcaaatgttttcatgaaaagaattagaagagcttctctgtatattttacaagcacatgctaatattacagaatctttagtagtggtttcaggaggggttgatcaaacttaactatggcacagtagaatgggacatattggacaacatgccatggacgtgttgagtaagaaaggatgttttggaagtgataaaatatctgaaataaagttctgtgaggattgcgtagttggtaagacacacagaacaagttttgggaaagctcagcatgtgacaaaggagaaacttgattatgtgtattccaacttatggggctccccaaatgtaccctatagcctcagtaagcattagtatttcatctcttttacatatgattggtcaagaaaagtttggatatatttacttaagaccaaagatgaggcatgtacatctttactgaatggaaaaagatggtggagactcacagtgaaagaaaattaaagaagctgagaactgataatggattagagttttgtaatcagaagtttgatggcttctgcaagaaagaaggaatagtattgcagagaacctgtacttacactccacagcagaatggagttgaagagagactaaacaaaactataatgaacagagttagaagcatgcaaagtgaaagtggacttgacaagaagttttgggctgaagcagcatcaacttcagtttatttgattaatagatcaccgtcctctggagtcgacaataagatcacttaagagttgtggacttcagtaactccaaacttgttaggactaaggagattcaggtgcattgtttatgtacactcacaagaaggaaagttagatcccatagctaagaaagaagtctttgtggggtatcctaatggagtaaagggtttcagggtttggatgatcgatgatgagaagcgctataagccggaatctcgtgttcagagaggatgtgatgtacaaagacatcataaacaacttagtttcaagtatgagtcttgaatttcctttagttactaacaaagtttctaggtttgaatgtgcaggtcctagtaaagatggtgataattcagctcaaggtggagctacagagaaagcttcagaggaatctccagagtcttctgttacaggtcatgcaaacacagaactagaagggaatcagagaactcgtcagataacaagagatcgaccaagaagataagttgttctaccgtcgagattaaacgattataaaatggatgaggaagtattagatgagatagcaggttatgcttatcttattacagaagatggagggaaccctgagcatgtggattatcaggaagcacttcaagatcctgatagtgataagtggttagaagctgctgatgaggaaatagaatcacttatcaagaacaagacatggatattggtggagaggagtaaatcacaaaagccaattgggtgtaaatgggtattcaaaagaaaagccttcattgcaggagtagaatagccaaggtttaaggcaagacttgtagccaaaggcaactcacaaaaggagggaatatatttccttggaaatctattcacctgtggtgaaacacgtttctattcgccttatgctgtcaatggttgtgcacttggacatggaggttcaaccgatggatgtaaaaacaacatttttacatggttacttagacgaaacaatttacatggagcagccacaaggctatgttcatgaaagatatccagagagggtctgtttgttgaagaagtctttgtacagcctgaagtagtctcccaggcaatggaaaacaagttcaatgagtttatgtagaagattggatatgagagaagtaagtatgacatatgtgtgtacttcaaggttctacaaagttgagagtacgtatacctacttttgtacgtttatgatatacttatagcttctaaggacaagaagtacgtatgtgagttaaaggtcttatttaactctgagtttgaaatgaaggacttaggcgatgccaagaagattctaggaatgaaaatcataagggatagacaagcttgtactttttccacatcataggagggttatctcttgaaagtacttggagattttggaatggaccaagctaagtccgttaatactcctataagaattcatttcatgctaaaaccagcaactaacgaagaaattcagaagttatgagagcaatgccctatcaaagtgcagttggcagtctgatctattcaatgatagttacaagaccagacttagcacattttgttgctttggtttgcaggtttatgagtatacctctgaaggaacactggcaagccgtgaaatggatacttagatacattgggggtacattagaccgaaagctttgttagaagaatgaaggagaactcattctagaaggctactatgacttagactatgcagcatataacgaaaagagaagatctactctaggagtagtgtttacttttggaggaaatacaataagctggaagtctaatttacagaaggtactagctttatcgagtactgaagctgaatatatggcattaacagatgtagcaaaagaagaagtttggttgaacggtctcgtgaatgagctaggtttttgtacaagagtcaatgaacattcactgtgattcacaaagtgcaattgctttggcaaagaatgcagtctaccacgagagaaccaaacacattgacgttaagaccatttcatcagagaattggtgagtaatggaaaagtgcaggtgttgaaaagtgacactgaagaaaatcctgcagacatattcaccaaagtgttacctgtgagcaagtttcaagatgcccttgaactgctcagagtttctaagaactaaggtggagcttaggctccggataacagctgagtgggtttactcaaggagaagaagctgagtgggtttacttagggaatcaaagtcaagtgagattacttgagaaagataaagctaaacaagttggttcaggaaccggagatgaatccaagttaagctaaagtagaaagagcataaagatcaaggtggagatttgaagaataatgatctatatgctaagtatgggaaatactctgggagaatcggaaggtttcagggtcagtttaaagtcaagctaaggagattgcgactcgtggagcaatcacaatcgtccatctctaccggacaattcttgactgttactcgtcttcttccgtttcttatatcgatctgtaattctgtttttctctttacgattcataagtttgttaaatcgagagagtagagagagagagagcagaacgattgtagtgagagagagctcggttttgagctaagagttttagtggattccggagaaatcttcggcgagacgtaggattccaaatcggaatcgaactcgtaaaatctctcatgtccgttctaagtttctttgtgttcagcatcaaacgagagagagagagagagagagagagagagagagagagagagagagagagagagagagagagagagagagagagagagagagagagagagagagagagagagagagagagagagatctaaacacttaacatcacttattattaccgtaacaattattatcgtcattagcctgatgcaaatatacaaaataagcgattcaaaacacctttttgttgtagtgacaatagaaacgtggttatgcaacataatgcgaatcataatgagatcgtcaacggaaacatggttctgcaaccaaatgcgaatcacaatgggatcgtcaatggaaacatggttgtgcaagagattgtgaatcacaatggcatcgtcaacagaaacgtgtttgtgcaacagattgcgtatcacaatggcatcgtaatttcgatgtcagatgaactcattgaggaggaaaggttcaaatgtaacttttgttggctttgcaatttaaaggaaagtaaacaaatgcaagttaataggggtttcgaatccatgaattaaaatataaaatacaatttcaaaagtcaaaaaaataaatcagatgcaaataatctgaatttttcccaactcatccggttatttgaatttgaaccttagatcataacttaaggtttcaattttaaatcccttggttaacttggcatgtgacaatgtattctattatatttggtgtagctcagtatatttttccaaaattaaattatggaaaaagaaggaacgacacactcatgtcatcgttgtagtgcatgtattatagtaaaccaattttctttcttatatattttttaagaaagaaaactaaaacagatgaaaagatttctcccggaatcgatacaatatattttgttatcaaattttggtaatataacaatgcataccttttccatttgacaatcatttttcgtttttataaatttaaggttaattttctttaagaaaaaatatatactttttttaacaatcataatatatgacctttgcattatatatatatattaagaaatgcatagtatataccaaataaataaatatatatatatatataaacactaaaacttataaaagaaaatgattgccaaaagtaaaatgtatattttgttatattacaaaaatttgataacaaaatatagtacacaaaaagaatttgttgtctgctttgttatatttatttatcttgttatatcatcaaaagaataaaccaaaattttgttctataatgtttttgtgatttatttttttatattatttgtggtatattttgttattaggttttttaaaaaattatgtaataaattattgtttttatttgtctattaaaaaaatgaaaaaaattgaatatatattttggtcaacgccggtcaacatcgttcaacaccagtcaacactggtcaatgccggattttagtgaccgggatatcaaagtaggatggttatggtgttggcaacataacttatgtttgtttttgaatgtctgtatgtgatgtcaatacttcgtgtaggtgatgagacatttttaaagtttgcatgtataacgatgtgttcgcttatactttgtgtatatgataaacttttttattctaaaaccgtttaaatagcataaaatcgtttaggcctagattaataagtgttctagcgctttattgaacgttagtatttatctatacgtagaatacgaaatccgtattgtattttttttttgttctatatattagaaagataaacttttcacatatcctacatctacatggtattaagcaggttattatctaaaattctttagttaagatcttggagttggtgcaatgagtttttcttaaactacatcacaaacaaataacgataaactttgataagttttgtacgttttaagggagacgagattcacaggccacatcaatgtggagagttaattaacactatctcaaaacatatgcatgtgatcgttgtacggaagacggataataaggccttacaacatttaattttacacgtggtcagttgccgtaaaccggtacgtagtttcactgatgaatgcagggtttaggtttaagggtttagggtatagatataaaatgatgccattgagtgaatgctgcacgttctatattggctgcaaaatttgatcctcagtttctctctttggagattaagttcaccctctacccaagaagaatgaagatttcgaaaaaataagggatttgcattaattaatttatctaaaaataattattctattcaaaatcttaaacaaagaaaaagtcgtaattctattcaaaatataattttgcaacctattttatttaaaatattataacactcatgcaaatcttaaacataaattattatatataatattttgggaaacaaacacatacaaagtcaaggctttgaccaatatgaacgcattttccaccagcaaaatttgattcaatgcatgtcttattgcatttttctgttggaaactctatgcaagtacctatcaagaggggcttccttccatcaatatctttcgcttttgtagattctgaaatttataccggtgtaaaaatgttagtttatcactgaaaaacataaagaatccttagacaaatgtattgtaacagtaaaacgcatattcatctgtaagtattaatgtttgcctacttggattcaagagaacaaccatacataagaacacaaggaaaacacatttccttgatgaaaccattttaatccttttctttacgtattttgtgtcttttcttcttcttcccttttaacttatgaaatgaaatatatagttcaaaatatttcacaaatatagaatgttcggaggatatacagtaagatatgcttttgactttgactatgacctttgaattagatcatctccataaacgactaccaaatatttatggaaattgtttaaagtagtctccataaaaatcaggctattgatttcaaaattgtatgtatgtaaacttatttaatttgataataaaaaggttgactctggtatactacttaaactataccgattctttggtatacattatacattatacattgttcgtcttgcggtgaaactagtcataatgctgctaggtgtaatctatatcccaaggaaaagaaaaaaagacaaagaactactgaggtatatgatccacttttttcttctattacttttttcgttcctttagtaattgtatgtgtctgtgattattttttaggttgggccatcatcgtctcaagtaccaaatacaatctctctcacgcaaccatcacaaacaatccccgacatggtggttatgagtgaagtttaataattctatgaatgtgttccatttagtttaattttgcaaacatgaatggtagtttggagtttttcttatcttggtgttagtttttattttttgaaccaatgagaaatcgttggctataaatctaaacataaacctaagttcttaatggccctacttgttcttttatcaattccagtttcggtttcattcttatgtaatcgatgaaagaataaacattgcttttgttttattcacttaagtttgactgtttcaagttgaataagtcctcctgttttgtagaagttgaaacacgattagatttaaagtctgttttggatttagttgagttgagtttccttcgatcattctgttgtaaggtataaaaataccaaattcgtttcagtcttagtaagagaattattcagaacgttctctatctttcaatactctgtttcttataacaatcagtctaatagaaaacaaaaacaaaatcaaaaaacaaaaaaaaacgtgtattgaagaaattctaaacaaaaattaatggttttattgtttttgcttatttaaggtaatcatggttttctaaacgcaattatcgatttactaaatctaaccacaatttagaatcactatgttgcaattaaaagagaatctataattcgggatgtttaatagaggcaaaaagttgtttatggtgtataaataagaggcaaagagtttatggtgtataccaaagaatcggtatagtttatgcagtataccagactcaacccaataaaattaagtaaggcaaacttatcggatcagacaaatctatacaaataaagattgtattttttgttgttgtctgtctaatgtattataagttctttctttttttgtgggtattatatttacggatgtcaagttggttaaaccaaatcaaaccaatctatatccatataaatgtagtgtctaatggataatgagtcaatctaattcatttagcaaatggtttggataaaaccataactcatttaaattattgagttaatgaattaaataagtttattcagttaataatttttctatagatgataaaaaaatatctataatctaaataattatcattaataataattaataactattataatcatcatcatcatactaccatcatcattcgtgatcatcatcactattcatgatcatcataaatattcatgatcatcatcatcatcatcatcattcatgatcatgtttttggtcaaaatatcacgaaatcacgttttgaccaaaaaaatacgaaatcatatttttggcgaaaatatacggaaacactttctttctttttttgcggaaaatatgttttagacgtggaaatcatgaaatcatatttccgcggaaaatgcggaatcatgtttttgacggacaaacaaaatacggaaacacatttttgacagagaaacaaaatacggaaaataaaagcaatcattataaaacatagagcaaaatgcttggatgacattcgggttgaaagacagcaagaaacccttgtacatttttgatggaactcatcattataagttgtacccccttgtaaggccaaaccaccaccaccaccggtaatccaccccaaatgccaaggacattcctaatatccatgggatacatgcaaattcacatcatagctaaatggaaagaggaacatgtccttggagatttctccaaagaacgacaatatatgagaaaaccagtttataagggaaaagaaaaacttatagtgaaagcaaaaagaaaaagctaacatgagatataccatatatagatcccatattaaaggtctgatcacggcgctagagaattcctattcatgcaatcagaatcaagcaaaaactcatatttaaaatttatttggctacttttaaacaaatatcgtagaaaaaatgttttgttgtaagtactaaaattttcctatattactcaacttatatgtgaatattgcatatgttgaaaaaaaaagctaacatgagacgtaccataaatcacatatgaaaggcatgatcacgacactaaataattcctattcatgcaatcatgatcaagcaagaactcctatttaaatttatatagctatctataaacaaatgtcaaaggctttttttttactgtaaatattaaaactgtattatattatttaacttatatatgaataatgcatatgtagattttgctaagttaatcaataaacatataagaaatttgattttcttatatgtagtcaaaatattaatgacatttctctaaattacctttattaatttttggtaaccttcttaaatttagtattcaaatctaaggaagtattttaatgtattttgatacttcttatctataaatatgatattacgcgctctcatggtagcgagagaagttgaggaaagagagaaaattgtataataactgttgagataacatattttggtataccgatctttaggtacgagcttatggaaagtggcaacgttgtgaatacacaacctgaattatcaggcataagtaagaaattttgatttttttattttattgaaaacttgttttagttataatgttttgatttttgttcggcagttgatggatccaagagttatatgtacgagcagttatggaaactctgtgcgggacctttgtgtgatattccaaaacttggagaaaaggtttattactttcctcaaggccatatagagcttgtgagttctctctctctatattctttctctcttctttctctctctctctctctctctctctctctctctctctctctctctctctctctctctcctttctctctcttctctctcttctctctctcgcctctttctctctctctctctctctctctccttctctctcatgtatgaaaccttttgacggctttttcaggttgaggcatctacaagagaagagttgaatgagttacaaccaatttgtgattttccttctaagcttcaatgtcgtgttattgctattcaacttaaggtatatctctattatgttttagcgaatacgcatgatttttatagttgatctaattataaacagaaataattggttaattgtttgatgtttgattttaggtggaaaacaatagtgatgagacttatgctgagatcactttgatgccagatacaactgtaagtgaaaatttagtatttctcttttattttcagttaattctatttttctcctattatatctcattgattttctgattttgttaaatttttagcaagttgtaatccctactcagaatcaaaatcaatttaggccattagttaattcctttacgaaggttttaacggcctcagatacaagcgttcatggtggattctctgttccgaaaaaacatgccattgaatgtctccctccgctggtatttaattttatagttttttaaacgaatttgaattttaagctttcattagacattacatattaaattttggtttaggatatgtcacagcctctaccgacacaagaaattcttgctatagatcttcatggtaatcaatggagattcagacacatctatagaggtaataattccttttattatataattaaaacacagctattgaggtaataaatcctagagaagtaactaataatcttcttattccatgtaggtacagcgcaaagacatttgttaacaattggttggaatgcattcacaacatcaaaaaaattggttgaaggagatgttattgtattcgttaggtataatattggttcttctaatatatctttgtgttcttgagttttggactttaaactatatacttgtggttttaggggagagactggagagttacgagttggtatcagacgagcaggacatcaacaagggaatataccttcatcaatagtatcaatagaaagtatgagacatgggataattgcttctgcaaagcatgcttttgataaccaatgtatgttcattgtggtttacaagccaaggtaatttcaaagaaccatttgaactcacattttagattatattgatttatcaataaattagtttcttcaacatgtaggtttatattttgtgtctttataagtatcaggtcaagtcaatttattgtcagttacgacaaattcttagacgttgtgaacaataagttcaatgtcggttcaagatttacaatgcggtttgagggtgatgatttctctgaaagaaggtaacattagatgaaaaaaaaaattgcttaaatattttggtaatgtctaatattatctgtgataacacattttgttctatcgattaagatcttttgggacaattattggagttagtgatttctctcctcattggaagtgttcagagtggcgcagcttagaagtaaaatttcattcacactttataacattattttagaaatacgtttttgagtgcaataaatagcatatcactaattaactctaatgttgcaggtgcagtgggatgaatttgcatcatttccgagaccaaaccaagtttcaccatgggacatcgaacatttaacgccttggtcaaatgtttccaggtcatcttttctcaagaacaagcgttcacgagaagttaatgaaatcggtataaaaaaagacacttataatcttctatttaatgaatttaagattctttaataccttctcaatatacctattttatatacaggttcttcctcatcacatctcttgcctcctacattgacacaaggacaagaaattggacaacaaagcatggccaccccgatgaatatttctcttcgttatcgtgatattactgaagatgctatgactccttctagattgctaatgagctaccctgtccaaccaatggccaaactaaattacaataatgtggttacaccaatagaagaaaatataacaaccaatgcagtcgctagttttaggttgtttggagtctctctggccactccttcggtgatcaaagatcccgttgaacaaattggcttggagatttctagacttactcaggaaaaaaagtttggtcaaagccaaattttgagatcaccaacagagatccaaagcaagcagttcagttctaccagaacttgtaccaaagtaagtataagttcaatatattcttattctttatatatgaaattttttctcattatactcaactcacgcaatcttaatatggaataggttcaaatgcaaggtgtaacaataggaagagctgtggatttaagtgttcttaatggatatgatcagttaatactagaattggagaagctcttcgatctcaaaggccaattgcaagctcgcaaccaatgggaaatagctttcacaaataatgaagaggataagatgcttgttggagaagatccatggccgtaagttttctttctatttctatcgattgaaagattagttaaaatcttgagagacattgatatttcatttttttttttttcatgtagtgaattctgcaacatggtgaagaagatattcatatattcaaaagaggaggtcaaaaacttgaagtccaggaagagtctctcaagttgaattaagaatcaaaacatatgtaataaaaaggggtcgaaaatgttaccggtgtttgttctatttttatttttctcttatttggtgttgcatacatttgtgttatgtacttttgttttcatcatccataaataaaataaaatccccttgttgtcgtaatattgagtttttttctaattcatacaatctacatatcatatcttcaatctaaaaatttgagtatagtatttgttttatgatattttgaaaagaaaattgtgtaacacgaagtatatagtcatataaattaaagattttactctatctactattgtacttgtaaaaccggatattttagagacataaaccaaatgatattataaaatatgtttatatttttaataaatatttccttaattctatcactacaattgtatcaccactcacaactagtttatatatataatgatggaaaactagggaatttggccaattcatattcaaataaaactactaagtcgaaatcatacataaaataaagtaccgtgtgaatagatacttcaactattatgattggggaaaattcataaacaaggaagtagaggcagaaaaagatataaacagttatcatagtcgggtgtaataacatcacgagtattcagattttggtaaagagttttttcttcatttcacatgcttgaattgtattaaaacattcagtaatttagttttttttttgggagattaaggaagaagacactatttcaaaacatatgcatgggatcgttgtacggaagggggataatagggccttacaacattttactttacatgtggtcggcacttagcttccactgatgaatgtagggaccaaacgatatagatctgaaatgatgccatggagtgaaggctgcacattccatattggctgcaaaatttgatccttagtttctttctttggggacttaagcgtgggtacgtcgcctcaaactccaaggatgatcctgcaaaggttgctgctagcttcacctcccaggtcgtcatcatgaaccaccttggtcagattaaaaatggttacaccccagttcttgattgccacacctctcacattgcagtcaagttctctgagatcttgaccaagattgactggcgtactggtcatgagattgagaaggagccaaagtttttaaagaacagtgaggccgctattattaatatgactcccaccaagcctatggtggttgaggcttactctgcgtacccacccctgggacgttttgctattagggacatgaggcaaaccgttggtgttggagttatcaagagtgttgtcaagaaggacccaagtggagccaaatgatgagactctcttctttatggttgtctcttatcttatgcgtttaaactttgatggccatttgagcctttttaattatcttattgttttctctgcgactttatcatggttttcaattaagctgttcccggatcatttgccttaagtactagtgtgacaaaataaaaacccttaatacaatatttcttcctcacaagaaaactgaaatagaacacacacaacggagtcatcgaatatgaactttgtttagcctatggtgttactatatataacttttaatcattttttgtggtgataaaaaacttgttatatatagagacatgaatttttagtctgaccatagagaaagccaaaagttttaaataaatttcagttagaaaaaggtgcaagaaacctaaacgttgttcccgatctcgaaagtgtaaaaaatgttaaaaaaaaccatggttgcggccggagaagaaagaagtgttggagaagaaattatggaagcaaataggtcaagaaaccgtggtttattcaactcaggtcatgaaggttaaaacctataaactcaagctaaagtaattaaatttgctttctcttattcattttgtgtttccctttcctgagtgttaagagggaggaaccattatcagagctaggtttcatgttgaaaactgatgtgtaaagatggattatgttgatgaagaactggacaatctttaagcaagatgcctatactaactggtcgtttgttgttttaaatccggctatgaacttgaagagcagtaaaaaggtagtgtcaaagaacattggtgatgcatttttgtcaccagatgtccagatcaatgcaaagagatctcttcgtgaggtcaactttctttgccacttgcatcatgataaaatatgtttgagtttcatcactactctctcatcgagtttataaaagctttgagtttaatcacagccaataattaatatcagctgcatgttccatagataccacgtagagaaaatgttttcttgagatcgatgtttacaatgcataagaaattattaatagatgggtcttctccctcatcaaaatgtgcatggaagcagagcatatctacgaaggaggagggtcggagatggtgtataaggtcaacggaaggatgattaaaaaaatcacctttgagaactgcgctgtgagaatagaggagaagagaaatggaaaaaatatcatttaatcgtccaactttaaaaaatggtcattttatattgaatttttatagtatattattttaaacatcaactaaacattgactgctgtattaaacatgagattgtattgacctaaccaatatatatagacatgacattaaaatccgataacggaaccactaacagtcgttaacaattctgttagtcaaattaccaactttcaaatttaggctattttgaacatgaatttcgtataaggctattttaatcatcaactaaatgttgacccggccaaaaaaaacatgattttaaaatctactaacataaccactaacaactgttatcaatcgttaacgcacaacaaaactaagacaaaaaaaaataaaaagaatacaaataaccaaaacacatgactacagaatagttaacgactgatatcggcttttagtggttccgtaatcacattttaacgtcatgtcaaaattggtctgatcaacgcaatttcatgtttaatatggcagtcaacatttagttgatatttaaaatagcttactatgaaattcctatataaaatggccatttttttaaagttgaatgattacatgacatttttcccgaagagaatgttgagagtgattttattttttgtcatcagatattatttagagttcagatgaaccaagattgcggaaaattgtttatataggtaatatgtagcggtttgacacgaatttttcttgccaaatactccgctttgacattggtaatacgagagaaagataaataaaaaatatgaaatagtcaatacacgaattaataaaagacagaagttaggataagtaatatttttatatttgcatgttaacgttttctaaaatattactgatacacgtattctagcaattgtaattggtcagaattatgtaacaagtcttatgttaatatgtaacttgctaaagcttaagttaggagcatgcttctacatcccatatatgatagatatataaatcacaagtaaaataaatcatattctttcttcttgacatgataacatattatttctaatatattttaaatatattaaaaatagtaaatatataaaaatcccaataaaccatctattatatacacttccgaaatcaaatccaatattttttttaaactatatcaactaacttgaaaatatcaattatcaaaatatatatccgggctaacccctagtcacattaaaaacggcatttcgcctgattacccgtccagcctatttttcaaacacattggaatttactgtggcataggagttctctctgacgtgtccatgttgctccacaagtggacaattttttggtagatactacaaaagtatgatagacaaaatacgaattttaaaagagaattaatatataaatctaaaaacccatttgtatccaaacatgtggtgctcatgcacccaataaagtttatcactacagtctacaccatataattttttatttatattcgttagctttttacgaactgcaatcaattcgaaatatttgaaatatatgagcggtcaaagaaggtgtattcaattatacccttcaacaaaagagaaaaggcattctgataaatatttaatttattcttttgtccattatgttacacatagagattcaactatatttcctttaagtgacatgcttttgcatcgaataaaaagagttgcaaaactcgttaattattatgcaaccaaaacaataaatccattttcttaaataacaatttggcaatcccgaaaagccaaccctaaaacccatattaacattggagtcctcaacaaaagttgcaataaatcacacattcacactttttaaaaaccaaagaaatcatgaagtctttcaaggagaaccatctatagtaggattttggtctctagtagcatgatcactcacttgatgttgaggcttttgctcaagactcattccgagaccaacccgaccaccgtctcctcctccgccggaaaatagccccaaattgttattttctgcaacacctaaccctaactgttgacctcccactaacatagaccctagctgaaccgacccgattcgacccgggtaatgacccggattaaacgcccacatgtgctgtgatggatcctgaacgttagccggacctcctcctcctccgactggtaacatccaaaaagcactacctccgtttgtggaggctggcgttggcgctagtgcccacatcggcggtatcatattttgtgttcttgaccgggtcgaacccggatcttgatcaggagcttcggatcccggtttaggtgatcttgaaccgggttcttgatctagaaaattaggatctttaaaaagatcttcttcacggaatgttttgggaagagaagaagaagaagaatctgtcgtgatatgatgaggatgataaagctgttgctggaacccaaaaacggcagcgttttgagccgctcttcccatgtggaaagatttagacagtggagctgaaagagtagagccactgcttcgaagagagatgttcaaagtagagatattcgccggtatggttccagttccggtggctgcgatgatagctggctccgcttgttggagcagccactctatagtctcgccgtccgatttgtgttgtaactcacgtgttagttggaagacacgtgctgcgcagatagccggcatacgtatcctccggccacgtccgtctactttgatgtgacggtccttggacggtcgttttgcgggtgttttagcggcggtgacggtggtggtagtggagtttggagcagtggtggttaatgagactgaaccggagattggtcccatggatgggaccagatgggccgaaccagtggtgttgttgttgctctggttgttgttgtgggactccatattgcttataaaatttataaattatggggaaaaaaacacacaagaaaatggaataaacaaacaaacaaacttgtactgaatttttacttataacctataaattcttggagtattttttttttctggtggggctatgagtttgtgttgactgttgtttacttgtttggagaaagagagagtgagaggaagaagatgaagcagcttgtagaaaagagagagagactttcactttctttttcttttgtgttttattttcatttgtagtcccactaggtttttgtagtagagagtagagaccaatatttgctgtttccacaccaaatgatcacttaacctttttttgtttggttattatcacacttactatattgtagtataaaaataattatgcgccgaatgtattgaattttggtctaactttgtgagactaaaactatttttagcaatggactatgaaaagtttggaagtgttttacatgattgaaaaaggtgtggattgtctaagattataattttggggcatttttgttgcaatctttagattgtagggatctatttgttggtttccttataaagtttggcttttaggttggattttgcatgggtgggaaacgttgaatgttctatgggggaaaagaaaaaaactaatcactaatcatagagccaatttacacccaatataatagtgttttaatattatttatttttttaataatttactgataataacacaaatgtctctttctttgattctctattttgtctttgttatccgaatttgatgaaagacttgttgagagataaggaccactgtttttattaacgatgatactaataattgaagactatatataaaggcttcaattcttttcccatctgccaaattagcacccacagacataggttatatataactaatcatctcaactacaatttttctcaacgaaacctatacatctcattctagatgtgaaaactgtctaagaatagtccaatttcagcctactatgttatatgcacatgtatcagggtgttaacaaagtattcgaaatcaaaaagttttaaggaaaataattatgcaagcgtagtaaatcaattagtttattgatattcacgttgctcttagtgattaaccatgtatgtataatcatattagtattaatgcctattaactgatttattgcaatattttaattcataattgaatatttagactgtattattgtttcattttttatatcaattaaattcctttattaggttttatgtttttatcaatccaaaaccatataatatattatattgctagctataccattcggaatcttaatttggacacgagcttgagctttttggctgttcttaatgtaagttacatgtacgcaccgtgagctaaattatagataacaatgaaagtgaaaccaaaccactataaaaaaaactttatatttgaacagtatattttatataatttatatatatatatatatatatatatgcaattatattttgaactgtatatataatctctcttattttttattttcctgaaaaataattgttgagacagatgcacgtgtaagcattagcagtgaaagaaaacagtaaaacagtcagagatagttgaagaagtacaagaagcgagtgataaaaaaacgtgatgtttggtctgaaactctggatcctcccacggtccattgtcttgtctctgttctctccaaaaagtgaaaatgttcatttacaagaccatatagtatgtagccttgttcaagattctgttagagcaccttcattggatggagactcattgagtatctaagaaataaactattaatatttttttatatacatttatttttaaataaattattttaattgcttaaaaaagtataaaagtatcaaccaattaatgttttaaatgtgtaggcaagacgttaaaaataaaataaaatggtgagagagtgaaagtgttaatcactcttcgaccatatatatctctaaaatggtgcttttaaattgttttagaatcatctactgcctaaaaagcccatgctttacaggttttagctttgggttggtcttgtgtgtaggtatgatctcatgagttctcatccaaaaaacaattctactctctttcattccctttaatttcactcatcccattttacatttcttgtaaaaagtttcctcaacctttcacttctctttgataccacctagatacatagaatctcgtatttctataatcttgtgatatacatcgtactttttttttttttttttttaatgtaatgttaaattaaatccaaaaaaaaaatagcgtttttacatctatgtgcaacattttgttgaaaaaactggagcaaaaactagaatacaatctaaaaattgtttctcattctctcatcgcaaaccaagcttgtaagcccttgtcatatctcttatctccacttgctttgatcgaacaaagctggttccgagtttgtttgtctattcatttgattaaaagagctgctgagtttggtttctctccatgattccttccgttcctttcgcgccaaatggtgtgtaccgtggcttgaaagagatatcgcgcaaagaaactgtcaagcggtgtcatccaagagccggagatggcttgtatcaggtcttgccaatgtgtagaaaatctgtctccatagattcctcttgctaagttactccaaactatcgaagcaaagtcacaggagaagaagagatgatcccgggtttcgggagcgttgtgacatagcacacaagcggctgactgacctccattccaatgagtcattctgtctcctgttgagagtcggttaagaactgctaaccaaacacaaaaagagtactttggcgtggaatgaccaaaccaaacacccttataccaatcaacgtccatggatatggtccgcatatgattcaaggtctctttagtcaagaactgtggcttatatacgtcatttttacctttccaaagaacaatgtcctcatcctctgttctatcgtttctttgttgtaagagagctgtttctatggcctgaaggtgagtagatctgtgtcgtctttgtctatagccttcccaagcctctgctactgttttatgcttacttattccaagatcaatttgcccccgatcacctacaacatcgtacttcaatatttcttcctccgataattttagaatactttttcaatgctttgtttttccttctctcatagcatgtgactaatattgacaatcttctaactcgtctttgcatgaaatgttgtgggagactcttgtctcaatggttcttccatagttaatttttctgtttcagttaaatgtatttcaaatttagcttttaaattttgtttgggcatgtctgtcttctgactttgtaaataactttttcgtttcgaggtaatatatattcacaagttataaagaaaaaaaaaaaatgttgacgatcttactccgttttcaaatgtgttaacagccactttttctggtagattttccggtgaaagcactaattagaaaaccagtttttggacatgatggaatcctcgtcgagaacattatatgctggtgtattggaatgtcataaatagagtttgcttcggtgagaaatggaggtgtaaaatagctagcttagaaaacttgaaatgttgacttaacggtcaaatggtgtacattttgaagaaaaaaggagaaacttaaaccacgtgtattaatattaccaaaaggagaaacttaaaccacgtgaaaatcagtttgttgtgccataccaaaaggccggcgatgctgtatcgtgccgactcgggctggatatgtgatttgggaaatgggccaatgagtcaatgacccaatgattctttttccaaagaattgtattagccgacaaatatttttgtttaattgtttgacacaaaatcaatgtacatcaattcacaataaagtctcattcttcttttgtctacatgaacgtcgagtgatgcccatcagaatacaaaaccaggattattgtgcagtttatttaaataaatagaaatatatacatttttgacataaatgagacaagaaaattatttacatcatttaaataaacatcatcttgttttactatactaaatacaagactatagtcgatatttagtcaaatggattatcaggattccttttcctttgtaagaaattcaagccgaagaaacaagagtccagagagaaaaaagaaagtaaaaataacagaatcgtaatattcctcattaagtgtttaatgtgtacattgtaaagtatttatacttgtcgattaacatcacaaagcttattcattctactttctgatttcaatttatttcatataaattatacgttgcacttgtagtaaaaacactatttttttaatctaatttaacattattttcaaaaaaaaaaaactgtgatgttgcggattgaaattgttcgatgttgcatcaagaaaagatggacgaaatggatttgattccatagttgaaagaagatcaaaagatgatagagattactttgaaaagagatttagaagagaatcggaagcaattaggtcagaaaatgaaaatgaagaaactcagatttcactcacgaacacgaattgaagaatcgcgaggaaaatgatacaacatgaatcagaaagaaattgaaagagatgaatgagaacgaatttcgattgaagagaagctcatgatcggagaagctctgatacaatattaggattctttctcctctataacaaactcaagctgaagaaacaagagttaaaaaagagaaagtaaaaataacagaatcgtattatttctcattaagtgtttaatgtgtacattgtaaagtatttatactcaaatacacttttaccgtaagagtaaaatactcattatatggataagtttaatttagaatagtgttacattatcctaattatatatgtactgaaatcaatcgaccaaatgagtgaggcttttggtattgaatttgagtggaggctaacttcaaatcatgattataataaagataatttcacctattacaccaataagaatcggtcatttcagcttattgaaagatattcatattgcaatagcgccaaaatgcaaattattaaaaaaaaaggtgtaatttcgataaaaacggcaaacgagcttttcccattttctttttccttacttgcaaagcaagaaagaaagcaatcaataaaaagtctatgtccccgcacaagttttcaataacattatcatacaaacaacaacaacaaaaaatcatatcgtggcaaatattagaaccggaacaaaaacctaaagcggtttttcagagttgtggccaagacgcagatcgcttgatgactggtttcatgagtttgtcttcttcaagagagatcataccaatgtgtgaaggatcttctagcaacattttcgccactaagtaacctgcgattgaccaagtctggtatttccttgcctgttttccaacgtaccttccgagcttaccgtcgtaatactctggccaacagtctcggtgaagacgcgattctatgaggtcaaccgcgcgtcttgcgatctgcggtctccctgtcttaatgcacgctgctgttagctgccacagcaaaactgtacattgagcagagaaacaaaaaggcggtcagattctgtattcaattttattgacaaatttaacactacacaacatgatgttcattattcaatctatcaaaacatttcaaaacaaaatatatcaaaggttgccacaaatgtatatatttaagaaagaaatgcgatcataagatacaaaagttgaaccaaactaaaatgtatctatacgttcatatgaataatccaaaccacaaccaaactgtagctaaactaagtactgagtttttataactaaaatctagctaaactatcttaaatgaatatttctgttcttatgccagtctacaaaaaaaaattgaaacccaaatcaaaccgaaaaaaaccctaatggctaggtctagcgaaaatctcagttaagcgagataagaaatgtctcatgcaatcagtctccagggaaagaaaaaagacctggccaagatccaccattgtggtagctccaccgtgtgttcttggggtcacagccagtaacgatgcgccactcatggccctcgaggcatggataacaaatcttgagaggcatctcacctacaagctctgcccaccggtgctcaaggaggtccataatggccatggattgatctggagtggccaatgaagaaagtatggagacacaattaccgagtgcgaaccaccggaaatccatatgggcaggtcctacgtttcccacaaagtagcctccacggagaggcatgaagtcgaaaacccactcgggtatagaatcaggcatcacattgaacttgttcaccgccgtgtgagagtattcctcagtcttgaacctttttaaacaaatgtactataagttatagtgatcttttgtgactctacatatcatctaaagcaaatgaaataactatacctgtaaatgtcattgaggttctgatgatcaagccagaagtaattgcgcatatggaagctcaaggcatgaagtcgcttaacgatcctctcaatgacctctctgccatctccatcgggctttaacatcgacaaagcagatctcaaagccatgaagaacaacgcttggatctcaatgggatacccataaacacccttcaaatacaggaaaaaaaagaaatcaatcttaatagccaaacaaaacaagaaacaacaatcagtttcgatcaaagattgcttttaataccattcttcgatcaatcatggaacatccatcagcacaaagcagtgtaggaaacgtgtcaaacccttcagctaagcacaaagacaagatcagtttcattcccttttgacactctggtgtctcagagagagtcaaatctccagtagatttggtataagcacgaagaagaataatccaccagaaccctgaatctacaggagccacacgtccaatagcactctcaccgaaatccgcaacaatgttatccgtttcacggataggatcatgaagcaccttgaaacttgcaggcatcacaccttctcctaacttaaaccgatccacacgtttctcccaaccttgcagctgaagtgtcttaagcaaaaaatgcttcactatatccggttctccattcatcagaaacgccaacgcactcggtacaaaatccctcacaaacacctacaacaaccgcaaaaaaaacattttgaaacgttttgagataaaaccatgaaaacttttcgatagttttacctgatcatagttcaagacttcatcggtagtattatcaaccgcggcaagagtaccaacaggttgaccacggaagaagaccattgaccttcttaaagcctcccaagcttcagccatcataggatgaggctcaaaggagtttctagcagaagaaagaggcgtatcaagcaccgatctacctcgcggcgaatcgtgtataccgtcatgtctactgtaaccagtcgatagctcactcatcgatctttcatcaaacgatctcttcctttcgatcttcaatcttggtttatccaaagctcgagtcaaatcaagatcatccatctcagataaagaacagtgtgatcctacagctcttagtccaacaccttccattataacactaaaccaagatctaaaatcaaaacaataagatcaatgagattgttataactcctaatccaaaaaaaaaaaaaaaactcgtgtagttggaacacgcgaaataaacacattgcatctaatttttattcgaatataaaattatgcttgaagctgttcttattcgaaatcataaacagatcaagatctataacgagaaacagagtcaacttcaagtaaagctacagagaccagaaaaaaatcagatctaaaaatctaccaaacgaaatcgaaagaaaggagaagaagaaacagtgagagagagacctctggtgttgagtaagtgagaaaagtcgtcggcggcggcggtggcggtggcggtggaggcggaggcggaggaggagaaaatgatctccgacgtgaaatgagagaagagagaagacggagagatttataggagagggaagaagaaggaaaaaaaaaaaacgatagagtgaagaagattgatatttataatgacggagaaacggaaaagtttaacggagtttcaacgggactggtaaaagagaggagaattttagtttaccggttataaccggtgaaaaaggtagactttgtgaagtctacgtggactaaacgacgacggatttgtgacttgggctgatttggcgtttgtgtttttcttcttggaaacttgttttatcggttgcccagtttttttttttgaccgatacaccaaactttttttgaagtgttaggtggacagtacatttactaggtatttaataataatatatttactatgatttttgtattaattttttagaaaattgacagcctctaaatgtatttatctctccaagttgttagggtttattcgaggtcgtcccaagttccaatgtcttaagtccaatattagatccgaatcggactaatacctctttagttattactaatcgcaaaaataatgagtccgattggtaatacaaatttgtacaaatttttttgatgttaactacaattataagagctttaaaaatagtgtaaaactgtaaaaaaataagcagagaaagttgtataataaagttttctactaaaaatttttgtaatgtttttgataaaaattttgtgaatgataattgtcaaacatatacaaactgtagtgttttgataatgaattaccattcaaagctgatatccaaaaatatcatgtaaagtcgttattttctaatttttattagtattatttttaattattttggtattgtttatagtttttttatctgtaaaacaaatttatataattttaagtcaccaatcaaatcaataatttacttttcttctacatttttgataatgtgcaaagtacaaaactgtacatttttatgaacctaaaaactaaaagggataaatagctatctcaaatagagaatcaaactagatattcaaggtcaacttcttttctaacaaaatttggaataatttgaaaattaaacagttttctctatttcttttttaattattccataaaaacattgagttattttactattttcctgctgaaaagattcaagaacatgaaaattcgtaagttatttacgtttttgtttctcaaatcgtaaatggggttgttgtaaaagtaattatatttgatttggttttgtatatggaaacgtggaattcaatatttacgtacgattcaagaaaaatttgcgtggataaaaatacaaaaggctttggacctacatatccgaaccggatttgctaactatttatggggaacatataattaatgcagaccaaatataaaagtcaatataatactaatatgatggtcagaaattggaagaaattgatttatattaatatagtatcgcaatgagatagacatctatacgtggaatcatcatcatttggtattatatattttcttaaggaaaaaatgaggaattttactaattgtcaacattgtaacgtattgcaaaaggcagtaggaaatatttatgacaagatctttcgaaaaaaaaaaattttgtcgccagaattttattaagaaaccaaagtaggataccatttcaaatataaaagccggcagaccaacaaaatgtctcgagaaattaagcttaaaagagggtagctaagccccaaagaaacggagaaactatttagaccagcaatgaaaacaaagaaacaaatatctaaaaaaaatcaaccgttaagaaaaaacgaagatttaagcactaaaattgcgcaaaggaaccaaaagctctcacaaagcttccccaaagaaacggtgaacgtcggaagcaccaataagatcggaaagatttcacaccgaagtcaaaccagtagcaatccgacagggaggaaagcaagaagccaccagaacgagagacacaaatacaaacaccatcacacctcaccaaccaaaccgagatagcaaatgcactagggacaagacaaaagccttggagatcgacaagagataagccaattaagatcactagttcttacacgcgggccctcgtcgaatgcagcttccgcacacctacagacaaaaagctgatgacgtcccccagagaagaactagagaacgaatccattgctttgcctagaacctaactccaaacaagataggctagtaggtagctcagcaacgaaataccatcaaagtggccaacaccaagaacgaaaccagtccaaaatgcaactccgaacaagtaagaggacacaatagagaggtagagcaaagatctaaagatataatccacaaacagagtcaccaccatcgatacaagtctcccaaacaaacatgtaatatagaagaagaacaatgagacaacgagactaagccacaaaagttcaaatccgatctgggaggggaagaaccataccgtcgagagtgtccatcaacaaccacagtagcaaaggatctgatagatccgttatctaagctccaagacaccactcagagaagcaactcacctctctaataatctccaaatccatcaattaagagctccctcaccaaaattgcagatctaaaaccaaaattgcagacatcaaaattctcgtcgaaccaccacgcaaccacaccgaagagaaagcaaagactacagactaaaactaagacatgagggaccgacgccggcgctatgagagccgccacgcgccggccaagttttgaacagaagagaagcggcactaagcgagagagaaggaggctactagggttttttccctttaatgaaaggtgtatctattttcagatctttggaacattttaaaactataattttagaatagcataatgtaaaatgcaatttcgaaacttgtcacacaagataatataatatccatatactctagttaaaaggtaaatatattaattgacaaattttcatcaaaaaaggttttgtttttgtaataactaggtaatgttatgcataattaggacagagcacagccaaaaatggggacacttctgtttcccataaattttagctacgacatttacttcttcattttttgtgtaattcaattagcacaattttttttttttaatttttcatagtgtaaatgtaaaaacagataattagcatgaaagattcgtaccgatctgcatcatactacatttatctttaatttcttgtaatacaaataaaaaaacagataatttgacacaaaagattcgtatcaaaccgaatcataccacatatataaacaatattcctcgaaattaactttttttgagttctaattaatatcgattgttaaaaaaaaaaaatttaactcaacatcagtaataagcaccgtaccgttatcttttcttgatttatttctatttttatataatttaattcaatattttgtttatttatgttttttttaattgcaatctttttgtgagatactaaaatcaccacacctgattttaacatctaccacactcacgtataacaaatactattgaaaaatcatcaccacatgctatcgactactattcaaaattgtttcaataacttatctatttccaatctttacatcaatcgcataaactgtgtttattaacgtttataaacgcaaatgcttgttttcgaacattccaacaaccgcaagcacattcacgatgcacttttgctataatgatttctggcctagtggctttaacaactgacatcgttaatcaagtcacattacctaaactaactagctagtaagcatgaattttaaccccaaaaatatatatatatatatatatagtaagcatgaagggctttaaatcctattgttcttgggttaaaaaaaatttctatgtggaccaaaaaaaagaaagacttgcactacttcttataatttaaatttgaaagattgaatttcattttctataccatcagtcatagctataacaacattctataaaaacattcaaacatatttcacatttatacctgtttatacaaaagtaagttcagaatatgaggcatattgcgaaaatatctttcaatatttatatatatttatacctgtttatacaaaagtaaattcagaatatgaggcatattacgaaaatatatttcaatattcacatatataagctataggtcgaaaaaggtaaaacaattaagtatattgaagattcacccaacaaatattttattactgttatccaactaggacttcacaaattatatgctatgaattaaaattatactaggagtataaaacaggactctggaaaactatcaaaataacattaaagaaaatgatatgattggctaaatagctatcctgtaagggaaattgatgtaaattataaggtggttagaatataaggataacataataacatatcgtggaatagatgctttgattatataaaattaaaatagctagctatatcttgtagaggaaaatatttaacaaaaaaaaatcttgtagagaaaaatgatataaattataaggtggttaggatttaggaataacatatcgtagaagaaaagctaccaagaaaatgcaatacacgtcgatgaataaacaaatagtgtttaagctgttaaccatatgttcctcgtgttccttctttcagatcgacaaaaatatcaattcatagaataatcaaggcatgactcggcacaaatagaagactaccaaaccatttttttattaaactgtaaactttcaacctaaaactaatcggcgataggtatacaaattcatatcttatatataccacttaaaatcctactcaacttttaatgtaaaatatttttaatacgatctctcaagatgatgatttttctagccattaatcttgatttattcgagcatggatcgatggggcaagtattgggccgaactgatatggattagattgagtatgtgtagatcgggctctgataccatattagaaaagtatggatcgaactctcatatcatttgaatagtattaatataactttataacatacaacgatatatcatcgggaataattaatattctctctaaaataaaagtcagaaaaaaatatttagatatcctcacagaacgaaattccagaaaaataaaacatacaaacaaccaaaaatataaaatgataaagtaaaacttagaaaacaaactaataaatctctaatatgtgaattaactaggaactaccaaaaccgaaaaaaaaagtctgaactaaaacctaaaagatcgatgcacattatttatcttgtggagagaattaaccgaatcgaaactcattgtatagctcttatctctacaaagaaagtgatagagcattaggattatcttagatgctccaaaccaatccgagaagttgataacctcaaatctcactataaaagtgtactgaactaaagtccttacaaaaatgtaattatctgtatcaaatgaaaaagtaattatgttcaatatatatataaacattaacaattaagtttaaaactatgtaaactcataaattagatcaatgaacattgccgagtctctcttgtccagtggctctaccattcggtggtattttggcatttgcaagacaaaaaaaaagaaagaaagcaactttacgttacaatcatgtagtctttccataactaacacaaacgtttgagataaaacatgtacaatcgttttcattgaatttaacgttactgaaaaatgtatctttttatataatgatagaattcacgaaataagatatagaataatatataaatgatattagccaataattcttattcgattttgatttaaaaacttatagaatttaatatggtataattacagtttggttttgttaacccaaataaaatgtttcaagtgtcgtttattgctagttctagagtgtgattaagttcaatgttagagttatcatcttgaaacggtttgttataaatctcacttcaaaattgtggtggataataaagtataaataacataagctaatccacttattacctattgattttgagtttgaaaacaatcataaaacttaatgaagatggtaccaagtattattattaccgattttgaatttgaaaacaatcataaaactatagagttgaaatccatgtacataaaagaaattgttaatccatgtattattatcactacaagaaaacagataaacaacgactacagaaagcgacaacaaatgtagtcgtcgtttttgacgactacgtcacgaccgttttacgacgcatatacgacaacatgaacattagtagtcaattagtcgttattttacgactaaatatgttagtcggcaaatactcgtatagtaacaactatttaacgattatattatattagaaaaacgtttgttgttacatagtcgcaaatggacgactacagtttccgactgcggaagttagtcgcccaatcggcgactaaaatacgacacatatctgtaatcgtaaactagtcgcaactgaatcgcagaatagtcgcattaagttgttggaaaacgttttccgcattgccaagtaggtacacctaatttgtttgttgtagtcgtaaattagtcataaaaattcgtctatataatcaaaattcacgacactcttctttcacaaacaaatcaaaacaacaatcaaaagaaaaaaacaagaaaacaatagaaattttgtttattctataatggcggaaaactacaattatggcggtagtggcggtttctatcgagattggatgtacaagagattcgatgaagtgacggggaatttgtcagccgaatacgtcgcaggagttgaggaattcatgacattcgctaatagtcagcctatagtacagagttgtcgaggtaaatttcattgtccttgtagtgtatgcaagaatgaaaaacacatcatctcgggtagaagagttagtagtcatttgtttagtcaaggatttatgcctgattattatgtttggtataagcatggagaagaattgaatatggatatcggaactagttacacggataggacgtattttagtgagaatcatgaagaagtgggtaatgttgtagaagacccatatgtggatatggtgaacgatgcatttaattttaatgtggggtatgatgataacgtgggtcatgatgattgctatcatcatgatggtagttatcagaatgtggaagagccggtccgtaaccattcaaataagttctacgacttgttagaaggtgcaaataatctattgtacgatggttgtcgtgaagggcagtcgcagttatcattagcatctcgactcatgcacaacaaagcggagtataatatgagtgaaaagttggtggactccgtttgcgagatgtttacagattttttaccagaaggaaaccaggctaccacttcacattaccagaccgagaagttgatgcacaatttaggacttccatatcatacgattgatgtttgcaaaaacaattgtatgttattttggaaagaagacgaaaaagaagatcaatgtcgattttgtggcgcacaaagatggaagcctaaggacgaccgtcgaagaaccaaagtaccatatagtcgtatgtggtatctacctattgcagaccggttgaagagaatgtatcagtgccataagacagctgcggctatgcgatggcatgctgagcaccaatcaaaggagggagaaatgaatcatccttcagatgcggcagagtggagatatttccaagagttacatccccggtttgctgaagaaccccgtaacgtttatctcgggttgtgtactgatgggttcaatccatttggcatgtctcgtaatcattcgttgtggcctgtgatcctaactccatataatttacccccaggtatgtgcatgaatacagagtacttatttcttaccattctgaattatggaccaaatcatcctcgagctagtcttgatgtcttcctccaacctcttattgaggagctaaaagagttgtggtgtactggagtcgatgcgtacgaagtttcattgagtcagaattttaatctaaaagcagtactactctggacgattagcgactttcccgcgtataacatgttatcaggatggactactcatggtaaattgtcttgtccagtttgcatggaaagtacaaagtctttttatctacccattggacggaagacatgttggtttgattgtcaccgtagatttcttcctcatggtcatccatctcgtaggaacaaaaaagactttctcaaaggaagagacgcttctagcgagtatccacccgaatctttgacaggggagcaagtttattacgagcggttggctagtgtaaatccacccaaaacgaaggatgttggtgggaacggtcatgaaaagaagatgcgaggctatgggaaggaacataattggcacaaagaaagcatattgtgggagttgtcttactggaaggacctcaatcttcgacataatattgatgttatgcatacagagaagaattttcttgacaacatcatgaacactctcttgggtgttaagggtaaatcaaaagacaatatcatgtcaagattggatattgagaaatattgttctcggccaggcttacatattgatagtacgggtaaagctccttttccaccgtatacattgacagaacaagccaaacagagtttatttcaatgtgtgaaacatgatgttagatttccagatggttattcttcagatttggctagttgtgtagatttggagaatggtaagttttcaggcatgaagagtcatgattgtcatatttttatggagcgactacttccatttatctttgctgaacttcttgaccggaatgtccaccttgcattatcaggtacaattctaactattttttatggagaaatttttttatgtaattatttaacttccacatatattttaggaattggagcatttttccgggacctatgttcgagaactttacagacaagtcgcgttcaaattctcaaacagaacatagttttaatcatctgtaacttggaaaagatctttccaccatcattttttgatgttatggaacatctacctatccatcgcccatacgaagctgaattgggtggccctgtccaatataggtggatgtatccatttgagaggtttttcaaaaagttgaaaggaaaagcaaagaacaaaagatatgctgcaagctcaattgttaagtcatatatcaatgacgagattgcttatttttcagagcactactttaccgatcatatacaaacgaaatcaaggtaaatacctttatttatttaacatgttgctatactactttgatcttaattcaattatatgtggcaggttaacaagattcgatgaaggtgaagttcatgtatatcatgtccctggagtacctaacatatttatgcaggtcggccgtccaagtggtgcaatgcatgtagaatggctttcagagaaagattaccaaaatgcacatgcatatgttttaagaaattgtgactattttaaaccatttgagaggtatttttaatcactttgatttattcatagataagatcactttgatttatttgtcttcgtttgttgagacagtatgttcgaggattatctttctgcgaaatatccatccttgtccgaaaaagaactctacgtcagaagagctgaagaatatcatctatgggttaaagaatatgtaagtctacagtaattttggttcatgaatgtaactatttgtctgttttcttgtagctagcgtgatttaatttaagatcatattgatattgtttatctatattatgtaggtaacatattggaacactaattctccatttcctacttgggttcaagagattgtgcaaggacctttgaacaaggttaaaacttggccaatgtatttcacaagaggatatttgtttcatacgcaaacccacggtgctggacgaaagacatgtaactatggggtatgtgttaaaggtgaaaattacgctgattcatctgatgaagcagatttctacggtaccttaactgatgtcatagaactcgagtatgagggcatcgtcaatttgaggatcacactttttaagtgtaagtggtatgacccaaagatcgggagaggaactcgccgaaaccatggtggcgttgtagatgttctatctacgaggaaatacaataaatacgaaccatttattcttggtacgtaattaagtatacttaaaatttctaattcattaataaataatattgtatatatttttgttgatatatgtataacatgtttgaacagcatctcaagcagatcaagtttgttatattccatatccatatacaaagaaaccaaagaacatttggctcagtgttttaaaggtcaatccaaggggaaacatttctggacaatatgaaaatactgatccgacactgttgcaaaccgaggatgatgaacctgttttgcagactacaattgaagatcttgtaatagactatccggtaggagacgtaaccccaatcatcctcgattacgatattggagatgctgaaccagaagatgaattccgatgtaatttatcgtcctcggatgaagatgaaatagaagacgaaaatgaataataattgtgtgaaatagatgtataattaattatttgaataaatttttgaatatacgatgtatttgaaaaagtatttgaataattattaaaaaattattaaataattttaaaacgcataaggtgacgaaattacgactattatgcgactaccatgtaagatgttgggtttcgaataacaaagcccaaacccaactcaggtggtgattaatatacgactacacagcgactatcttgttagctgttgggcttcgaaatcacaaagcccaaacccaacttaagtggtgacaattatacgactacacagcgacaacggtgtaagttattgggcttttaatcgtcgaagcccaaacccaattgatttagtgactattatgcgactgatatacgactactccagtgttgaaaaccctaattcgattcatttctccttcgttccaaacacttagccacttcttcgattcttctcttcttctctcttcttcttcttcctcgatcttcttcgatcttcttcttcttcttcttcttcttcgtaaccctaaatcgattctcttcttcttcttcttcttcttcttcttcttcttcttcttcttcttcttcttaaccctaaatcgatccgtctttcaccaacaaaccctaatacatcgatccatctcgattctctcttcttcgccaaactctcccttgcctcttcgatccatctcgattctctcatctccaagaggatgcctaacgccggtcgtggaggatctcgaaagagtaagaccacaccaaacgtgactcaaagagccggaggttcaacgcctgctggaagaccctcttcgctaccgcagcagtacgatttcaccccggcggcggcgacggttcaagtttctgcatcgattccgcctcaaggagccggcgccggcgcctcatcctctgccccccactaccgtaactacccaccaccgcagcaactcttccaacactccaccaatcaaccacagcgtgtagatccgttgccaccacaagagactgctcagcaagaccctcctctttcgccggatccagaaactgcatctcacagtcatccctcgtctcaaggcaacaacttccaagagggcattcctgcagtgttgccggagctccaagaagactccgtggttgctctgaatgacattctctctgtgcctggcagagaagcgtggtgttgtgtgttgtctcccattccccggccaaaaaccgaatggtaagttcactttaaattccctgttttcttgttctgtatgctctgttgtgaatcaaaccgaaaatgtgaaccttgttggctgttgtgttgtgaaacattgttggctcttgtgttgctagtgttttcgggttaggcatttagtcaagtttagttctagactcattagtttatgtagtaatgcctgttttattgttgtttgatgctctgttgttaatcggtcaaacatagatgagtgttgtgttgtgattacattagttcttggtcattagtttagttcagttctaaactcgtgttatgttgttctatattacacaaatgatgatgctttgattgtgaatgatgctatattgttgagatagtactattgtggaacatagtttatagtcgtgtgtgacttgtatttcttttgggaacataactttgttcacttttgtaacatgtttacttctttctttgttggctttggaatcaaaccgaaaatgtgaaccttgttggctgttgtgttgtgaaacattgttggctcttctgttgctagtgttttcgggttaggcatttagtcaagtttagttctagactcattagtttatgtagtaatgcctgttttattgttgtttgatgctctgttgttaatcggtcaaacatagttgagtgttgtgttgtgattacattagttcttggtcattagtttagttcagttctaaactcgtgttatgttgttctatattacacaaatgatgatgctttgattgtgaatgatgctatattgttgagacagtactattgtggaacatggtttatagtcgtgtgtgacttgtatttcttttgggaaaataactttgttcacttttgtaacatgtttacttctttctttgttgcatgtgtttggaggtttactcgagacagaggatctcgcttggttaggaagatcactagaattttcttacaaaaattcgatgctcccttctataactggtcatgtgtgccagttgataaaagagaaagattatttttagagtttgcggtaagcttcctctatatctgctcttgttcaagttaagtttatgtagtttcactaacttcttccttttttttgtagaaaactcaccactgggatcccttaataacagggacagtccaatattacttcaatgagatcgtcaagaggcgcttgaaggacatggttagcaccgcaaggacaactcgagagcagcctccatggattggagaaacgctgtggggaacaatgtgtgcttactgggacacagaagcagcacaaaaaaggagtcggacctattccaaagctcgtctctctgaccgtaacggtatcggtcctcacgtccactactctgggccaaaatcttttcaagaaatccaagatgaattggtaagtgtttctgcagattctcataagttagagttttctgttttctgttttcaatccaatatagtctgttttcttgtgagtatgttgagttcttatgtctagtgactactgttgatattgatttgtgtttgcaggaagagaagttgggaagaccggtccatcttggtgaggtgttcattgaaacacacactaagtcggatggctcatttgttgatcagaagtcggagaagattgctcaagcttatcagcagaatgtgagagataggctgtcagcactagaggcgtctgcttctgctgtctctgatggctcttcacgacctccggagctcacactagatgattatacagccatctttctcgaggtaagatgttttagtataattatgagtcttagagtccaattaatattctgtcactaatgagcttcttctctatttcttgcagtccacagaaaaggattcaagaggcaatccttatggactaggatgtctaaaagacactctaggcagcgccaaccgcaatcactccggttcctcatcatcctttcaagccctagaagaacggctgcaggaagctcaaaggaaaatagaagagcaggctgcatataatgagaagagagatgctgagattgctgcccgagaagctgagtcatcccgagtcacagctgagcaaaaggacaagctcgagcaattgtctttagtcgagaagtatctacgccaaaccgatccgcagttcttggacttcatggcaagtcactctaccacaaccacagaacgtataccaagtcctccacctaatgatccttagattatctttgcccaaactctacttgaacatatgtttatttgaataagttgtttatgtaataaacaagatatttgaacatatgtatttgtacttgattttctatatatacaagtcttttcatctttttagcatttcaaataaaaaaggagaaaacaagaaacaacaaaacaacaatcgataaccaagaaacaagaaacccaacaatcgatgaccaaattcttattcggacaaaacaagtagtcgctcagtagtcgtatttaggtagcaaattagacgtaaaatagtcgtttaatagtcacactaattaccgattattatccgactaagacacctagtcacaatataatcgtccacgagacgtataatagtcgtaaaacattatacgactattatatgactacgagaattatttccttacattgatagaattagtcgtccaatagtcgtccaatcgtcggaaacaattatacgactattatacgaccacgtgtttcacacgcttcgtacaggacaattaatcgtgctatggtcgttaaatagtcgccaaaacgatacgactatacaacgaccattgtttactgattgtgttattgtcgtaatatagtcgtcgatcaacgactaattcacgactatctcattcagcgactatgtaataatgactaacgtcgttagtcgctgattagtcgtattatcattttttacgactactatgcgactgccctgtaagtcgtttatcacctgttttcttgtagtgtattaccgattgattttgagttaaaagtccacaaaatttgataacgtataagagtcgataatacttcttaacatattttatatttcgaattgtttttattcaaatcatctatttttaatagctaaaagttaaatatttatggattcaaaactgttgaaaaataaaaacaaaataattaaaatttaaattttgaaatgttactatttgaactgcaccacactaattcgattaccattcaaactacatcattatttttaagtcggtggttagaactacaacattatttttactttttttgtttttttttttccttttttggtcaaactttcttttactttctgtatggtaatctagtttccaacctctttctggttttgtgacaaaggtgtgaaataacaacttggccaaaacgtgtttcttgtgataggaaccaagtatgttgggttgttgccctacgcataataagtagatatattattttgtttttcttttctcttttttttttttgtcacattgtagcttatattttaatatcaacatatacgtacattatatatccaatgaaattaatagtatttttcttttagaataaagctgtatagtacccactatctaagcatttatcatatcacgtttgccactggtcttatctcttactattttatcagcccgtttccatttttttatcgaacaagccaactaagtatcacgcagcttgcttagtaatcggtcttacgtactcaatgatatatgcataattttctttattataaaaattagaaactagttggcacatgttaagggtcgacatgtccattacaagacatgataaatcccgttctgaatctattagaacatatatgattagagataatcttcacaaaaataaaacacgtttagagaatcatatacgttattctatatattattcatgacacccattatcaccattggcacgcatcacctgcattgaatattgtaattggcgtgttatgttttatatatctttgatgtaatatgtatgattctatattcatatatcaaaatgggttgacaaaaacaaatgtatattcaaagtggcgtgaatcgtgcgatttaattttataattacaatcacgtgcacctaatccacccggtccatcaaaatattgtacataatttaatcctcctatacgttaaagttggtcttcttgagtagccattttatgcgaaaatgaccccaaaacgagtttataaatatttatttctttgtcatatatgaaatgtaaacattaatagaacgtaaaataatatgaaatgtacactactgcgtgtcaacttatcttcattgattattttaagacaatatctaaaaacattgatatagagtattatgacaatttcttggcgtttgcgtctttgtttatgcataattgcatacgtacgtcgaaacaattcgtttttaattttagaaaagatttggcatattctaaaaatgataaaactactaaaacacaatctggcccatttgcgtggataagaatctgtcgcgaaaaaaacaatgacttttcgagtgaaggtatgtcaattccttatctcttgccgtatcgaataaacaaaatattaccattagaaaaacttcacaaagagtgaatcttcaccgtcatatcagcaaattgcatcgaaatattctcacacaaaaagatttctatatattattcgtttttgaattgtcaacaaatggaaatggcatgtaagagtagttcatggattaatgggccgaggcccaaagctctgaaacgaggagcaagacgataactatttcgacaaccattttttgggatatggagaagtgagaagatgtataacagtataaggtattccgtatataaggaaactaaaagaatctcagaggattttactaaggaaattaaaaattcatagatctcttatatattaccattcagatattgatatagaaataacaaaacatttttaaactaaatcgatggattcatcttccagtcacatgatatgcctacccttttaatagattgtaagattagagtatatattttatgcttatttgaaagtgtttactaaatcttatatatgtttttaagtgcagatatgtctcttgaaaatagaatctcctatgtcgggatggaataaatttttggaaatggtctcatattctatcacttttctcgtttaatttacaatttgattttattattattattcacttttttctaaattcataatgattttgttgttgtatctatacatataatataagtatataacatatatgactttcatgatttaatttatgtgtatcatctgcatttacaaaatcctattatttaaaagtttttggtatgtatcatctgcggaaatgttaccatgatcatcaaactaatattttgtatagctaataagatactatacttttgtgcagtctagagatgaatgtactgtgaacactttttagttccaatctcttcgctgtatcgaaccaattagccagtttgttgatattacacgcttttttatttcctagagagatgtgagtttcatgattgacaagcaaatcaaaacggtatatgtatctggaaaaattgatccacaaaaaatacttgaaaagatttcaaaagaaggcgtatatgttattatagtatggagcaataacggaaaaaatgaacagccgtcgaatcaaaaagtgtatttgatggaacaatgttatgcgtcgggatacatgaatactcctaatggtttctcaaatcctccacgtaattatagtccaagatattcatttgtgtattacaaaactaaaataaaataaagatatttatttgtatttttgggagttcatacttgaattaatttatagatgacatatacaactttcccatttgaaaaagatgtttccaaaaatcataaaacaagaaagtatctaagttagagacactaaatataattaaaaccaacgattggtaaccaacgatgacttcttacaaatcattacatattcgaagaaaaaacttgataacaacacaagtgtaccaaagatataatcaaataatcgaattgacggattgatgaactatgagattataagagacaaatttgtgtacttagtttttaaattcagccgtaaacacttacctcggaagacggatgagacgacgttttctcatccctaatatctcacattccaaagagcaaaaaatcattctatgagttgatcgattgctatgattgtagtaatatgtagcattccttctgtagccttcgtagaagatcaaaccggtacaacggttgtgacacatataacagagttgtcgagtgttactattgtttcgaaaaacttgcacctttccataataatcacgaaatatggaaccaggtttcataaagacagaagatccaaatatgcaatgaaggtggatggtgatgcaacatttgttacatgtgtagaaccattcttttggatccaattgtttttcacacacctcgcaccaatacgtgttatccgcgctttccccacaagaaagggtgagaggatgcttgtcaaatttgtagtgtatttcatctggaatgatagcacatgagtaacacatagtaaactcgcataacgtacactgtagatgagcccccaaacatcttttcttgcaaactttgcagaggatctcgtctttactgttgtaggatgtggagataaaaatgggatgttcgtgacttctatggatgaaatactctagcactgagatgcatcgaacatctagaacaaaatcttggcaacctttattagagcatatgtaactgaaaccagtggattctcgggaacaagctgaacaacaaaactttccgggagatggagataggataagagtgtgattgtgcaatgcatgatccagttttcgagaaaggccagcacatacctcgtggagagagtaattgcatttcttgcaatggtaaaattggtgagaaacaattggatatatgcacgctcgacattgcttttctgtgtctcgagcaccatcatgattcttgagcttcaaacggtgtttgtgacaaaaatgctttatgaaaccatcacctaggttcctaaaaggtgaaatatcttcagtttcatcagactcgatttcccactcgagttccttcccatcccaaacattttcatgtgttgcacatttagaatggactacataaaaacaatcttggagatggcaagaatattgcccatacttgatatcaacctctttatagcagatttggcatgacgaagtcaaagatgaacaataaggagtatgagagagccggtgcgggtgacgcgtgatttttatgactcggggtaagtctatgcaattctgatgaaccatgtaattacattggaaacaagcataacttggttccaacccgtcaaccaacccacaagcatcacatggaactaataatggccggggtaagaagacgagagagtggtgatggcttttcgggtttgtaatagtaagaagtggaagagttgccgcacaagagagatccaagcaaaaactacagatcaaacaacgataaaaccaatcacctttgaaatcttttgcacaccaagtgcatttgttgaatatgatatcagacttatacgggacgatatccacgaattcatacttctctggacctgatgtatcctcaattttaccaggacaagcatcagggatgatgttggatataactctggtttcggggtttcgatagaagagagtaagaggatgttggaggtgataaggatgtgttatccttcttggacgttgatggcaaccattgtggaacgtcacctcgcaggtggtgcagtagtagtagagacaatccggcgtcgtagcagctgctttcccgccacatgtaaagcaaccgatacgaaagttgaatctgtatcgaacggacaagttatgagaagggtgagctggatgagacataagacatcttggtccatcttcaaaacccatttgcttaactgctttatgttgcgaacttgcgatctttctaaatctacaaatatttgtggtcttcctttcattattcatctattatatgcttttattattattttatctcgtgaattgtaagaaattttagaaaacaacaaagtttaataaaataacaagctagctccaaatatccatgtaaaacatttgaccaaatttgttttggtcggcgaccaacggtcgtctacatatgaccaactttatttatttagttaataagcagctccatatgcacgcatgctcgttttaggttttctatgtttttggaatttgaattgtctcagttgatttatcatttgaattataattattacttaaataaaaattagtagcaatcaaactgatgtttagatgccaattttcaacatgtatacaataaaaaagatgtctttgaatgttttattgaattaagattttaggatataagtagatgtaataatataaagattcaaataagagaatctacaatagatgaccatagaagatttgataattaactgacaagattatacactgtttgagtagtttatatatcataataatgacatataaacccctatatgcctatcaaactttaagacacatatatgtaaactaacaggtgtgtgtcaggacgagagatatcatatctcttccagagatttgatttacaaaatttttttgggaatagttgtcatattaatcaagagaacaatgctaatccgaagagttgcgttgttttgtttctcattcaactgctttttctatcagtactagtcttatttcgtctctttctctctgtttttcttttttttttccgatgttcaaattgattctccaattcaagtgtggggttttccgatcaattcgtccaagtaagtatctaaatcaaatgcaatttttgtttattgtttctgaattcagttctactttggtgttcctaatttttattttttctgggattgacttttgagatgacgatgaaatcgattaaagagagagaagttgaacaacttgcaactacttatgtgactgtccaagagctattatacgccctacaatttgttgtttttcaagtcacacccgctattcaagaaggtccttatccaaggagacagtcgattctgagtcggaagaagaggttgttgatctaaatcctcactaggtggttccgtttaagcttagcaacgccaaagatctagacaataattgcaaggtgataaacgttttattagctgttaaagtatgtcttacctgataatcatatacctcttttaggcttatctgctaattgtaatttctcctctctaattgtatagttaccgcgttgatcctatcttccgtcccgaagccgtccttgatccagcccaagatgttttgtggtcagatgacaaagtagatccacgggtatatattatggtaaagttggcggccgaaggattgaagttcaataatgatatgttttctggtggttgcatcccatctgaagtggttatagcccccaaaaacaaaaaatctctacaattttgaaaggtgttcgtggcaggaaatctgctaagcaaggaaggatctccaagaatccaactgggaatagaaggatccatcaatcattctctaatgaggaggaatctgtttaactttgttattgactaataatcctattatcgcctaaagctgtttatcgttacaacttgttgttgctagttttgctacattcttattctaacccaatctataacaaatagtttatcatgctatgaatgataactcaataacatgtgttcttattgctaatataaaacggccattcaaagctcgatttatgttatccgataaataaataattaaactcagttacatcacatacttcagttattaatacattagttattttgttatcatttattttgttaccaaggaatttttctaagttaacttactaagatcttgttattcactaatacacatcttaccgcctactactattttcataacaactagttgttgctcggttttttatattcttgtgctaacctaagctgtaacaaagttcttatcacactattagttataactcaaaaacatggttcttattgctactccaaagttattatcacattattaatgataactcaaaagcatgtttcttattgcaactctatcggataactaaaatattatatcagatatcattcttacaattaaactcacttacatcacatacattagtttttaatacataagttattaaccatttgttttagtactaatattttgttatgacctttttattgataaacaaacttcttaacgactaaagctgttatattttgtaacttgttgtttattgtgtttccaataatcttgttctatcccaatctctaacaaatatattatcacactattactcagaacccaataacatgtttcttattgataatataaaacggtcattcaaagctcgattttgttatcagataattagacattaacaggatttcattatcataattaaacatatttttcttctatgtttttcgtcgcattaaattttccgcaatatttttatggttgttctcttttgttttgcgtgggcaacgatcaagtagatgcggtaataaatacatgaactcatatgacatatatttccataaatcgagaaatatctctataatcattctcttaacaccgcctatatatttcgctatctttacccagaaatttttagagcatttaatgctctgattttatgtcgataatcttgttttttttccaacaaagattgtgtcagggataagggtgttttcgacaattttcaatgtgtgagaagagagaggtttagttatcatatttccattggcattcttcaatatcttatcttctatggtttaattttttgttcacctttcaaataatatgaaacaaaacttttttcaacatcgccaattttgaaactgttggaataaaatatgttattgattatttataaattaagattttagaacatacgtaaatgtaaatgaaattttggagtggaataagaaaggtaaatccactcaatcaagtgcacttacaaactggtgcttcgatatttctaagaagaagatgacttctatcactgggttccacaaatttcgataatggataaggatcagagaataaccaaatttcttttgtcgagtggtaaagtgtaacgccccgaccacttttatcattgggttccacaaatttttcggattcatatatatatttctatttgatggttggtatactatttttgaaagtttttttttttttttttttttttgtcaaaagtactttcattcaactcaggcaagaaaaaatacaaagagtagacaatcatcaacctcatggttggatacaacaaggagagttctcaaaatagattgaacaataacatagataggataatacgacgataagtccatacgttggagacaagaacaagatagtaccttgccataaacaaacgaatggtgagtcgaaaataattccacaaggattctgggaaattgttgaatggtcacattccaaaagaggcatagtgacgttgataaagtgtcgatgaccttggatagccctaactcaatgcacgcaccatcaaaggagcacattaggaaacacacatggttttgcagcaaagagggtggaggtcttgcaaaaattctctcaaatgaagaggaaggttgcaacaagggtttcttaaatggtaagtaggtttctgaaaaaagctctaggacactacaagtttcatcgaccaggatcaatagatggggtttgtctaatctaactattggtgataaaacagagtgagggaggcgtcaataaccgatctcagcaaagttgaacacaatagagtagggtttgacaaaataagaaatagaacagacctgggccacgttaatttaagggtccaaaacttacagcacttcatggaatgagggggaaacaataaagagccagcagataatgggcctagcacaaaggaatagcccaacttgaggattagggttttgtcagaagcttgttgccgccgcttcaacggaatgatcggtagctcactgacccgatttaacatcaccggaggcgaatgatcggagatggaggccatcaccggataagtggaaagagtgaatcttggctgagcagttgaagggacagatctataaaatccggttgcatgggagcaaaggctcaccatttttttctgatgaagcgctaacagaggacaagtggcttgccacccaaaagatagatccgccgtgcgccgtctacgtctccaccggacatggcgcatctgacggtccaagagtgagttctcctgccatcaacgaggtccggtgtgagtgctcttttgggatgagcagatctgatctagaaacaaaaggcttagcgatgataataggatttttcaagagagcttcatcgctgtaaatcggtggtgtcgtgaacaggtggtgaagtgggagggcaaatgccggaccccattgccttccaccgtcgcttgtcttgttgtctccagaatgaaatgataagcggggtaaggtttgaaaaggttgaaatagggtttgcagaggggagaaggaagctggtagcaaaggagacataatagaaataaaatggaacccaagcaagaaaaatagaaaagctaaatcccgacgccggcgttttgcgtcttcgccggcgtcgaaaaccatgatcggaaaaagtctctcgataaatgtgtctgagagctttttaatgtatatgatactatttttggaaggtttatagtcttgtttaatgaccttataaataaccacatgatctttctccatactttgtcctcattcgtatggttttaacaatcccttttcggaagatcatccatcctaaaattactttagccaagcacacttaactgtggagttctctcagcatgtttgaccgaaaagataaatgctatttggtagtataggtgtccaatttaattcttttgaacctaaccgcatgcaccaccatatttttgaaactaaggtgttataattcaccctcactaacaaatcataacgtcttcgttgcaaaccaagaccgtcaccccaatgatgtgagctttcttgacttcatacacgtatgaattcggctccgatataacttgtaacgccctaaccgcccataccagtgggccctacatcttctctcggacccatggacccacccctgtccgatggtacattgttacattcgaaatattttaaagagttgtttaccgaccctacaaatcaccagatgatctttcttaatgctttctcttcattcgcatagtttcgacaatcattttttggaaggtcactattttaaagttactccagcccaaatatgcttaacagtggagttctctcagcatatttaaccaaagataaatatactttggtgacatagatgaccaaatattttcttttacaattaccgcatccaccaccatattttaaaaaacggaatattataaaagcaaagaacagtctcatccacctgagctcgagtaacattaattgttaggattcgaattttaacgttgttcttcaggtcttaaaaataatatttaggcctagattattttttagacttgaattataacaaaaacagaggagaaattgtttgaatattttaaactaaaaccaagacgaaaaaaacttggataataagttgggttcgaacaatcaagatagtcaaaactactattcaacctctaagctaaattaatataaaaaatgagtattttagataattttgaaatttatataattgtaggaaaaattgagatattatttaaaaagaagtagtgaaggatttttttttaataatttgtgtatcttatgccatattgataaattaaaaaaattcaaatggataattatataaatttgaaagggatacaatgcaaaagttttggaagaacaattcttaaattcactccaagggatgttatataggttaacaaaaatattttacagcgtttatgtctcgtttatttgctctgttaaaacaaaacgacatcgtctacttcaacttccttcttccgttttctcttctttcgatttgatttgagctgaggaacatcgttcgtctcctcgccagatgggatttgaatcgattcggcttctataggatttgagataatgaaatcaatttgaggatttagggtttaaatttgtttcaacagacaaaacgccgtcttttgtctagcaataaacgacatcgttttgttctaatagagcagataaacggaacattaacatcgtaaaaagttttgttaatctatttaacgacatgactcaaatggcaaatcaacaaaaactttgtcatttatttagaaagtcaacaaaaatattacgatttatttgtcttatgtgaagttcaagattaaatcgtcccaaatttaaagttggtgatttttttgacattttcccctaataaaacctccctattttttttttccttataggtccctcaagaacaataacaactaacaaaacatcattgatctaggcatctagctcgatggaatcatcatcttccaaccacatgatatgcctacgctcataacaaattgtaagattagtgtttaagcgcatgcatgtctcttgaagatagaatctcctacatgacgggatagaagaaatccttggaaaatttactcaagactattaatggtatcatttttctcgtttaattaacttaattttatcattcatcattttttactttattttcacttcttttcatgaattcataattctttttgtatctatacatgtatgattttctgcacgtactaaatcctgttatttgaaacatttttggtgtatcatctagagatgttgtggtgggtaaaaaagcccagcccgacctaaacccaaaataaactcgcccacaaaaaacccaattttagaaaacccagatgggtttttgatttagtgggtaaagtccgaaaaaaactgattgttccgagactacctgtgggtacccaacttggtttttatcattttcttagagtttatgtttaactgttaatatactattatatgtatgttgtgtctatattttgcttataaatatattttaaattaaatttattttctgtattacatatatatttgataggaaaaaggttgaattgcgtttttggcaggaaaatgttaaattgcgttttttgggggaaaaatgttaaattgcgtttttggcggaaaaatgttaaatatcatttttggcgggaaaatgttaaattgcgtttttgaccggaaaatgtgaaatctatttggcgggaaaatgttgaatgtcgattttggtgggaaaatgttaaattgcatttttggctggaaaatgtgaaatcatttttggcggaaaatgttgaatcccgtttttggcgggaaaatgttgaattgcgttttggcggaaaaatgttgaaggtcgtttttggcgcgaaaatgttgaattgtgttttggcgggaaaatgttgattgtcgtttttggcgggaaaatgttgaattgcgttttggcgggaaaatgttgattatcgtttttggcgggaaaatgttgaatgtcttttttggcgggaaaatgttgaatgtcttttttggcggtaaactgttaaatcgcggtttaggggaaaaaatgtgaaatcttttttgacaagaaaatgttgattcatttgaaaagggacttaaaaaaactcgtgagtacccataacccaatgaggtaaacccatataggtaaacccatatgggttttttttatttgggtacccagcccattttaaacctgtgttttttttccagaaaaaatagatctatggactcaaaattttatgtgggttttgggtacccagtgggttttaacccatcattaacatctctagtatcatctgtggaatataaccatgatcatcgaactaaatttttcgtatagctaattatatatatttgtgtagtctagtggtgaatgtactgtgaacatgtttcagttacagtcttttcgttctatcgaaccaatttttattgtaggcagtttgttagtattgtactgtttaatataattcaagaatatattttcagaattcaactctttttttcttcttctacagatgtaaatttcataattgacaaacaaagcaaaacggtatatatatcttgaaaaaccgatccacaaataataatctactactaaatgagcgtccatccactccataatgtgtgtgataatgcgtttatcaactgtgtttgtggatgttatataggttagtagctttaaaataatatattcaccaatctcgtattttagattaccatacctagatattttctaactatcaaacttaaaattaactagacatgcacggccctaatattctctcccaggcacggaattcaatgagccgcttcccttgaagatatgagcttcttcctccgacgtagctcctccggtagcttccttgtctatcggtgctagctgctaaggcgagatctctcaggcggatctctttttccggtgagacacctgagctgactttctttcatatgttttcaagccactctcgtcgttttccgatgtcttcggttgctttccttgatctgaggcctcctcctgctccaccaccggagtcttcttctccgccgactccaccagaaccacctgacccccctgaccctcagatctgcctctcctttaatgtatctcttgctcagtcgcccttgacgacgagtgtccctctccttcttgcaaagtcactcaatagctttggagtgctgcttctcgacgagtccctctttacaaactggtttggagagatgttcccccatgtttgcttgtcctcctcgtcctctacttcttgtaacatgggaaggaattttatgttcgttgaatgtgtggttcttgttttgtagaactcggggttaactcaatcgatttcgatgggtttagatattcttgtgtctacatttttgctctcttctagcatccttatcgccttgttgcgatcgcttactaaagtatgcagattctgtctcgatttagctcggtttaaatttgtctcatggcagtttagacatatttatttatttcagtttatctggccagctgcccaaaacttattggttttgaattccgacctatgtagagagttttattggttcaatttgatctcgtagaagtttgcttgaatattcaaaatgatactaagttaatcactattaatttactaaatcatacgagtaaaaatttggatttacgttaagctttgaaaacatattgagaggaatcatgaaatcatcttatgataataatgctatgttaggtgaaagctctctagtacttgaaaagattataaaagcagacgtagatgttattatagtatggagcaataacgggcagaataaacagcgagagaatcgaaaaagtatttgatggaacaatgttatgggtcgagatacatgaatgctcctaatggtttctctaataatgcacctaattattggacgaatcaacctcagccataaaatcaattgctcctccaccatcagtggtggagccataaatatatgttacggggtcatatatttgaccgtcacgaaacaaaatgttcccataatattttatgcttattttttcctaaaacacgaagtactattagaattcttttcaaaacgaagaataatgtcattatttctataaactccataaattggagccctatttgaatataaatttatatgtttaaattaatctgatatatgggtgagaagcaaaattgtatgaaatatatttatcatattttttcaagatatttgtttatcgaaattaaatgtataaccaatgtctaaagataaatcaaaagaagtgtaaaaattcatttgtatttaaagagaaagagaagaaaaaaaatgtagaaaaagaaacatgaaaatatatgaaaaaatgagtaagtgttaaatattacgtattaaaaacttaaaacaataaacaattactcaaaacaaagttgaagaactaaacatgggggtcctattagatatttcaagcaaactaattcaattactactaacataagcttgtaaaaaaaaattattaaatttatggggtcagttgaccccttcctatccatgtacctccaccactgtccaccgccatatacacggccactagcccaaccaccgtacaagtttcagcagaaggagccagtggcgaagatttttccacctacgccaactcctcctaagaactttacgatgggagatttgcaactaggatgcatgagcatgataatgtaaactaacttgtgttgcacggtgttttgtgtttttttttttcattcttttatgtcatatagtacttatagatttggattgacaagcacatctatctatttaggaggcactcttccaactccatttagctaaacccgaataatggccaaaccggaacaatcttaatctaaaagatcttttgaagttgagatatctcggattctgaatcgaactaaaatttagatttgtactttgatcctaattgtctaattgacattcctagaaaaacacaatttattttttattctttattatttcatctgtttactaataagtgtagttcaatcaaaaatacgttgttttattttatttgttgtttacaatttttaatgtaaaatttattattatttttaactcttgaaattctattgtttgatttttattgctgaactaatttaaagaaataattatatacatttttcaataaaatgtcctttcatttttctatgtcttttccgttctctcttttcaagcagctctcaagtctatgtagttttttggtcggagattaacatttagtgcctcctattagctttgggcgttcgggtattcgggtcgggttcggatcgggtatttcaggttcgggtatttcaggtttagaaatttaaaacccgttcgggtaatttaagattttgggtcgtgttcgggttcgggttcgggttcgaatttatttatatattgaaatatcaaaatttcgtatgtaaatctattaaattacttgaaattttcaaaaatttccaaaataacacgagtagttttgcttaaatatatttaaaaatatacaaaaataactaaaatatccaaaaaaatcctaatattttctatatataaatataaatataactaatatatacttatatttgagatatgtttgggtacctattcggattcaggttcgggttttttggattttgaagtttagactttgcggcgatgaaattgtgatcaaataacaaagatttaggtttatcaaggatctttttataatttcaaagaaaataatccaaactagtttctgagatttctcctaaagtaacgtaagacttatcagaagaaagtcagaaactagtttagtttgttacacagtcttgtagtatcagaaaccttcttaagtttggtctgaaaatcagatcgagatgcgttcgttaaagttactcctttgttggatctcgtttcttacgttatcaatctcaatctctgcatcgtcagatgatcaattcaccctcgacggaacagttttagaactcaccgattcgaatttcgactcggcgatttcaactttcgattgcatctttgttgatttctatgctccttggtgtggtcactgcaagcgtctcaatcccgaggtcttttcaattttatgctccctatagtagtacgatctagatttgtatgcttgcaattacttagtcgaatttaggttatggcttcgagtttctaaccctaattgtttagctttagtttagttctgtattaactatgttctgtttcaatggaaagatgtggcttttgttattgatgctgatttcttcttgttggtttggttgcagttagacgcagctgctccaattcttgctaaattgaagcagcctattgtgattgcaaagctgaatgctgataagtattctcgtctcgctcggaagattgagattgagtatgttttatagttctgctatcaccttagctaattgaatgattcaagagtccgaaaagtttcgatttttgatgttttagtgttattctgtctttcttttgtgcagtgcatttccgactctcatgctttataaccatggagttccaatggagtactatggaccaaggaaagcagatttgcttgtgcgttacttgaagaagtttgttgctccagatgttgcggttcttgagtcagactcaactgtcaaggagtttgttgaagatgctgggacattcttccctgtgtttatcgggtttggtttgaacgaatcgataatatcaggattaggtcggaagtataagaagaaggcatggtttgctgtttcaaaggaagtttcagaggatactatggtttcttatgattttgataaggctcctgcattagttgccaatcatccaacttacaatgagcatagcgtgttttacgggccattcgaaggtcagtgttaactttcagtgagatctttctaaagtagattgagtgacatgcttcaccatgtggtttttgtttgcagatggattcttggaggaatttgtgaaacagagttttcttcctttgattctacctattaaccatgacacattgaagttgttgaaggacgatgagagaaagattgtcttgacgatcgtggaagatgaaacacacgaaagcttggagaaactatacaaagcattgagagcagctgctcatgcgaaccgcgacctcgtttttggctacgtcggtgtgaagcagtttgaagagtttgttgactcgtttcatgtagacaagaagacaaatctgcctaagattgttgtgtgggatggagatgaagagtatgatcaggtaaacaaaatggttttatcagtatccgaaattgcatcaaattctttgtattaacatacaatattcaggtgacgggtatagagaccataacccaagaggaagatcatttgacccaagtgtctcggtttctagagggctatagagaaggaagaacagagaagaagaaaatcaacggaccatcgttcatgggatttatcaactcaatgattgggattaggtcagtgtacatccttgtgttcttggttgcggtcattatgatgctacggagcctcggtcaagttgaggagcctactggagtccggaccgccacagcagtccgtgaaagagttgatcaggccactactgtccctgaagatgaaagcagtgagcataagcctagtgacaaaaaagaggactagttttgttacacttgaatgtggtatgttttttttcttcttttatacttgaagctaacttatatagttcatgcttatttatcttctttatggttagtctttttgggttttaaacggatggttgttccattttatttatgaatcattttggctctctagttgcatatctttgggatgtaatgaggtacttacagatatactctgacaactattggtagatcataaaacgattgtagtgaagtaatagagttcggaccaggagaaatcaaaggtgttgtttctgatgctggtggtacatcatttcctgttcttggattttgtttacaaaccggacaaaaggatctacaacgtccgagccaagaatcgatacacaccgcatgatattctgccccgagtaaaaaaaaaagttaacaaaactagtttaaagaagcttatgaaagataattaaccaactccaagtcgaatagaacaaaatgggacttactgtgtttgcaaggtaggatcctgagtatttcaccaacgcgataatcatcaatacatatagcacaagtaacagaagtcgaaccttcttcaagaacaccggtatatacttcagtcggcatgctttgcaacaagtcttttggcatacgagaatgtccttggccaccatgatgtaaatccctcacatgctgtctaattcgatgcctacggacagagaaataagaggctaggacggcagaaatgacgagtaacgatacgaaagtgatagccatgattgaccaagatgaaatcccgaatcccgggatgagcaagagctccatctcagctcgactggtatactctttaagtacctcccctgatgttcttgtaacaagcacaccatgtatatagacaccagatgaatttcctgccactatgattttgttttttttcaagattataacaaccatcgattaaagatgtttataacactcacataaacattgagaacttatgaacttactacgtactaagagctcctcatatctatcgttatagacgatcgcagctttgtatccagcttcctgcgcatttcttattttttcctcaaaactacagccaccacggacgatcaatacatacgagggcctaaatttcgaacctttttccgccatgtttgttaagtacgagcacgcatcaagaggctctgcagcgtacaacaatccgtattctcccgatcttctaacaactggtgctgaaaacatgtcaatacaactttttttatataagaaatgttgtctagtgtacacacaattcttaagtaaaaaatatgttactgatcgctccaaaaatagagcgatctggttaaatattcagtagtcagtatataatgataatgcaaatcatattgtttaagtgaagtagtctcacattggaagttggagaaattaccaagtgatatacataaaaggttagcaccaatctactcattgctaattggttgtgagttccaaccaataagccatgtaatagtagtaactctgccgttcagattaaaccttgtaaactaatctaaggcttatatttttctagtgatccaaacaacaaacaaaaaaacgtattaggatgtcctacatcgcttgaaattaagatctttggacattatataaaggatatagtaatcattaactcttaaactagcttttgggataagttagtccatattcctaataaaacgatatataagtaaactaaatcaacgaaacaacaagtaaataaaactgagaaaacttactgaaatttgcttcgacatcatcaaatgagagaaatgtgtttttcccgatcaacgttactttcgaagaagccagctgagaaattaccaacaaagagaggattgtaatccaactaccgttcatgatgatttccctcagtttcagtcgaatggaaacacctagtacgataaaataccgaccaaaacaacatgccaaaccaaaccctaagaaaaacagaattggtcgagaaaagaagctactaaagtttaagagatttcatggaagataaaacacttcgacattgattacaaaaggcaagacaatggacataattaagtgtctcctggaaatgttcttgcagaagaaatcattttttatttagttttcgtttcacaaacatgtgtttttaatcaaaatctgaacatatttatatatatatttactaaggtcaacgccatgcataccgcgagttgtatatatattagtaaaactttatcaaagtagatctttaatcagagatctcaaatagataagcacaaaattttctatatattcttttctttttcaaaagtatacataaagaggattgcaatagacataacaacatgccttacaattatttctggtaatttaaattgcaaagttgattgtgtttggcatgtagtttaagactatgtccacacgatttcatgtatatgtgggatttgtctcgccggtttaagttaccgaataattttgatttataaaaaaaagggactaagcaagttttgttacacttgaaagataacttatatagtgtactagattctgacccgcacgttcgtgcgatattttatagtgtaagaaatatgttgtataaaatttatattcaatatagtttttttttttgttttagtcatatatattgtagtatatataaagaaaattgtcgattgttaattatgtttgtttatgacataatagctaatattgtgaattataagtcaaattctggagttttaaactgaaaagtagattagaaatatcttaaatggaaaattatcttaggttataatgatgtcaagtattgttatataaaaaattatggctagagaattgcaatagaagtttgtgttatcgatggtgaaacacaagttagttttgttaatgttgatttttcaaaattttaaaggtatgtatgaactaagaatttatgttaccatgttaaaatatttaaatactgatgcatttttttgtatatgtgttttgggctatatttaattggctgcttgtaaatcagtattttaccaaagtaacttaaacaaaataatggcaaagagaaaactttaatatcagtaaacatattatctatagttggcccatgtagaacaagtatggattcgattgcaaagttgagctaagtcctgttttctatcattgtatgttgaatttttttaatgcatatgtatagtaagaatactttgatttaaatgattcttgttatgtcaattaacaaattcgcagaatatgcttcattttgaaggattgcaatctttaaattttaattaaaatagaaaatatttgaattaatgcttgaattattttctagatatttacaaatctaaaatccaaaatgtatttgttgaatatgctatattttaaatttaaatgatggtagtttagattatatacgattttgaattaagtagtttgatttgttatggaaactttattaaacgatttacaaaaaatattgggtagttattcatttattgatttaattttggatttgtgtttttttttttaatacaagatccgcttgtttatccgaatcactacatttggtattttatttcaatacatttatagaaatgtattggaataaattcatattttttcctttaacattaattttggatttgtgtttttttgttaataatttaacgtttatataatatattaaaggaaaaaaaaataagatcgtgtatctctaaacatattatgatttgatcaaaaacaaaatattggatagaatgtatgtcgcataatgttttggttatgtacttaatttgatatagttggtaaatgacaaaatatcagaatatatttataacagaaatattattacttagattttattgttaaaatattttgtatttttcaattaatgatatttgatttatgttgaatgtttttgtttaatctctaacaaattgagaaatacaaaatatttcgatttatattccaaataaatatattgatgatgaatattcagttatcatttaatatttaatgttatttccttttttatttttgtagacaaatcataccagaaaaattgacaaatgtttttgtttaatctctaacaaatcataccaatgttttggttatgtacttaatttgatatagttggtaaatgacaaaatatcagaatatatttataacagaaatattattacttagattttattgttaaaatattttgtatttttcaattaatgatatttgatttatgttgaatttttttgtttaatctctaacaaattgagaaatacaaaatatttcgatttatattccaaataaatatattgatggtgaatattcagttatcatttaatatttaatgttatttccttttttatttttgtagacaaatcataccaaaaaaattgacaaagcaaatctcagaatatattagattatttaatctcgttatttgtttttttcaaaaaaaattaatgaaggatccgaatcaaagatatttatttaattgtaatatttgttaatttactaaattacctatgcaaaagttcgtttagttagtattaaactacccttacaatgttgtagttaacaaaatgcttcccaattaatagtatggatggttatctatcttctttaatctttatggttagtctttttcgttttcttttaagagtatttttatgttttaccctacctaaacggactactgttccattttatttataaatccttttggctctctaattgcatatctttgggcaaatgcgttcctgacatataatgaggtacttacagatatactctgacaactattggtagatcataaaacgattgtagtgaagtaatagagttcgggctaggagaaatcagaggtgttgtttctgatgctggtggaacatcatttcctgttcttggattttgtttacaaaccggacaaaaggatctacaacgtccgagccaagaatcgatacacaccgcatgatattctgccccgcgttaaaagaaaaaaaaagttaacaaaaccagtttaaagaagcttatgcaagataattaatcaactgtaagatgaattgaacaaaatgggacttactgtgtttgcaaggtaggattcggagtttttcaccaacgcaataatcatcgatacatatagcacaagtaaccgaagttgaactttcttcaagaacaccgctatatacttcagtcggcatgctttgcaacaagtctcttggcatacaagaaagtccttggccaccatgtggtaaatccctcacactctgtctaatttgatgcctacggacaacgaaacaagtggctagaatagcagacatggcgagtaaagatatgaatgtaatacccatgatggaccaagatgaaatcccgaatcccgggatgagccaaagcttcatctcgtcttgatccgcgtaccctttaagcacctcccctgatgctcttgtaacaagcaagccatgtatatccacaccagatgaatttcctgccactatggttttgaattttttcaagattataacaaccattgattaaagatgtttatatactcacatgaacattgagaacttactaggtactaagagctcatcatatccatcgttatagacaatcgcagctttgtatccagctttctgcgcctttctaaccttttcctcaaaactacagccaccaaggacgatcaatacataagaggacctatactttgatcttttttccgccatgttggttatatccgagcatgcctcaagaggctctgcaacgtacaaaattccacattcccccgagtttctaacaattggagctgtagacatctcaatacgatattttttttatagaaaaatgttgtctagtgaacatacaatacgtaagaaaaacaaataacagtttgttgatcgctccaaaattagagcgctcttgtcacttattcagtagtcagtacataattctaatgcaagtctatatattccaaaccaatataataagccatgtaatagtaactccacagtttccaaaatgaaccttgtaaactaatccaaggcttgtatttttccagtgatacataaccaaagattgttacatgaagtaataactgagaaaacttactgaaagttgcctcgacatcatcaaaggatagaattgtgtttttcccgatcaacactactttcgccgaagccagcttacaaattaccaacagagacatgattgtaatccaactatagttcatgatatgctttctctcagttttagtcgaatcgaagctcgtattaccacaacaacatgccaaaccaaaccccaagatatgtcgagagaagaagtttctaaatttctactgcattaaaggaaagcaagacccggacgtaaagtgtatcttgcagaagaatcattaatttatgtagttggcattaataccaattgtgtttcataaacatgtgtgtttaatcaaaatcgaaaacatatacgtacagtagaaactctataaattaataatgatgggaccatgaaattttattaatttataatgatattaatctatactataaattaataaagattaatttatccgataaattgataaatattaatttatccgataaattgataaatattaatttatagaaatatttacgtaaaatacaatactaaattctttttaaaatgtttcttaatttagttttccttatttttattgtttgtaaattaaattatattagattttttaatttattttcttgtaagatattgtgtccgtatatctacgacgttaacgtgacgcttaatccaatttttctttacgcaaatcttagcaatggtttctaatataaaaaatgttacaaaactaaatatgacggatcaaatcaaagagttatgtaaatacaaaagaaatcataccaactgtactttaaaaagagttgcaattgcggtttgaacaaaagtttcatataaaattagccttagaaagtatgcttaagatttatgattattaatttataatattattaggaccatatttttacatagaaatttcaaaaaaattattatcttattatgttatcgattttagttaatttttacattgacccgacttgggtccagcaaaatttattaatttattgtatttattaatttatcgaatatttatttatagagtttctactgtatgttggtattttttacttttacatttacctgttcggtcaactccatgcataccgagcacctttcactttcgaaactaaataaattgttttcactatcaaagtaatctttaatcatagatatatatatcaaataattaagcatgcaccaaattttctataaaacttttttatttacacaaatttaaaattcttttttttttttatcgttagagtattgcaatagacttaacaacatgtgttacacaataaattatggtaatttaaattgcaaacctgattgtttggcatgtagttaaagacttcgtccccacgatttcatgtatgattatcaattttttttgacaaaaaagtctaccctacatttataatagcaaaaatcattatcaaactatcatactaattattatgacttatgaaagattcaccttagaaagcgagagatagagagagaagaaaaacattgtactagtattaagacatgaaaaatactatctacctaaaaaaattaaaacgatagagaaataaagagaaaatcttttatattctgtgggggaaaaacattgtagaagattaacttatcgactaaaacaacatacaaaaccaaagaaaagcaagatcacgacaaaaagtgtttgctagaactttccttacatacgaaattatttatttatctacttaatataataccttgcacattatttttcacactataagttcttatagaagtaatcactaaatataaatcttaaataattatacataatttgttatagtagatttgtactcgcatatttatttttttaatcaaccacatattgatattaaaataaaagttttgattggttatacctaggggtgtcaaaatgggtaacccaacccaactcaactcataatcaaatgagtttagggtcaaatgagttatgagttgatccaactcatttaacaaaatgagttgggtcaacccataactcatttaatttgatgggttgagttgttaaatgggttaacccatttaagtaataatttaattaattattattataaaacaataataaataattatcattattaattgattatcatcaaacttaggatatttacggattctattttttacgggtttacgtttttggcgagaaaatcacggatttacgtttttggcgggaaaatcacgggtttacattttttgcgggaaaattacgggtttacgtttttggcgggaaaattacggatttacgtttttggcgggaaaatctcgggtttacatttttagcgggaaaatcacgggtttacgtttttggcgggaaaatctcgggtttacgtttttggcgggaaaattatggatttacgtttttggcgggaaaatctcgggtttacatttttggcgggaaaattacggatttacgtttttggcgggaaaatctcggatttacgtttttggcgggaaaatctcgggtttacatttttggcgggaaaatctcggatttacgtttttggcgggaaaatcacaggtttatgttttttggtggaaaaattacgagtttactttttctcaattttatcgcttgtatatttaagaaatttggaaaaatattaattttattaaattggtttagatgtgttggttaaacttaaattgacattggtttagagattttagttggtttaattgaattttacaaaatttgatgggttaattgggtaaaccattgaaaccattaaccattacaacccaactcattttactcatcaaaccaattgactcatcaactcatttgactcattaactcatttgagtcaaaattttcaactcattagggttcatgggttgagttgagttgagttgatccatgaattttgacccattttgacacccctagttatacccaatccaaaaaagaaacgtttgcaaatgaatcatccacaaaacttaattgagaaatctgtactaaacaggtagcctttaaattgagacgacgagaaaaaagaaaaagaaaaaagaataggtattcttttctagaagtttgaaacaaaccaaacttgtttttttttatggtatcaaatcgaacttgtttaacagattgaaaaaagcggactactgcaaaattaatggcattcgagtagcttgtttcaaaaaattgatagtttggcaatattgactataaagtagcattttcatctttgaataaagaggtgaccgactatttttttaacactttacacttaaaaaacggccatacaaatacatcccaaaacttaaattgaatagatcaattacaagaaaaccacaataaattatattttcttgtttaaaacggcaattttcaatgtatttacacatttagatatttctcttttctctattttgactgttttacctttgcttacctttctatttaccaaataacgcaatccgacaacattggtgtgttttcaccgccggagcagctctgttcagattcttcttgttttgttgaaatcagaagaaattagcagcaaaggccagacttgaaagtactaaattacccatcaaaatcaacatttcaaaccttcaccaaatatttgtttaatttttgtctgggttggctatatactatcctttcgggtttagtttcttccatcattgagagtttgtaaaagaaaatggttgtttgggataagagattttaataaagcaaggaaaaaaaatcaggaagatggacgacaaagaagcaacgaagaagatgaaggaggaagagaattagagaagatgtacacaaaggaaaaatcgtcaaatatttaggtgaaaagtactcaaatccgtaagcccaccaaaaagtgtctttttcctagtttttggactgaaatatggtcaatcatacaaaaaaccctaaatagaatgtgtaattttcatctgtaattgccattttacattcgaattatgattttttttttattgatatatgatcggaaatcactacacaatcttatgaacaaacggtgatcaagaactgatcaataagttttggcggaagatggaaacgaaagtagagatggtggtaaagcttgattgactctctcaatcagtgggattgatccgtggagaactagacttgtttgaatcacccaaacaatcctaattctttaatctcaagaatcaaatgaatctttcaaatgaaacttaaaagacaaactttaaacaaagacactctttgaataataacaaacttgtatatttcttagatgattgaaaggtgaattgtacaaaggacaaatgagcgttatataagctcttatgagtaaaaataacattctagatctttaaacaagaaaacaaatgaataaaacttaatacatatggccgttggacaagattgtggtgtattacccaaataaggaaacttggagtgatgacttgacagcttggaaatctctaaaacggactcaaacagatggggaaagagctgttggagtttaaaggcaaacaactccaaataacttaaataaggcaatcttgtctccatatatggaaagtgaatgacaggagaatacgcttgatcccatgcatcttggtgcaccttagaatgatgtaggaaaattctagaagtagtttaacgtctcatgggttccaatgatacgtttggaatctccaaaacccgtgagcatccaaatacgacaagtgtagactgttcggtttagaaacttgatacctcataaacaaaaattggttttgacttgattcaaaactgatgagctcctgatgagtcaagaatgtaagaaaattaactttgtagtttaactcctcctggttgggttggaattctccaataagttgatgatggtctccatcgggttctttggaaatctagtgacttgtaacttgaatatcttcctcatgtggaaagcttttgaaccaattccatttcctagtgattccttgatgacttggtgttggctcattaaaagcatttctaggtaaaaccattgggaaacaaccacattccaactccggttgcgttgatatgcttcaataaaggcacataagtctatggtacacatgggttggttcactccaagagtcttggtagtcttgatagtctggtttgtgtctccttcatgctcattgaaacggtttcgacctcaaaactgtataactttgacattgtggtggtttggtgatgtgtaggctctactttgagcagataagataggattacgcctctgttctgctctggcgcgtggctcttcttccttgtagcttttacccatttggaaactttgatcctgttcacttttggtggtgatgcttctttattctcagcctggtttaacaacaagttcttctattggttgagcttgtttatgttttatctccttagcacctcaaataatctcaaaactttggacaagaaacaaatgcattatgacttctttacaaaaatataaacttgttgaatcaaaatttttagcgctagttttagtatacctatcttcaacttgcgattttaaacatattgtttccttatgctcttgtatgatttagtaaactctttgatatggatgtcgcatcaagagatacaaacgaagccaacgttagacttaactgtttaacaaagtgtatagcttgaccaacagactcgatcaaagatcgagtggagactgctcgaccggctagcttgatcggaggtcgagtggggacttctcgagctaggatctcgatggataggcataagtgcttaacactttgtctggtggtttctccttgatgctttcctttccattagcacgttgatcaaccttagtatttagtgtgatgctgcagctatcagttgggccagttcagttctcctcttcacagattatggtgtcttgtatgctatctccgaatttgtatctctatagattctcaatggcaacaataagtgcattatatttgtatttaaaattagggttagatcgcactaaacttattgatagtattagctagctgaaacattattttatatttgcttcttggaattgcatctccggaactgacatcaatacggtgaccaaaaatttggtgcgattagcgtcttgaaggagacaaaattatctttaggaagattgaatcagaggatgtaaagaattatgtaactgaatagattaggagtgagattaaaataaatagagatgatgatacattttatgttcatgaccacaatattaaccctactaatagatgaataatatgaatagtatagattgggtagatgggtgatacgattgatttttgacattctctttatattttcttataatttttggtttgcaatttcttgaaaattctattaaatggttagaaattacacctgttagaattaaacaattccttaaaatctgtagcttaggtctctaattatatccaactgaattctatcaaattctttcatctccctctgcctacattctttttaagtctcttttgattaatttttaaagtctcatgtgactaacgttgttcgagacctgtacaaaaagatatcaagctctatttacttgtttactatcaacagtcacatattttataaaggtaaagagaaatgttgatgggaagatggcgtagttggctaatttactatactcgttgggattaatggttattaaggttgcactatacaagccttcgatttataatttcttattaatgattattataattttgaaggaaaaatatcttcggattttggctcataattgatcagttataaaaatagtcgggactgacaaggctcgaacctgcagtgatcagtttctgctgctggagcgttctctatgtttagtaacctgggtaaaggctgccttgctttccgttgtggaatctttagatgctttttattcaacttcgagacacacaatgaagtatatctctttagattctttgagctgcgattgatctaaacgttccaagtgcatccaacatgaaatggaaggttgaaaagtataaaatagataatttaaataattataataacatatcatatattaaaataatatgtaatcatttatgtaatcatttatgaatcaacaatagagttattaaaagtaatatagccgacttcacaacaaaaaaattaaaaaatattcatccaatatagtaacaatatatcatttttccaaataaactgaaatatgatacgagattgagataagaaacaaacaaaacaagagacctacctaattctctagtatttagcgatcactaagatacatcagcattctcattttcgtgtataaaatgatcaagttttatcacaccatcataaaataagttcagatgaattcggtttgggcatgttgtaagatcatgaattccttagacatatgttttttaaagtacccatatatcataaataccaccaacacaaaaattgtaagaaaataataaagataaaaaatgtcaccacgaaactttggtgtcttcttgaattacttgatccaagctattcgccaatgcatcaactaaaacaaggtcattgtcaaacatcttttctttgttattatttgtaaactaataagtttatcatcaacatttatgaaataatatcaaattgaatgtaaaaaaaactgaagagatattcaaaaagataactataataacatatcatatattaaaacaatgtgcaataattaaataatcaaaaatagagtcaaataaaataaacataaaatacctactataaacaaacataaaaaaaaagatttttatgtttcaaataaaatcataaaaaatatttattggttatattttaaccaaaaaaaaaccaatatatattttaacataaagattttcggttaaaatataaaaatgctactatattggttaaaataaacataaaaaaaaatcttgttattatacaactaaaagtgaatttctttttcaaccaatatacaaataacaagattttttttttttcaaataaaatcaaatatgagatgagattgataacaataaacaaacaaaataaggtaggcagctacttctttagtgtttagcaatcaataagatcaataatacatgacgcttcagacccctatcaaaagatttcaacaagcctcaacatgtcaccagtaactttcgagcagcactagccaccaactattacagagaaggtaaagaccacgacatatttatgctattatcataaaattaccttgtaacattgcgcaagtcctatatgcttgtgttatgctacctaataggtcatagttgatagatgaagatattcagtaaaattatggtgaaatgataacaaaagcatacgaatctacgattcataactcatcaaaatatgtttacataaagaatataacatattggttattttataaagcaccaactcgtgggaaacgactcatatgtacttacgaggccaccataaggtccatataatgcagaggacatggaaacatatctacaatactcatcttaagcccaaaataatgagccttcatttaaatgacatggaacatagaagtattattagggttaatttaatgaatgaccaaatttgatatccttattaagagaatgaccttctcacagaaaagttgggtatataacgtttttttagcatgcgaaatatccgatatagcctctacggatgggcggtaaaaccatatttccgacagcagacttgtagatgtaggggagctagagattgtacgccaatgattacaacgtatcaaaaaaaaaaatgcatgcattacttatgcagttactactaaataaagcatgaactatttatgagtgtagatctcaatttagagctttcattactacaactttctaagtttgtactgaacgtttcataaaatacatgcaatttacaactgtaacagcatgtggtatgaaaggatttatttcaattttttttattaaaaataatcattaaaaaacaaaaaaattagtatggaaattgagtatataccacgatattgggctggtaactttttcggctgagtattgtactgtattgattattcaacaaggtgaatgggcttttaccttgaatctatgaccagcagaagtactacgatttggtaaacagcacaagtactacggaaacaacatgtgattttttaaaatcaaagtaatcatatcagagcaacttggaaagaaaacataggagacaaatattagaaaaattcccggatgtgacaataaaaagcgcgagcaaagagggatggagatacgtatcagacgcatttaatgcggcgtcagaagatatacagcttccaacgtaatatactgttgtatgtgtaaacccttttctttagtgtaacactttttaacacaaggtttgtgtgcttatgctatacgctacagaatggcgggtcgataagttgacacgttggtcaatgacgtcaagattacgaataggcaagtgggggcagaagatatactgaatctatacctcagttcacggtaatgtgtaaagcaaagactaagtaaatcacttggttatcttgacgatagcatgcaatacaaataaagaacactgaccacttcgatttgacattcgtgaattgtcgcttcacgcctccctcgggtgttgggagggaaatcataccgttttgaaattcgcgtggctgcaaatggttaagcaactgttactagaaatatcttttcttactgtagccctaaaaaacaaagttaaccttttctataaaagaagaaagatggcaagatatcatctctcacacctctacttcttcctataaagcacacactacgtatccaacaacatcgaagaactcgatcatttctgttttggtatgcaattaatgattgttcttttggtcgggtttgttgctatttttaaaaaactcatggttgatttatctctatttaatgcaactcatgtaggtaccgacggtggttataaccgaaataaccgacgatcgttatgtcaggacggtgagtggttcctgggcaatcggagctgatggaacatggttattcatatccaatcacaataatgcagtgaggaggttgagcattcgggaaggggagaagttagcatttgtgcgccagcttgttagagaagcgtacggagaggaatacgttgaaggcccgctacacctgacttaccaatgacctgattggatggacatggaaactacctttggtgggcgcacaaagccagtaaccatagcttcagatgagacaatgggagtgtttctagctatgcgttttgagttggaggacttgagtttgtttgtctccaagcaaacggtggatggtggttccgaagatggtggaacaagtcagacttcaagttacggatttgcagataaaggtaaatcacctttatacgttaacgctgaacgatcacctaactacgagtccgttgtgtggaaaaggcttatgcatgacgaggcggtcctccgctggatgcgttcaacggaaacagaaggtcaaaacgttggagactcttctaccaacgtacagcaacaccctgtgagaccagctgttaaggcagcttctccgatgttaacgactgaaagtatggacacagcgactgaagatggagatcaggtaaaatattctgcgtttattaaattcagccactcgaatataccattacactactaagacatctatttacgcaggaagaatactcaactgttgttgaggcagatttacttaaaaatctggggttaccgtcaattaatttagccactgaatcttacgactctctcagtgagggggaagcgtacaacgacgaaaacgactatcccgggggcgagacaattaaggagtgcaatttttttgggccttccgcaactaacttggtggaacctctaggtgtacacttggatctcgcggtacctttgcatgaggctcttgaagacatgtgccttaacttcgcatctttcaacagggatgcggcgccaaccctagacgaacaaggggaagaaggtaccaatgacatagcatgttgtttttaagaacaacacatattgaaaaaatgttctaataataactgtcatatagagtaacatgctattcgtataaataccatgcaataacaattttaatttcgctgaattcctgattagtcatacgaatacaagcttaatatccacatcacatttgtttagtttaaataacaaatttaatttaatatcacgtaatataatgatatgtttacaaaccaacacatgctttcaacttacgttgatatgcatgagatatccctaaccaaaatatagagtaacatgctttaatattagacatcatggtctatagatattatgttgatcaaaatgttactgtttagtcatacaaatacatgctttctatgttcacaacatgtgtacagtttaaataatacacgaactttattgttgtatagaccgcgtcggaatggaattagcaattcgggatgtggtctacgaaggtgatgaactgtttgttggccgggtattcaaaaacaaacaggattgcaatgtcaaattagcagttcacgcacttaatagacggttctatttccgtcgtgatcgttcctgcaagaaactaacgactttaacctgcatttctgaaacatgcccttggcgtgtatacatcgtcaagctggaggattctgacaattaccaaattcgaagtgctaatctcgagcacacttgcactgtagaagaaaagagtaattaccacagagcagcaacaacacgggtcataggcagcatatttcagtctaagtatgcgggcaacagtcgggggccaagggctattgaccttcaatgcatcctattgaccgattactcagttagaattttctattggaaggcatggaaatcaagagaaattgcaatggatagtgcacaaggatcagctgcgaatagtttcactctattgccagcctacctacatgtgctgcgcgaggctaatccaggttcaattgttgatcttaagacagaggttgatggaaagggtaatcaccggtttaagtacatgttcttagcatttgccgcatcgattcaaggtttctcttgcatgaaacgggtcattgttattgacggtgcccacctgaaaggcaaatacggtggatgcctcctaaccgccagcggccaagacgctaatttccaggtttttcccatagcgtttggcgtggtcgatagcgaaaacgatgactcatgagaatgttttttccgtgttttgagcaccgctataccggatggagataacctgaccttcgtctcagacaaacattcctccatttacaccggtcttcgaagggtaatctttaaaattgataattttaaatgttacatgttatatacagcatctggctcttatttattttagaacacatgctatctaccaatatgcccttctatacacgtataacacatgttaatttgcaggtctatccaaaggctaagcacggggcatgtattgttcatctgcaacgaaacatagcaacctcatataaaaagaaacacttgctgttccacgtgccaagagctgcaagggctttccggatctgtgaatttcaaacatattttaatgaggtgatatgactagatccggcttgcgcccgatacttggaatctgttggtttttgccattggacacgcgcttatttccttgggaaagatacaatgtcatgactagcaatgtggcggagtctttgaacgcagtcttgaaagaagcccgtgaactaccaatcatttccttgttagagttcattcggaccacattaatttcctggtttgctatgaggcgtgaggcagctagaaccgaagcatcgcctctaccaccaaagatgagagaagttgttcatcgaaactttgaaaaatcagtccgatttgcggttcatcgccttgacaggtacgattacgagataagggaggaaggcgcaagtgtctaccacgtgaagcttatggaacacacatgctcctgtagagcatttgatttgcttcacttgccttgcccccacgcaataacggctgcagtggttgagggcgttccaatacaaggactgatggcgccggaatattctgttgaaagctggagaatgtcttacctaggtaccataaaacctgtacccgaggttggtgacgttttcgctttacctgaaccaatagcctctctccacctcttcccgccagccacgcgccgtccatcgggacagccgaaaaagaaaagaattacttcaaggggggaattcacggtaaacgttatacatttggaatttactgtaacacccttagtgttttacattcctaacacttgctcaatcttcatctcagggtccccagcgacaagtaacacgttgttctcgttgcacaggctccgaccataatcgcgccacgtgcaaaatgcccatataaaggtacaatgttattttataccgtatcatgctatagatagaaacaacgttcatacaatttttataatatcatctgcagggggtattgtggctcgcgtcttcttcatgagttatatgttgtgtcatacaatttttataatatcatctgcagggggtattgtggctcgcgtcttcttcatgagttatatgttgtgttatataagtaaggggaagtccatcacatatggatattatgtaaaaggaagggtcacttggtataatgtacatattagcaattagatgtggcgattagggtgacaactaaaagctacgttgagaatgcaatcaagggaccccaattccagtcggtgccgtatagaagaccaccttccacgaggcaaaggataatgttctgttttttggcttttgtgtagaaaaaaactttctgttcccccttttgtaaacagactcatgatattaagtaaagacgcgagtgtttaattattaatacgtggtgtaatgttaaaattcaaatccacagacaaggggttaaatgaggaaatatatgtaaacaaatataacgaatagatatagcaccactacgggcaaattaaagtccataaacatgttcagccatcatgaactgacattttatgtcaaggattccaacaagatgaaatcattccaaccataaatcaaataagatgctattcgagaaaaccacatgtgatgtttagtaattgcgtgaggtataaccgggcaccgagagttgaacagttccacataggattccttatgccacttcgactactttgttagaacccaataagtgttgaaccaaggattcacacaatagatttgtttagagagggaaaacaaatctagtaatttctcttcattaggtattctatccaagactcgattacaaaagatgttctaatctcttatgaaatacattagggttttgttcaagaacagaaaaagagttagggttttaaaaaggtatagctgcatccatgatggattgcctacgtaccctgtgaagggatcaagccattcgtagttctcaataggtataaagttatgtgtttcttgtgagtatccaaagatgacccttttgtgaagtccctgagacactttatatagggtcgttaaaccgcctccttcgcgatattctcgaaagatttccatttatccttaagtcggttctggaggataatcgtattaaagatattttccttattcttcggaggcttcggaaagatttcttgatccgacattatcttcaaagattctcctttatcatttccgaaagtcccataaaagatcctattttactggaaatgatcctttgagaatgaatggtttttacaagtctttgtctcgggtgttcttcacggctcggtggtcgtttgaaaggtggcttcgggcaaacggtatgtaccggctcgggcgcgcttgatgactgtccattaagctcaattgggtgtctccctaggcgatatagatgttttccgcagcgttctcacgattggctcggattgtgttcataggattaacacccgagccattttacgaactccgtgacggttgatcgaataaggtcccgaggtgctttgttctaggctaggggccaatcacatgtttaaccatgaggtgattgttattcttatactgtttggctcggtctttcttgtgggggaattcgaccccaacaataagtgcttctgcaccacacattccaccccccaactacgccacataaatgagtgaatatatacactaacaatattggactatatatacatattggctatcaacatctccgtcaataataaaacgtcctccggcctacttacacatgcttgcaagggtagaaatgagatagtatcgtcagaatccagtactcatgcgggtggatgggctgttcagaaaacaatttgacgacacattggaggcaaacaacccggaagcacattatcttgaaagactaaggtatgatttagtcatggcaaaaaaacacatttttaaagctgtaaacaaggtagatgaggcgttgtttgttatggctatgttgtctatttgtggtggtgagaaggagctaggtgaatttttcactgaacaactgtttgccctaccttcggccaaagtattagctatgggtgattctttatttgcagctcttgaacaaatggctgtgcgcaatggtacagcttacaggcttacatggaatggggcccatcctccatgtgtatcaatccacaacatatataatagatgcgaagagtgctacattttcttttgttcaaaagaattctgtcggcgatgttagatggtacaagctgcacccaacgttggaaatctcgtaaccagaagggaagcatcctttaaaataatatgctgttattgtatattaacccgcatatcatctataaatcacattctgtttgtaaaaagtacatattttatgtctaatgtgttcgtggttatgataacggtgccaaataacgctattacattaaaatggcatgatatgtacctatattacatgttttatattgactttttgatcatgttaatctgtctaaggtgtataatccaaaatatttataatattattattattgcaatctttacaaccgggtaagtcctaaatatcaactaagccacagttagaatgcatctatatttaaacgaatcatgaggtaaatataaaacgcacggtacatattagaattgcagtgacatatttttactacacaaaacaggtgcatagaaagaacattaggtactcaactattaggtgtctaaaatattacagaatcaggtaatagaaggtaaacacactagaacatttgtaatatgatcctggttagaatcacagtcccttgaatacacttcgtgtggttgattgtaagatgatgagattgttcaggaacagtctgcagattgactgtatgatggtgatggtgatggcgatcgagtatcagatcctgatggtgcgatctagtagatttggtgacagtgatgatgatgacgcgatcgagtagatttgttgatatgatgctgcgatagagtgattttggtgaagtgatgatatgatgctgcgatagagtgattttgatgaagtgatgatatgatgctgcgatagagtggttttggtgaactgatgctatgatgctgcgatagagtgatttggtgaagtgatgatatgatgctgcgatagagtggttttggtgaagtgatgatatggagatgagatcgagtatggtgatggaatggggatcgagtagaacttccaaaggatgtgaaagacctttgaacttccgagcttgatcgtgcttggatatgacacaccaaaagcattcacaagatgagatcgtgatattacacacacaaactcaagatcaaacgaattcagaaagagatttgataagaaaaatttttgatgatttgattacaaggagaagaagagattataaagaagaagaagagtctagggaagatgtaaagtcgtcatagggaaagaaaaacgaaataaacacacaaagactaaattcaaataaaatgggcttctccttggcaatgggctgcgagacaacaatgggctgatgtggtcgagtgtgtgggcttgcctcgttaaaaacctctcttggaaaacccaatgggacaaaaccaagaggagggaaaaagagtgcaagtcacacacctctattgttgtcgcttaaaccgcttgaatcacaaccaacgtggtttgacaagcatcttgtttaagactgccctcaatgtgttgtagaagtgtagtgatatcttgatttagtagtctagtcttcgatcttgtcattggaccattaagaacatgcattgcttccttttttgtagctccaagcagttcatcttcatgttgggtcgagtagtccatcgagtcattagattcaagctccctcaaatcttcaacagcatgcttgatcgagtggttgataactttccctccttcaaactgctccttagctccatgatccaagcttgtcattatcacatcatctccatgatccaagcttgtcattatctcatcagctccatgatccaagcttgtcattatctcatcagctccatgatccaagcttgtcattatcacatcatcctctcccagttgaaaaggatttgacctcaaatctgtgttgtctgcaataaaaggaaaaaggtcagcaacattaaaactattactcacattatacttaccttgcaaatccaaagagtaggcattgttgttgatcctcttgagcactttaaagggtccgtctatcctcgacataagtttggactttctctctttaggaaaacgttcttttcggagatgaatccaaaccaagtctccctcgttgaagatgacttcctttctactcttgttggcgtgcttagcatactgttttgttttctcttcaatgttcttcttggcctgctcatgaatctgttgcaccaattctgccttcttctttccatctagactgactctttcactcaaaggcaaaggcattaaatccaaaggagtagtaggattgaacccataaacgatttgaaaaggcgaaaatttagaggcagaatgcatagagtgattatatgcaaattcaacatgaggtagacagtcctcccaagtctttagattctttttaatcaatgcacgcaagagtgtagacaatgtcctattaacgacctcagtttgcccatcagtttgtggatgacaagtagtagaaaacaacaacttagttcctagcttagaccaaagagttttccaaaaataactaagaaacttagtgtctctatctgatactatggtcttaggcatgccatgcaaacgaacaacttccctaaagaacagattggctatatgtatggcatcatcagttttatgacaagggatgaaatgtgccattttagaaaatctatcaacaaccacaaaaatcgagtccttacctgtcctggtccttggcaaacctactacaaagtccatagaaatatcattccaaggatgcgaaggaataggaagaggagtatacaaaccgtggggttgtgacttagccttagcttgtttacatgtgggacacctttcacatattctctccacgtctcttttcatatgcggccagtgaaagtgatcttgcattactttaatagtttttgagactccaaagtgtcccattaagcctccaccatgtgcttcccttataaacagctctctcaaagacgaattaggaatacacaaacggttatcataaaacaagaacccgtcatgtctataatattttccaaatgcaaacttttcacaagatgaatatatcttttcaaaatcagaatcatttgcataaagagattttatatgctcaaaaccaagtaacttagcatcaagagatgagagaagaacatacctccttgacaatgcatcagcaactacattgtccttacctttcttatatttgatgacataaggaaatgtctcaatgaattcaacccaccttgcatgcctcttgttgagtttctgttgtcctttaagatgcttcaaggactcatggtctgtgtgaatgacaaactccttaggccagaggtaatgttgccccgtttgtaatgcccttactaaagcataaagttctttgtcataggtaggatagttgagagtagctcctccaagcttttcactgaaataagctattggcttcttatcctgcattaagacaacaccaattcctaccccggaggcatcacattcaatttcaaaagttttaagaaaatcaggaagtgataaaacaggggcatgagtaagcttctcttttagggcctggaaagcatcttcttgagcttgttcccacttgaatccaacatttttcttaataacttcggtcagtggagctgctagagtgctaaagtccttcacaaacctcctatagaaaccagcaagtccatggaagctcctcacttcccctacagatttaggacttggccattctcgaattgccttcaccttctcttcgtcaactttaactccatctgtactcacaacaaaacctaagaagacaaggttatctgttccaaaagtacatttcttaagattggcataaagcttttccttcctaagtacttctaaaaccattttcaaatgttcaacatgttcttctagactcttgctgtaaactaggatgtcatcaaaataaacaataacaaaacgtcctataaaagctctaagaacatgattcatcagtctcatgaatgtactaggtgcatttgtcagcccgaatggcatcactaaccattcatataaaccttgtatagttttaaatgcagttttccattcatcgccttctttcatcctaatttgatgatacccactttttaaatcaaccttagaaaagatgctagaaccatgcaattcgtctaacatatcatctaatctaggtataggatggcgatacttcactgttatattgttgatggctctgcaatcaacacacatcctccagcttccatccttcttaggtacaagcaacacaggtactgcacagggactcatactctcacgaatatggcctctctccatcagctcagtcacttgcttttctagctccttagtctccacgggattggtcctataagccggtctgtttggcaaagacgctcctggaacaaagtcaatttggtgctcaatgcctctaatgggtggtaagcctactggattctcctctggaaacacatcagtataatcctgcaatagaaacttaattttgctaggaatagcctgctcaggattagttagactcataagagtctctttaaagacaaacaataacttagatgattgaaaaccacttcccttttgcttactctcgttgatcatgaggttagatggtttaacagtttgtttctttctcatcttcatgctcaactggtctaggtacacctcatgaggcgtcattggaaccaatatggtttttctgcccttgaactcaaagatttggcgattggtgaagccttaccttacggtccgattgccatggtcttccaagtagtatgtgactagcttccataggcagtatgtcacacaaaatttcgtcctcatacttgccaatagataatggtaccttcacttgtctgtccacgctcatctctccatcctcattcaaccattgcaacttgtatggccttggatgcttcataacttttagaccaagcttctccaccatggtttcactagcaacgttggtgcaacttccgccatctatgatcaagctacagaccttgtcattgaccatacaacttgaatgaaacaggttctctcgctgctcttgttcatccgttttggctatcacactcaaagctttcattgtaaccaatagctctccttttgatggtgcttcatagtcttctgttgatgaactctcttctagttgctcatcctctgactctatctcaccagtgtctttgattatcatgatcctcttgtttgaacactcactagcataatgaccatgtccctgacacttaaagcccttgatgtctctagttcttgtcataacagctttgccctttcctttctgatcttgatcctcaacttttggtttgatgaaaggcttataatctttctgaaatcctgatcgttcatccttgtggtagctaggctttcctgaaccaaaactaggcttagagctccttctcttcagctgtttttcaaacatgattgctttgtgcagtagctcctctaactccacatagtgctgaacctccaatctgtctatgatatctctgtttagacctcccatgaacctagacattatggcttcattatcctcctgaatatcagctcttaacatcaaggtttccatctctttgtagtactcctctacggatttgtttccttggacaagatttctcaatctgttgtgtagctctctgtagtagtgacttggcacgaatctcttcctcattatggtcttcatttgagtccaggactcaattggatagtctccagcacgtctccttgtggtaaccaattgatcccaccaactcaaggcgtaattctgaaattcggttggtgccactttcactttgctttcttcagtatattgttggcaattgaacacgagctcaatcttcttttcccattctagatactcatcagggtcgttggttcctttgaaagaaggaatacgtatcttcaagccggcaagatcatctctaggtagaactctttcttctctgtcatgcctcctccttctatggttggtctgtctagaggattgactatagtaactcattgtgtctctatcgtctacaggatctctaggctctcttctagttcgatctctatctgggtcagaattgatatgctcttgcctgaaagcttccagcctagcatcgagtaacttagtcattgttgcagtgagagcaacaagcattagtttgttgctgttttctccttcttcctcgtctgccatgacactacaatgacaaaaacgacaacaacaagtaaaaggatctttagaaacaagtagatcgagtatagaagttgatgagtccaaaaacaattacacaagttccaatcgttttcaagcggatctatcagttctaacaagtttctaataccaaaaacgataagattcaactctagaagcaatacagaatatgaaaagtcgaaatggatacaacctgacacgaagcggctctgataccacttaatatgatcctggttagaatcacagtcccttgaatacacttcgtgtggttgattgtaagatgatgagattgttcaggaacagtctgcggattgactgtatgatggtgatggtgatggcgatcgagtatcagatcctgatggtgcgatctagtagatttggtgacagtgatgatgatgacgcgatcgagtagatttgttgatatgatgatgcgatagagtgattttggtgaagtgatgatatgatgctgcgatagagtgattttgatgaagtgatgatatgatgctgcgatagagtggttttggtgaactgatggtatgatgctgcgatagagtgatttggtgaagtgatgatatgatgctgcgatagagtggttttggtgtgtcatatccaagcacgatcaagctcggaagttcaaaggtctttcacatcctttggaagttctactcgatccccattccatcaccatactcgatctcatctccatatcatcacttcaccaaaaccactctatcgcagcatcatatcatcacttcatcaaaatcactctatcgcagcatcatatcatcacttcaccaaaatcactcttatcgcagcatcatatcaacaaatctactcgatcgcgtcatcatcatcactgtcaccaaatctactagatcgcaccatcaggatctgatactcgatcgccatcaccatcaccatcatacagtcaatccgcagacagttcctgaacaatctcatcatcttacaatcaaccacacgaagtgtattcaagggactgtgattctaaccaggatcatattaatttgggtcagacaatcccattagctaattcaaaaccggcaatgaaatatttgttagcagcagtcaccacatcagcatgcttcacttctttgcaagcctgaatcccaccattggcatgggcttcaattaaacgagctgccataactccagaatatttgacagaatctgcctgtggaatatcattttccctgtgaaccgcaaaagatttcaaatgaagtttcttttccccagccttcttaatagcaaatcgaaatagatatggtaacatttcagcaaggggcaaaagcacattcttcaattttgtttcacgccataatcctgtatagctgtcgaggacgctaatgatccttgcactcatatcaacacaaagccctacccaatgctgtaaatcaatgagaaatggaatgtagaccacatcagaacctgtaggggtacattcaagtaggtcgtgatcaaacccatacagtcctttatcagcagacttgacgaattttgggtagtgcttgcataattcaaccacaaatgttgaatcaatgaatgaaacggcttggtgcttttcaatgatattatttgcacgccagtcaatccttatgctgttaatgaagatgtctataacctgtaaatagagtagaaggcatattaggtgtttaaggcaaaccctatgtttatagagcactatgtaatctttcctggtaacatgatatttatcataccattttgggtacaacagtcttgaattcaacaatctcacgcaactcgatggcgggaagtgttcgacaagccccaaaatcaatgtccctaataacagccatatgcataagttttaagtaatatgattcaaacaaaataaaatagcataaggttggaattaatacccagacatgccatataagcgtttaacttgttcatacggctaacatcatgcccaaaagtaacagtcctaccgcttgtggaagaggctattactaattcatgttggagttgtgagcaacgtaaacgtgattagaaaatcagatgttatcttaagaatcaggaaattagagtttgtataaccctaaacattctgtgttaaacttaatggcatgtaatttgttctaaaaccttgatgtttgtacgggcaaaacacttaaaatatgacaaactttttaaatatattttgttatattaggtaaaaccctgaaccatgttgaaaatacatgatgtatcgcaaaatataaccgtgtgcatattaaacccgtgttttgtttttaaaaaccattaataagtaaacttgacctaccacaaaactacgaaatccatatttaacaatatcttaacgcattcatgcacccaaactcgacctaacacaaaactatgaaatccatatttaacactagctaaacgcatttatgcaaccttgtcatcagggtccacaatatcatttgttggggctggcagggacggttcagatatcatcagcatttggcttaaattggcctacaataagaaacagtataatgtaattagtttgttagtggtaacgagagtaaaaagtaatgaattatatgatctaacattatcggctgtagcaggtgggtcagcaagtccttctccatctttgtctgaagcaccgtcatcaaccattggctgtggggttgacttacattaggcagtcaaatcagactctatctgcaaggcaaacaacagacgttagagccaatacacggaaaaacaaacaaacatagtaactatgtgacaaggtttgaactcactatggatggtatggtgttcccaaactctggctgacctacattgtatgcaacaccatccatgtcaacaagcaccacatatggatctgggaggctgggctcagattcaaagaactcattgacgtctgtgggaggaggaagcaaacactgagtatgactcgctgcagctggaataggtttatcagggctagtttggatatcatcaaggcgctctccacctatcccatcaccgggggcatcaaccaagatattatcttgatgagatacaattttctcaccagaatcagacttttccacaaacatatcgtctaattctttagccggcagagtggaagagccaatgtcatgaatcccatctctagctgactcatcctcagtggtatcagtcaccacccctcgaactttgttgatattgacagcttcaagggatacatgtttatcagcagaaagagacttttcacctgaactgttgtctactgctggcgtcgggatggtggctgctgttgggccattgttgcctctcttctgtttctgtttgttatgaaaacaatacttgaattaggaagaactttcataaaatacagaatatttacaaaactgttaaacgtataacagagaactacgcaatccaggcctagtcggtggggataagcgaccaatgggggttgtagtctgtgtaggttctgcgtcgttaatatcatgcatcacttcacctaagacttgatcaataaatccaaaaccactgttctccttcgacttcactaccctgccattatccaaaacaacaagggaggatcccttcttcccacctaatccctcacccacatctcttgacctaggaccactgtgacgcttattcttcctgccatggctttctctcaacaagctgctcaatctagcctctaaatagctatagccttcaacatacgcgactccatacgcttgtctttcatgtcaatataatttttaatcgaatctagtatgtgaacctgccctttagttttacggggtttagaagagccaggcaaggaagcatcaggttgtatggtatcctcatcaacacaatcataagtgctacatacatcactgttgtcattcctttcatcgggtagcgaatcagggacaacaccacctgaaaacatggacccttgaatgtgtgctcctcttttattagttgcaacatgtagtcaacagatagatcttcttcgtcctcgacccaacctgacttgaaagcgtcaccagtcggtgttccactcaaaacaggaacgactttaatctgaaaaacaaagagttagactttagccacatgatattatgttttattacatgtattaaaagtatttatactgttactaacagtgaaatatagattatgtacccatctgctccttaaaaacaacatcttatttcatcatataaccagatgttgtaatgcataccgccatacgtgacttcaagttacggattgtcagataaagaactgtgatcatatgtaaaaccatgcaatttttgcataaatcatgatataaataataaatagtaaatcaacacatattaaaaaaaactaaaccatattctacacatttacacatcacgatatgaatctatagcaatggctcttactgaggtaacaggttatgattattttaaagaaactgtgatcatatttaaaaccatgcaatttatacagaaatcatgatataaataataaatagtaaattaacacatattaaaaaaactaagccacatgctatacatttacacagaatgatatgaatctataattgtatgtttttgataggaaaagaagaggttttcatgataaaaacgagcatatgaaaattaatttacgagagcagagatgcattgctcacctgagactgccggtcgactttccaaacaagatccaacttcaaacttcataagcgctcaatttccgtatctgtttcctctatttctgagtcactatcttcaacggcttcagggaattgaaattctctgattcgaggaacactttaaaagttggagtgcgtgtgggaaaccttgaaccgtgacagatttccgcaaaagtttatcagctccccttgcagtaacactcttcaacgtcattaagaatgacatagttccccaaggaaaatttagaaacatgtctaaattttctgccatgtccacatggaccggagagattttacttctacccgaggttgggcataaaacgccatcaatcaaggccagcacagcgtaacgtaaacgaattccttgatcttgaaccactcgcttcttcagcctgccaacaacccactcaacagatacatcactgcggtcaaataggttgtaccaatacttgccaggcgccaattttcgtttctctttcctctctttcatacgaggcggtttgtcgcagttcaaaccggtaacattttgaaactcagaaatggaaaaccgaacaggggatccagagaaaattacccaaatttcttgtttcttcctaacaacaagctgcctcgttagcaaaaagtaaataagcttcgcagaatacgcggcgctttcggagaaatcaaataatttaccaaactgagattcccggagaattttcatgtcctccgcatctaacgcgttagcgatgtcatctatcaaagacagttcactgtaggactgcactctctcactgttgggctcggatccagacctagacaaccgacggggtaaagagttgttcgtcatctacaagtcgaacccttttctgcacaaaatagaagtttataatcagaaacagtatgagattgcagatttcagttaatcggaatacaaattggagaaataaagaagttgataccgatcgagaacgttgaatagcttaaaccgcatatattttcaaaattacctgtagccggatggaattgatcgcctaactgcgagattgaatctaaagaaacgatatgtatgcgaaacaatatagatttgaaatagatattcggagagtttgcagaatctatgggtagagaacggaagacgttttctctcggaaaaccagcaaatgaagcggcgctagttttttttttgcagctgctgatatttccaaaaaattgataataaatcattttctcgaaattaaaatctatatcgtttgcgtccacatacaacattgctcttaccaaggttttcaaaattctaatttctgcaatcatacgcctatacacctatatgtcccctaaccaagaacacagttatacggggttgcgggtaatttcaaatacgtctccgacatacactatagacttatagttagtttctatattattattgattttatggtcatttagtgcatatacccgtattattattggttatgaatctatgagctgtattatttgaaatgttctgattgggtggtgattttgtggaggtgtgaagcatagaaaaacttgaaatgctgatgtatcagtagaggagagacttttagagtttttgtggtatgaattatcttttcgattttgttaaagccaaaacaaaatgggctttgtagaccactaatataaaaattaaagtaagtaatgggcctattttgggcctttttctaaacactaaacaagttctcgaatgttcgccggagacaatttcggattcctccgtcttcctccaaaacctttgaattctcacgactcagagcactacttcctcttcaattcagatcattttcagaactgatacactacaatggagcaatcggctgctccacaacctccgacgatgccgttaccttatcttccaagctccgttgaagcttcgagagatgatcttcaatgtatcggaactatggtgatcgtcccaccaaaaccagtcggttttctctgcggctccattcctgttctcgccgataactcgtttccagcttcttttacttcggctctcctcccttctcaggaaacgttagttacttctcctacttcttcttcttcttcttcttcttcttcttcctcttcttcatatcttgcaatttgcttgaagcttttttttatttgttgcagcgtcgtcactgctccgaggtaccaaatgcttccgatggagacagatcttaatcttcctcctttattaactgattttcccgataacgttttacctctcgccgccgtcaagtctaggatcaccgggggtatgtattttagttgattagctttcacaagtctgagtattatgcaattctcagttgtttgaaaaattcacttgacagatatatctaaggaggctaatgttattacttccaaccttagtaagaaatgtgaagcacttgctgtatctggtttagtggaatacggagatgagattgatgtgattgctcctgttgatattcttaagcaaatctttaagataccttactcgaaagctcgggtttcgatagcggttcagcgggttggacagactctcgtcttgaaccctgggtgcgttatttgacttgtttcgttgttgaaatctttgtaatttttcagtgagtaagtcttttatgttgtgtgatgcagacctgatgttgaagagggagagaaactgattaggaggcataacaatcaaccaaagtgtacaaaaaatgtggatgaatctttgtttttaaactttgctatgcattcagtgaggatggaggcgtgtgatattcccccgacgcatcgtgaacatacagagaaacgctcgagttcttctgctctacctgctggagagaactctcatgataatgctccagacgatagacttgacaaacctgcagggagtagtaaacaatctaaacaggatggtttcatttgtgagaagaagaagagcaaaaaaaacaaggcaggtgttgagccggtaagaaagaattctcaaatcagtgaaaagatcaagtcttctggagattctgagaaacatagcagaggtgggagtaacgaatttttaagagttctgttttggcaattccacaactttcgtatgcttttgggtagtgatctacttctgttcagcaatgaaaaatatgtggctgttagcttgcacttgtgggatgttagcgaaaaggttactgtttaaactctgactggatctgctttttatctttttggtagaatctttgttaattgttctcttttcacacaggttacacctttgacatggcttgaagcttggcttgacaatgtaatggcaagtgtgcccgagttagcaatttgttatcatgagaacggcatcgtccaagggtatgagcttttgaaaacagacgatatatttatactaaaaggtatctctgaggatggtacacctgcttttcatcctcatgttgttcagcaaaacggccttgctgttttaaggtttcttcaatcaaattgtaaagaggatcctggagcatattgggtaatgttataattctctgcgaactattatattgtttgtccgaattatttatgttcatgtcattgcttaaaccggttgatttggctatctccttttcagctctacaaaagcgctggtgaagatgaacttcaactctttgatctttccattatctcaaagaaccattcctcaagcgttcataacgacagcgcaagctcaccatctttgattcacagtgggagaagtgattctatgttttctttaggaaatcttctttaccgtgtcggtcataggctctctttgtcagtggtaaggaagcagagcattagtctacatgaaacgtcaataagaacttaattgtctctttttctgacactttgcatcttttgtaggtgccgaatgataggaacaagtgcgctaggttcctcacacagtgtttaaattgcttggatgcgcctgatcatctggtattggtcgttaaaagattttcttgatatcattgagctcttttctttataaatcttttatgcgtactcattagtaataccattctgataggttgtacgggcatatgcacacgagcagttcgcaagattaattctgaatagtgacgaggaatctgatttgacttttgagtctaatggtgtgcaacgtgaagtcaaaataacggacctagaggaggaagcacttgatcctgttactattgctgaccatgaaaatgagaccgtgactttctcagaagacaagttcactgaagatcactcagtttctaatattgtgcctttagtgtctgttcgaccaaagttggaagcaaatgtgtcactttgcaaggaactcttacattcagatagtccagattcccatgatactgaaggctctgcagtgaactccagttcagatactagtctcgatcttggtacattatgccaaactacaactagtcctatctcatcgaaactatcagcaataaaccatgtttctcaagctataaagtctctgaggtggacacggcaactacaatcttcagaacaggtggatgcatttcatgatatcttacctgatttttccaagtgttcatgtggtgatcctgattgtattgaggtctgtgatatccgtaagtggctaccaacatctaaactagataggaaattgtggaacctcgttttacttctcggtgaatcatatttgtctctaggggaagcttacaaagaggataaacagttgcaccaagcgttgaatactgtggaattagcttgctcgatttatggatcaatgccacagaagtttgaggagacattgtttgtttcctcgatgaacaagtctctttcactgcagtcaaaatttcatgaaagaacgcaagtggaagatttagaagcaaaatcagggccatctgacatcagtgttgaagaactttcatcaacacgcctcttctgggctaaagtatggatgttggttggcgacatatatgttcagttccacattcttaaaggtcaggagctttccagaagaacaaaggggacaaccaatcatttaaaaatgcagtctgaagtagtaaaggaagtacagcggctcaaaaagaagttaactgagtatagtcaaaattgtgcctcgtgttcattagtaaattgcagctgtaaaagtgacagagcaagcagtggaagcagtgcaagtagcagcaatggaagtagtgctcgtactgtgcctcatagcaggaagcacaatagaaaattacagtccaaaaatgtcgccagcaaggtctcacgagatgttgaagatgaacgtgttaattttaaagttgagaacaagagccgtaaagaagaagaagacacatcgggtgagacaaaaggagctgtccgtctggagcagaatgaatctaactctaaggaaactccaggagcgaaaaaaggtggaatattcaaatatctcaaggggtctaaaactgatgatgcagaaagcaatctgttggctgccttaaattgttatgaggaaacacgaagagcattacaggagcttccaagcaactgtagtgagtttcagtctgttttgagaaagaaagggtgggtatgtaatgaacttggtcggaaccgtctcgggagcaaagagctcaacaaagctgaagacgcctttgctgatgctatagtggcattcaaggaagtttgcgatcatactaatgtcatactcatcaactgcaacttgggtcacgggcgacgagctctagctgaagaaatggttccaaagatcgaagctctcgaactgcatcgtgcttttgaaaatgcttaccaaaaagctctggggactgcaaaacttgaatacagcaagtcacttaggtattacatggcagcaaagacagaactcagtgttgccactgcagaagctagttcagtttcagacaatttgaaagttgaagtctacacacagcttgccaatacctatctcagatttggaatgcttttagcaaatgaagatacaaccgctgcagctcgtgaacagaagaacatcttggaaaacactcatgattcttcttctgatggaaaatccagcgacttgagaaaacgtgaagtattatcagccagtgacgctataagagaggcgttggctctatatgaatctctcggagaaatacgcaaacaagaagctgcattcgcttaccttcaactagcacggtatcacaaagactgctgcttgggatttctggagacagagcgtcaaggaagtcctcgtaaacccgagagtaatgtcattcagagagccaaacagtatgctttgttggcagataggaattggcagaaatcgatggatttctacggtcctgagaatcttccttcgatgttccttacgatcctaattgagagatcagctctttcctcaaccgtttcaaacttctggcaattaaactttgtaagtgcttgatcccctcttggctatagcttgattcgttctctatgatttcaaggtctggcactaaacttctattttttttccttcagatgcttgaatcagctttgtctcgtctactcgaaggccgtcacatctccaaaacatatgcagaatccttaagaaccgaggacccgaagctatacaccaaattcatggcccaattgcagatggttctaaagcgaatgctggccttatccttaccatcggaaggagcaaacaagtctcagacatgtggaagatccggagactctggaaaactaagagagctatataaaacatcactcaagtcaacaaatctgtgcgacttgaatgcaatgcatgccttgtggacatcatcaccttagctaagtaatgttctcttctctacttctgattacaacattgctaactttaatataaaggatgtctaatacttttctatttctttctgcatttctcaggaacaaacaacaatacattggctgatgcgatttcgaaaccaacatctttctcgtattaaaatggtagcagaattcaagtgatatcttgttcgttaaatgtaaaatgtgatagtgtgaaacataaaagagtgatatttcaaggtggtagtgttaatgttcttggtagctaacacttttgcattaggacatgtttgatgtgtgggattttaagttaagttaaattaaattggttcagtctcacatataagcctacttgtttggttagataaacctagttactcgaatcaatatctaagccacattgttcgaaatatatgtgtacataagtctatttactcagaatctactatgtaagaaaataataactttttgaatacacatttaatttcagtatatgcctttacaaatgttttgaaaatcttgtttttggctaatctaaacaaggctttcaaatgtaaattatagaaacacgatctatgccgacgatgtatactaactgataagtcatcacaaatagtaatgattttattcaagtagtatactatttatgtgttgattagaaaactaaagtaattgattctagaattgggtgtttcttttcatcaagctgcaaactatcaatgaagatgaatagatgatgatgaaactactatctcaccatcattaccaccaccattactttattttatttaaaacttttcgttctatactaaaattaaaattaatttacgattagtatatgaaaatagtatagtaaccatattattcatatacatcctaaatagtacaacatatttttacttacaaacattatttactattttataaattctaatccgattttaaaattttaaactaggttgtatgtaaaaaaaaaacatttttgtgtaataaattttagaattagaatatattttttggaaaagatatctagcaacaaaaatacaaatggataaaaactcaactaagtgggtgattggttatgtagaatttttgctatagagattttgttttagctgtgtcggctgtagctgtaactattattgctgtaagtttttaactttaaatattttataaaaaaacaattattaaaatataatagttgtaataaaagatttttttaatagtaaataaaatgccttgtattactaatttaaataaatatattatgatgatataaaaattaaaaaatcctatgaattcttgataaaaaaaaatctaattttacctatgattgttccataaattcattgcaatatcatctcgaattccttccatatattgcctagaatcaatcatttggtcatcttcttgtacttcgacctcttcattcaatgatggctgatgattaccttcttgctcgcaatttgcttcaaaatcaggatctggtatatttgattttcttacaaagttatgtagtgccatagttgctaccacaagttttcttgttattcggacatcataccttgctcgacttgcattatcctccattttccttttcatactccaaatattctttcaatgactgatcgaagtgaaaaatgaagtcgattaaatttttctttgtaattgtagggtggtgcttgattttgaaagtggctgggatgatatctagattgcctatatggtccaagatatccacaacgtaaaccatatcctgaatcaacaaaataatatttacctataggtggatgtggaaaatgtgtatcgccttgcatagccaatgcgagaacttttgcatcatgtgcagaaccaggtacaccaacatatatatatatatatatgtaaacaatatgtctaagttgcatatacccagaatgttcatgctgcatttattttttctgttccagtatcgttgttggtctcttccagaaaccttagcaggaacatgtgtcccatccattgcgccaataaaccctttgaagtgtggccaataacgcctatctgatcgcaacttaggatgaactttagtgagagtcattgggtctggcttaaacatatctattgagataagctccatgaatccaataattttctgataattatcaaagctccaaagctttgataattatcagttttattagaatttatctttgttttctgttatatatttgtgttgataatttcaatttttgtatttatctaatgaattaaaattcctacagcaaagaaaatatggctttgagaatttactctactacagccttaaaaaaaaaaaaaaaattgggttttaagtttcaaattaaaggtacaacacgattggtacgtaaaaattaaggctgtaagtcagacttacagctcaaacaatcacgcagtaagtgttactaaatcatctcaccaacaacttcacaccaaaactgtcttttctcaccctttacttgctattttcttaatttatatatatatatatatatatatatatatatatatatatatatatatatatattcaccttttacatgctatattcttaattaagttatcaaaaatggctagttttgcaaatcaccctaaaataaatcacattacattattattattagattatatcattttaattaaaattgattatttcgtttctttgtttttcaaatagagttcatttacatattgatgtatatgggcatacattgaatttatattaaatagtgtagtaattttgctattttttagttttaaaataatgtgagataaggaaaaatttagaagaaaaaaaatcttaaatacaatattttaaaattgtgacattttagttaattttcaaattaatgcttgtaagtgggttttaatgagtcaaaatgttataatattaattactctaccattcttcaccatttaaaccattataagttataacattattttgtaacatacaaaacacatatttccttataaatagcaagccacacattctatattcatcatattttcaatactagataattttgtattttttttttttacaataatggtgttctaacttctttttttcttatttaactttgttggtttggaaggtaatctaaatctcaatatatatgcaatatacaactacatttataagaagtttgtttgatccatattatgttagatatatatatatatatattgttttaactctttagttgtctttttttatttagtttttgtttatgaatattaaaacgattatatattatttgattatacaggtttaagtatgttacgagtttatcagaattttaaaactgtccatcatgtgttatatggtacaacaccacaatacaaaatgcttctgatttttactttaaactgtaatcttatgctataaataattaatttcttttagattgtgcaatttcaacatattttgatttaaagtcagaaaatcttacgcatgtttaactattaagtatatgtgtatatgtgttttttactttgttcaacttatatttacatagtttttcgtaacctgaaaccaaacgataaatcaaagacatcttatcttcgaaagaggcggtatactgagagatcccctcataatttccccaaagcgtaaccatgtgtgaataaattttgagctagtagggttgcagccacgagtaagtcttcccttgttattgtgtagccagaatgccgcaaaacttccatgcctaagcgaactgttgagagtacgtttcgatttctgactgtgttagcctggaagtgcttgtcccaaccttgtttctgagcatgaacgcccgcaagccaacatgttagttgaagcatcagggcgattagcagcatgatatcaaaacgctctgagctgctcgttcggctatggcgtaggcctagtccgtaggcaggacttttcaagtctcggaaggtttcttcaatctgcattcgcttcgaatagatattaacaagttgtttgggtgttcgaatttcaacaggtaagttagttgctagaacccatggctcctttgccgacgctgagtagattttaggtgacgggtggtgacaatgagtccgtgtcgagcgctgattttttcggcctttagagcgagatttatacaatagaatttggcatgagattggattgcttttagtcagcctcttatagcctaaagtctttgagtgactagatgacatatcatgtaagttgctgataggtttccagttttccgctcctaggtctgcatattgtacttttcctcttactcgacttaaccagtaccaacccagcttctcaacggatttataccatggcactttaaagccagcatcactgacaatgagcggtgtggtgttactcggtagaatgctcgcaaggtcggctagaaattggtcatgagctttctttgaacattgctctgaaagcgggaacgctttctcataaagagtaacagaacgaccgtgtagtgcgactgaagctcgcaataccataagtcgtttttgctcacgaatatcagaccagtcaacaagtacaatgggcatcgtattgcccgaacagataaagctagcatgccaacggtatacagcgagtcgctctttgtggaggtgacgattacctaacaatcggtcgattcgtttgatgttatgttttgttctcgctttggttggcaggttacggccaagttcggtaagagtgagagttttacagtcaagtaatgcgtggcaagccaacgttaagctgttgagtcgttttaagtgtaattcggggcagaattggtaaagagagtcgtgtaaaatatcgagttcgcacatcttgttgtctgattattgatttttcgcgaaaccatttgatcatatgacaagatgtgtatccaccttaacttaatgatttttaccaaaatcattaggggattcatcagggcggtatattcgaatgaggatgaactttatttgactaaaattagatttctaagtgttaattattgttgtagtacaaaagtctaaatgatctataactatttatatgacttaaacttacataaataaataaaagtaaagtggattcaccactttggtaatgaagtcatggagcaccctttccgtgacctttgttccagacaaaataggaagaccacacagagttgatggcttgagatacttattgcatgcagccttcagcattgcataccagaatagcattttctgcgccgaagagagtttgaacatggcctatgaaataaaagaatcacagttatataaagatgttgttaaattattaggaaataaagaaaaatcagatttgtaacctaacatgtcaaacaatgggggcaaacacaatgctgatagtcgagaacactacactcccagaaaaaactactgactaaacaaagttgattctagcaaaaaaaaaaaaaaccttcagtaaagacataaatatgattgttagttcaatcagtttgatatataattacataattttatatatatatattaaattaatttcacacatgcaacgcgtgagactttttttagtatacatataattaacataataacagattttttcaattttttcgcttataatttctacagattccatttaaaagcaagaagttaagtttaaaaaatgcttatatttataacatgtataatttaattaatcacaattagaattttgatcagattcaccataactaaataaaattctccagcgcaaataagtgccaaacttatagcaatctacttccatcaagatgaatgggaaaattgatgactgaagttaaaaagcattctaaaaattaaaaaagaaggggaataatgtaaaaaaataataaccaattttcaaagttggccgaaaaaaacaccaactaccacttcaacgctttaaatcaccaatttttgttgatttttctttttaattacacacttttgttaaccaaaccaatttaggtccgccatgaattattttgacaaaacgaattaatgaggtaactctttgttactcatcttcgtaatcaaattgttgataaactcaacattgattattattagagacttatttcattaatttgttccgttaagatacttaaaacatccttaaattttattggaaagttggtgctttttctcaactaaatttgaaaaatggtgattgttttgacattttttccccaaaacaaagaatactaataaaatttctatttattaaatattatctcgtttaaactatagttttttttaatacttatttttagtaatatgtactcctctaaataaccacccttcatttttttcttatgtatttaactatttattacttgaaattctccatctcattcattttatctttaacaaccattactctatttatttaaatctcatttttctaattcatcatattaaacacatttttcaaaaccatttccagttagagcatatgtctatagtaccaaaatataataaataaaacccctaatagcaaagattattgcaatttaattttttatttctaacatgtttagtcgaaagagtatgaaatatgttatttgttatcaaatataacaaaattttcctcatgctcgtatgagttatgttctaattaactactccatatattaagcttttgtgtcaatagctaatttttgtttaaattaatgtaaatttgaatggttgatcagtataaaatagaccaaaatcaaacaagctaactatagtatataataaataaaatattaagttccatactaaagtaataaaaaataaaaatcgatgatatggaatacatggagaatttgattttgcatgatgaaaaatagtcaaaaccaacatatataatcgaaagagactacttcctaggccctagcaataattttattcttttgaagaagtcaagattcgataccttcttttagttcacgaatagcgttatggcgataacgttaatctctcgatttcaaaacgtgttcctgaatttttctaatgatattgtttctcttatattaaatcaaatagagtatatactttatgcatggtttactttactacagttttctttggttataatttattggaccataaaaaactagatagaaataatacaactggatacagaatcacaagtttccataatgaacgcaaaaattagaatgagacgtgtagataaaatgggtccaagtcatgtaaacgtgttcagcattatccactagtcttctcttcgtactacgaccccaaaccccactagcctacaccaatcaaacctacaccaatcaattataatattttgtcagacgagctttatgccaatctaatggctagttgagtgttttcttttcaaggtttgtttattgattctaaaacttgggccgcctgaagttgaatttgatacaacaagccttggaaaataaaaagtaatgtttaaaaatcacaaaacatatgatggtaagatattacttagcattatacactaaataaccaaattgtgaaattttattttgcaaaataaagtggtgagaaaattacaaaataaataggtgttgatttttcggattgtttaaaacaaatactatgagtttttatcgtgtattaaacaaatactagcttttaatttatctgatgatacattattcttaaatacaacaatccacttatttatattttcaccacaccatattttagcaaaaataaattaaataaaaaattgtatatcctaattaactcatatgttttacaagaacaaaacacaatactatttttatacgttccaaaactttgtattataattattttaatgtttctaaagttatagcaatgtgactaatgtaacataaaaaaaaagagatttatatcctaaattttgcaatgtcactaattaacaaaaataaaaaatatgagaaattaaaaaatgagatttatatctaaagttttgcaatgtcactaatataaaattaacaaaacaaaaaaaaggttgattttggttttttatgtatgtaaagttaaagcaagttaaactaatgtgatattaaaaaaaccaggactcagaatcccgcgatgtcgcggaggaaatattctaaatatgtttatataatgatttaaaaaaaaacaaatcgcatattataaattttagtaattatttaaagaatatatatatatatatatatgtatatatatattaaacagattaataaccgtcaataattttacaaaattttgcaataaaaaaaagatacagacgaagaaaaaaaactcgtcaatattaacaaacaattacgataataaacaagaaaaaaataatcatcaatgttttagcaaaaaattgggatgaaaacacacaagcggaaaaaataaccgtcaatatattaaccaaaagtatcaataaaaagatatgaatgaaaaaaggtaagtttcaatatttcattacaccatattttagcaaaaataaaataaaataaaacaactatatatcctaattaactcatatgttttacaagaacaaaacacaatactatttttatacgttccaaaactttgtattttaatgtttctaaagttatagcaatatgactgatgtaacataaatttaaaaaaaacaaattaaaaaaaattaaaaaatgagatttttttgttttaacatattctttcctatttatattatgaggattatatagtaaattttgcaatgtcactaattaacaaaccaaatatatgtaattaaatttagaaattttaaaatgagatttatatctaaagtattgcaatgtccctaatataaaattaccgatttagaaattaaaaaatgatggtgtttttatttatgtaaagttaaagcaagataactaatctgatattaaaaattaacaaaacaaaacatataaaattaaattagaaaataaacaaaatgtgattaaaatgatataaagagagagtcaaaaaaattggagaagagggaaggagcaacaaagaaaaagtctgtttatcatcttcttcttcttcaaatcgagatcgaagaagaaccaacaaaaaaccaaaaatggagacgaagccaaaccctagacgtccttcaaacacagttctaccatatcaaacaccacgattaagagatcattaccttctgggaaaaaagctaggccaaggccaatttggaacaacctatctctgcacagagaaatcaacctccgctaattacgcctgcaaatcgatcccgaagcgaaagctcgtgtgtcgcgaggattacgaagatgtatggcgtgagattcagatcatgcatcatctctctgagcatccaaatgttgttaggatcaaagggacttatgaagattcggtgtttgttcatattgttatggaggtttgtgaaggtggtgagctttttgatcggattgtttctaaaggtcattttagtgagcgtgaagctgtcaagcttattaagacgattcttggtgttgttgaggcttgtcattctcttggtgttatgcatagagatctcaaacctgagaatttcttgtttgatagtcctaaagatgatgctaagcttaaggctaccgattttggtttgtctgtcttctataagccaggtttgatttttctcttttggttgattgattcattaatcttgcaattggtgttttggtttgatgatgattttttcgttgcttaagggaattttgctttgtatcttcattgagtctttgaaagtttatgtgttgattggaatgattctgcatttgtgtattttggcttgtatctgtgattctttgaaaccttattgttggtggttcatcgcctaattggttttagtttactcttcaggacaatgtctataaggtgtagttagggagcttgctttggttagttgttactcattgaggagtctttgaatgtgtggattggaactattctgcatttgattaagtctttggtttggtttcttgtagaatcaggttatttgtgttttctatgaatcgaaaattgaaacaaagtggtttcttgatagaaacaggtttgttgtgttttatatggattgcaaatcgaaataaggttttcggtatgtataggtttgatgatctgtttggttggattcaaatttgttaccttcttagagggaacattgtattgatcgaaattaatgtgtatagatgttcgtcattgaggagtctctgaaacttaatgtgtagatcgaaattattctgcatttgtgtgtctggcttgaaccttctcattaatgccagtttatcggctaattggtttttgtttgcttcttcaggacaatatttatatgacgtagttggaagtccgtactatgttgcaccagaggtgctaaagaaatgttatggacctgaaatagatgtgtggagtgctggtgttatcctctacattttactcagcggtgttcctcccttctgggcaggttagtctactaaaaaagtagagtcttttctatttacaagtttcgagtttttgtttgaatgatgtattcttttctcttgggcattgcagagactgagtctggaatctttagacagatattgcaagggaagttagatttcaaatctgacccgtggcctactatctcagaagctgctaaagatttgatctataaaatgctcgaaaggagccccaagaaacgcatttctgctcatgaagccttgtgtatgttcattctttgttgttcatttggaattagcaactgttgtgaattgtttttatggtaaataatgagtattgagtttgctctgaatgttatataggtcacccatggattgtcgatgaacaagcagcaccagacaagcctcttgatccagcagtcttatctcgtctaaagcagttttctcaaatgaataagattaagaaaatggcattacgggtatgaattcgagtaatatacattcgctttttctttatgtccaatccgtatgctgatttctctgaacacaggtaattgctgagagactttcagaggaagaaattggaggtctgaaggaattgttcaagatgatagacacagacaacagcggaacgattacttttgaagagctcaaagcgggtttgaagagagtcggatctgaactgatggaatcagaaatcaagtctctcatggatgcggtatgaaagaaccaaaacaaactctttcctcttttcaaaaacttttgtttccgtttaacatcctctgtgtgttgtggtcacaggctgatatcgacaacagtggtacaatagactacggagaattcctagcagcaaccttacacatgaacaagatggagagagaggagaatctggtggctgcattttcgtactttgacaaagacggaagcggttatatcaccatcgatgagcttcagtcagcttgcacagagtttggtctatgtgatacacctctggacgacatgatcaaggagattgatcttgacaatgtaaaccactcttcttcttcttctctttgtttacctccttcttcaatgttactttactataaccgagagcttttgaattatgtaggacgggaagatcgatttctcggagtttacagcaatgatgaggaaaggagatggagttgggagaagcagaaccatgatgaagaacttgaacttcaacattgctgatgcttttggagttgatggtgaaaaatctgatgactgactcatcattcttccacaatttctgttttttttctctttaatttcgtttatattttgaattctaatttctaaggatacaaaaatatattctggcttgttttttgctttcctttttatttttgtacatgagcaactttctaaatttttatcctcatatggataatttttgcttcatataaaagtttttgaattccaaagaaatgtgatttagggatggcgaaaagaaaccgaaccgaaccaaaatcggatttcataagtaattttcttataatacaaactgtgaaactgtagaaaattcttataacaacccaaaccaaatctaaattcttataacaacccagaccaaatctcaaattgaaaccaaatttggtgaatttgtaattaaccaatattcagaattaatataactaattaaatataaagtacatttaaatacactaaacactataaagagattaagagtagttagaattataatttttgtcaaaaatcgaacaaaaccaaaattgatgtgtatataatatattacttaattggaaaacccaaaatctgaaccgaaataaaccggtaaaccgaaattgcaagcttagaaattaaaccaatttgaagacaggggtacaatggtaattttcaaaggaagtggataggataacactgcggatttattctccgtcgagctccaaagtctcgagcttagagctctctctcagtcgaaaacaatggcgtcttcttcagcgacgctctctctctgctctactttctctgctcattgcaatgtcaattctcgccgttctagcactatcctctgttctctctctaaaccttcgcttaatttggctaaacctctgactggatttctttctccttccactgcgtcgacgtctcgaaccgcattcaccgtcgctccgaaattcgcggaatcagtcgtcgaagctgaaccggagactaccgatatcgaagctgtggtggtttccgatgtttcggaggttactgaggaaaaagctaaacgagaagagattttcgctgttattatggtgagcttgttgaatcatacgaaacaacaaattctcaatttcggtgtttagcttttggaattcggaattaggtttggttgattgatgaatttgattttagagttttgataatgagagactgtgtttttgtggtatctactcttaagatttagggtttaggtttaacgaatgttgacttcttaagggagagattgtgtttttgtggcatatactcttcaaggtttagagtttggctttgttataattgattttgtttctctcatttgcaatctctgatttagcttagtgttgttctctttggtttgaataggttggtggacgccaatacatagtgtttccagggagatatctctacactcagaggctaaaagatgcaaatgttgatgaccaggtatatgcacatttgctttcaatgactatgtgatgtgttcttctttgtaaaaaactctgtgtacgaaatggtatatctgtgaaaagatgatgtaactatggaagattgagtaaactttgtggcttgtgtagaagttctattcttttgcctatgttaacattgtgttaagctgttctctgttgcatttttggtgattcctgaagttttcatattttgttttttctcttgtgcagattgttctcaacaaagtgttgcttgttggaacaaagacacacacttacattggcaagccggttgtgaccaatgccactgtacatgctgttgtggaaagtcaagtaagtcaatacaaacgatttcttaaatttctgattggtggttttgtattttcgactatgtagtcgcctctaaacttggaataaccggaatgtcatttgttgttgtagggtttgaatgataaagtggtagtcttcaagtacaagcctaagaagaagtaccgtagaaatatcggtcacagacaggtattgctgaaagtcctcttccttatatttgaactatgtaatgttacaatcaacagactactatcagttacttgttgtaatttgctatggctgatgaaactgaaatctctttgaagtaatgacacttatgttgtgacttatgtgttgatattgtagccgaatacgaggattaggattaccggaatcacagggtatgaagagtatccagcctcgcccaatgttgcagttggagaagtaaatctttgacacaaaatgtttcttgaatgttaaaatttttctgatcttctctatgtaattttgtaaggaccctggtcatttcatttctgctgagattccttttattaatatgtaccttttgccattctttgatcacaaattctaagttagtgtatgaaaacttcaatatagctcatccatcaatctacgcatactaatgaattttatagaataaaacaacttctaccacttcagtggacacaatacagaaatacagaaattgatattgagattttgaaaatggacgggaccgtccataacatttttccgtccgcaaaggcacaaacacatgaaagacattatggtgttttttgatatgtttttgacaaaattttgatatgttgttgcgattttctagtaaaagacattatgtgcaccaatagtgtgagatgtattatggtgattttctgatgaggaattgagaaatgagttttttttattatatatatgcaaaagatagattgtctccgattattagtttggttgtatacatgttgggttgtaacttttcacttcagtggcacaacatgtgaaggctatatacatgttgggttgtaattttttgctttcttactcttgtggttgattaggtccgagtttggtttactagttttgcaaacctttttttttttaagtttggtgcaacaaaaccctttaccaaaaatatataggttaagataatttataaataactaaataatgactacttgactattaaaaatatatgctttaaaatagagtaaaatatatattcatttagtttatgagattccagtttactttctaacttaaatttcagagatttcataatattttcgatatttttcttgtccttttaaatataatattagtcttcaaaataatgttattatatagactaggtttaaaatctgagaaatgattattaaatagtaaaataaataaacagcttaattttattaacagaaccttttttatcagccagttggcaaatgaaaatatgaaaaaatttccatgctggctactatttttaattaatttttacagaaatttatttaaatttctttaaaagcaactaaatgctaaatttatctattactaactagatattgacccgcggtataccacgggttgattatttacgttagaaattatattatttttttaattctatatcatctatatttaaataatcaagttatattttgaatttatcatcttactttttatatctatttatttttgatattatatttgtatttgtttggtttaatcttgtttaattaagaaaatctgtttattataagcacattatatcgggagtgtatttttatggtgcgttattacgtgtttgttatataatatttttttttgttaaaatgaacgtatttggcttaaaatagttttcttaactaatatatacatgtttttttatggtgcgttattacgtgcgttcttaactaatatagatgatattaaattaaaaaagtaatttaatttcaaatggtttttatcatacaaaaaaaatttttttctagatttcaaatattattaatattacaaaaattttatagaatctaaatattatagataccaacttattaagaggttcactgcgggttgattcttttccatttattttataatttataaatttatgattttgtaaactataatgtatatgatatttaataagatgtagctctaatagtattattcgccatttactatataactaaatatttatatgaataagattaatgttattaagttactatcataaagttcaaaattaagtaaatttaactaaattgtaagataacttaaagagcgtgcaaacaaaaaatgtggtataggatttaacccttggtgtaaaacaaaatgaaatttgaaaactaaataaaattataaactaaaattaaaaaaatatttttttgggagaatctagaaataagaaagttatttgggagatttggatatagaggatctttttttttcaatttcccttaatcataaactaaaataaaataaattacaaaattatagtttttttcttcgttttttgtgccaaaacatctaaatagaaaagattctttacatccaaaagaaacgttaattttttttttctagacaaatatagaaaaaaaaaagaagaagaaaggttttgtttctctttctttccgtcgatggttgcgcaagtaatcttctctctgcgttcacgtcggtgtttctcttttttttcagcgttcacgtcggcttaaaaagttgcaatacctaaaagttcaaagaagagggcaacatctccatcttttcccatattgcatccagaatgatgggaaagaatctaacttttaggcataaggtaaaccttttccaaggaattcaagtaatcaacagctctttctctgttcaccaccatgaaagtatgttcatcgatttcaatattagacaaacccttaaaatcaaaatcaaaatcaaaaacaaaaatcaataaaccaaaatagaggataaaaattctgtaatcgccaaagctcatcctcagtaatcgcatctctaacaacacgcttatctctcgatcagtcttagcaccagaaagcatcgtcaaagctccattagaagtgattaacgaacctttctcatactcaatagcttgctcataaagctctacaaacaacaaaatcacaaactcaatctattaaattcgtcacacaagcactgataaatattctgtatagcaaaacatctctagagctatacataagaaataccttgctatataaaaattctgagagatcatttagactgaggcaaattgtggttgtggtaattgttcgatatgagatggttatttatagtggatcatttagacgttagaatgttctagatattttagtttaggtaatattctaatattcgaatatcttgagaatatatgcttgttattagtttacaaatctaaacaaaaataatacgcaagtgttaatgtggttaccttttttgtagggaaattttgccaaaagatatattaacaacgattaacgaaaattaagaaaacattgaactcaaaatttgaaaaaatataaattagctatggaagatgctaaagattaccatttttgtaggaaagaaatcgatcacatttatgtttattgttagcattcgaattattttatttttggcagtaaatctttaatgccataactaaaaaccattagaatttgatttttccttattagcattaaattaaaaacgtgaatcaaattaatttattgttattaaatattgatttgttagaacaatatatcaatttattgagtttttttagatatggcattaaaatattattacagtttttttctaaaattcaaatagaaaaccatttgatttgaaaatagttgtttgttataactacatatacgatttatatattttcaaatcaaaaacaaaatattgtttaaatatttttaggaataaagccaattaagaacgaaaatacagatttctttagtatattgtgtgtttatttgaggtaacaaaaattagattttgtattgcaattgataaaagaagaataaattttggtaagatatcattagcatttaaaacaaaaattatttttgaatcaagtaattgtagatatggttagttatgattgatttccatattttgctaattaggaaattagcattaatgaatttcgtagagttttagggattgatttgtgcaatttacgagggtagtagttaacaatatctatgtttaggcaagtagttagtacaatatcttaattgtttatcaaaaatttggtcattgtcctaaagaaaatatcttgtctgattgattttgtagggactaaacatataatatcgaaattaaaaaagaatttttcgacacaaatcgtccccaaaaatatatatgtagatgattattttaaaattattattgtttatcagtgaaagacttctttttaagcatgtagctaagatttaaaagtccatactgttcacgttgtttaactgctgaggagacaatatgccacgttctgttcacctgtcctttcgcaagcatgacatggagactcacgaatcttccccaactaactggacatctctttacacaagatgtggaagagaatatttccttttttgttggatgcctgtcttaacaatagtttcagcgaacaacaaaaaatgactccgttttggcttatttggagactttggaaggcaaggaacaattccgtgttcaaaaaatacagtgaatgcccgtcgatggtcatttcccaatcaattgcaaatgtaaatgagtagatatttaacatgaatgcgcagcaaggaacctctttccaacaagtgtatcgccgaccatcacgacatggacaaaaccaacggctccttttgtgaaatgtaactttgatgcaggttttcatattaatcactctctgagcacaggaggatggataatacgagaccaccaaggtagcgcacatgcatggggctcatcaattgtggatcatgtcaacactccttcagaagccgagaccaaagctcttctagtggcgatgcaacaaggttggactaaaggctataagatgatccagttcgaaggagattgtgaggttctcatcaatacaaataatggcaaaacttctcgaagtgaaatcgctagtttactacaggatatagactactgatcatcaaagttctcatctgttgtctttagattcatcaaacgccattataataaagtagctcattatctagcttcctcagagttcacgaactcaatatttcaagctgatacaagaaaccagccaccatggcttgcaaacttgctttgtaaaaatttacactcataaataaaattcagttgcagttaaaaaaaaaaaaaaagcagagatatcatcaataaaatcatatatatatgaaagttggccaactaaatatttttttttttttatacaaaacttagtgataaaaaattaaaatttcacattgcattgaatcatccgtcaatctcactcttaattaaatatctttatttaaaagaaaaaatataaaaaaatcttgttaatgtatcaaacactactttcattttacttttcttattttgctatttttttaatagtctttacttgataacggttagaaattttcgtgtattgcaacttatctgtttgctacttaacctttcttagtttagtaattttaagttagtcgtttcttattattacattttttggtctacgtgatatgttttttagttttatgataaattggtaacattaataatgacatgcatgtttttttaagtaatggtcttttgaaacgttagatataccaaaaaaattaatatatgtcactctctccaatatggctatatgcaaatgcaaagagaaaaacctaaaagactatttgatttttgcattctttttttctctttcatgtgaaaccttttaaagcaaatgaatagttagttataaatttgttatttaaattatgtcaatccaatatttagccatgagtctgcatgatgtgattggaatactagattaggagagaatacatggaataagaaattgttcgcttagaatcaagttacgcaactttcaaaccaaataagtaacaaaattggataccattgtatcctatattgttgatgtaagtatttcatgatagttaaaaaagattagaatcttggatatatagataagaagatttatacatgaaaaaatataattgatatttgaatcaaaaaggaatctaacatacaaatataattatataatgaatataactttattaactacacaataacatatgcgaaaataatataaattagctataaaaataattaaacataattattttaaaataattttcaaaataacaagccacgcgtagcgtgggtactcacctaatatattattaatagtgataacaataataatgaagacatttattagttatattttctgaaactatataaggtccgagatccgttcatttgatttcaatacaattcattctaacgacatattccaagtaagcgattaattttcatatatttttaatagttattttttttcctttaaatttaacaacaccatcatactaacaccaatcatcttgttgttccatttcatgcatagggaattagtttggtgagtaattgcaagaaaatgtcggtgaaggctaaagcgatgcggcgaattgagacggaattcaaggccatgtcctccaaagcctctttgtacagtattggttagtacttctttgttttcttttcttttatgcattatcaaatattgatagtattcacatttctaaatttaacgattttgtttttgtcatactttagaaacttgattatctagtgtatgatgtgctaaaaataaaaaataaaagagaagtatcacaataggtaaagacgacgactcaaacaatgtattcaaatgaaaaacaatgattcaaggtcccaacggtactccctacgccagtggtatatttcgcctcgacattgagtttcctgaagattatccttttaaaccacccaaggtttgttacctactacaaatttgaaaggttaattttgttgtttacaatataaatacgttttatgacttattttttaacagtacattcaaaactccgatttaccattcaaatatcaagtccagcggatcgatttgcattgacattcttaaagacaagtggactccttctctcactgttgaaaaggttcaaaaaattgattcataaatcaaatattttgttttatgttgtttattttgttctttctcattctattaaaaggattttcattcttgttaattaagagttaataaataaatcacatgtgcttttatccataactgtattattggcggatccaaacccaaatgatcctcttgtacctgaaattggacaacttttcaagaataacagattccagtttgattagagagctcgggaattcaccgagcgacatgcttgtttttgaaatttgtcatatcttttaattaatcatcatctccatccggatatatgttattgtagagttcttatatattgtaaataaaagtcatattctttgttctcctagaaatgaattataaatatttgaaccaaaacgtgaactgaatttgccatgcaaagcaaaacattgaatacaatgaagtatttgtcttcttccgtcttaaattaagtaatgtttttatagttttgtgtttgtttcacaaaaaaatattttaaacacaacaaatgttataagagataacttattatatattatgagtaaataaatctacaacgaaacatactataaagtatcaaaccattaccataagttttttgttggacttctaaatatgcttaacatttggatagctaattttttaattgatccgtctttctaacaaaaagcgtcattagttaaaacgaaaattctattttggtcaaacggatacaaagttctaattttcaacactctttccaataatatcaaagttaagaagatttttttttcaaaaaaaaatctattttagataacactagaatttcagtatgaagtatttttaaaattttaatcgaatagcagcaagactttaaaaaaatttaaggcatgatttacaaatatcataacactagattttaatgtataatttataatacataattgaataatatcggattgggcataaatttaaattttattacatgattgaatagtacccctaattaaacaccattatcattttaccaataaaattaataacttacaaactttgagctattaaaatcctaaaatgctgtttacaagaaaaaaaaaaaaaaaaatcctaaaatgctagactattagcatgttcgtttggtcaccgcagcttgttgcggcagcggtagacgcaattgagcatgttcgttttggtgacgcaagtagctgcggcaaacgcaacatcttgcggctaaaaattttagacgctaattaaagtcagcgtcaaacgattaaaatctgcgttatatctggtaaataacataaatactcttactatgtttgagaaactaccaacaaacctaacctatttcttcttcttcttcagcgattcaatttcttcgtcgtcttgatcaaacctaagctcttgaaaccaatctcttcgccgtctcgatctccagattcaatttccagtgacttgagctcaattaaaactcccttcagttgttacttctgacgaatttgattctctactctgaggtacttttcgttattcactaacttaaatttcttgagaatttgagaatttttttttgatatgtgttctctcagctagtttagctactctctacttggtgggttttttctaaacttcatttgttctctattggccatcggagttatttcgatttagatttgcattgcccttaagtaaatcagaatttgttctcttctcagtttttgttttagctttgatttagatgcaatggattggtttctaaagagtttttgtacaatgagtgtctttagctttgattttgatgcaatggattggtttctaaagagttatatattaaagactaaatcattctcattgttgtgtaacagagggaagttctcatgcttgatgctttgtttgccggcttatactagagcataaagaccctcctttcaaagagaagtctacttgcatttgtctctgttgctctcttctttggttatccttctcttgcttttaaggtaccctttcatcaatcttgtggactggtttacttcattgttcataaatagatgaaatgtgtttgcttttaacatcaatgaatcattattctgtccactttaaactagagttaacaaaatctttgtgttctctttattggtctagaattggtttactttagcatttacttgcatatcattgatgtctcaaagtcaataaaatcattacttgcatatcactgattgctaatcaatgtatatgattcacgtatatgtctcaaagtcaataaaatcatgtctcaaagaatatgattcacgtattctcttgtagcatttacttgttgtatctttaatatgattcttcgttgttgttgttgttgaatgaatttaggcaagaattggaaggagcttattgatgtataagactctgttttaaacacttacttatctttgttaaggctctgttttaaacacttatttatctttgttaagggtctgttttaaggagcttattgatgtataagactatgttttaaaaatgttatggatgtaactatatttaaattacatttctttgattcaaaatataattatacaaatttataaaaataaaataagaattc

SEQ ID NO: 74 - DNA, 104308 bp, Arabidopsis thaliana
gaattcaattaattattaattctagaagaaatttttttttaaacatgtacctctatataaacaaacatgtaatcttttattgtttcaacaaacaaaaaaatatattcacaatcactatcttggcttcagctacgttctcttggtacataaagcttgttttctctaaggctaaatatgtagtatatgttgaagaaacagagtgtctgaagttctacaggcatgtctgaaacaacacagagcagaacagatgaacagaggaagcgggaaagtagcagttgcttttgccagcgtggcatgttgattggagtgaaggaaaggcgtatcactttagacaaaggagacgaagtcgtcagacataggacgtgtgcctagtgttaagataatgatgaggagctacacttgaacatgcttgataaagtggagcatcctgccttttccgagaaactacataagagaagttttggtctattattagggttagccactttacttgagaaaagtggaagagaagaaaagttaagtagaacttgttcttgtgggtttcattggtgagtgaacaaagagagcacaaggctgttgctgtgtttgtgagctgggtagttttaagttctgacagaagcaaatcaggttgttgatgttgcataacactgtccaaacttatctatgattgatcagtttgaaagttattctaataaagtgtgtttattggagttgtggtctttatcttgtcaaagtacttagggttcttttacttcaattggtattagagcgggtaaccaatctgagattagtatatctgaacaggttagatcctagttatggaaccaacagatgttagtactggtacatgcaaggtattactgctagatactaagcggtatggatattggaaagttcgtatgacacaaatcattagaggccaaggtgaagatgcttggactgctgtagaggaaggttgggaacctccgttcgatctaacagaagatgggttcaaaatcactaaaccgaaggcaaactggactgcagaagagaaacttcaatcaaagtttaatgcaagggctatgaatgctattgtcaatggtattgatgaagacgagtttaagcttattcaagggtgcaagtcagcgaaacaagcatgggatacattacagaaatctcatgagggaacttcgagtgtaaagagaacaagactggatcacattgctactcagtttgagtatctcaagatggaaccatatgaaacaattgtgaagttcagttcaaagataagtgctcttgcgaatgaggctgaagttttgggaaagacctacaaagatcaaaaattggttaagaaactgttacggtgtctgccaccgaagtttcctgcccacaaagcagttatgagggttgccgggaatactgataaaatatcatttgttgatcttgtgggaatgctcaagtcagaagaaatggaacctgatcaagacaaagtcaaaccgtcgaagaatattgcatttaatgcagatcaaggctctgagcagtttcagcagattaaggatggaatggcactgctagctaggaattttgggaaagctctgaaacgtgtagaaagaggtcagaatcgtgacagtacgtcctggagcaataaagatggagagacatcacgtggaagattctccagatctgagaatgatgacttaggaaagaagaaggaaattcaatgctatgagtgtggtggttttggtcacattaaaccggagtgtccagtcaccaagagaaagaaatgaaatgtcttgaatgcaaaggtgtgggtcacactaagtttgaatgtcctaacaagagcaaacttaaagagaaatctcttataactttcagtgatccagagtctgatgatgaaggtgaagagctgttaaacttcgtggcgtttatggcaagttctgattcaagcaaggttatgagtgacacggattctgactgtgatcaggaagtgaaccccaaggatgaatacagagtgctatatgacagctggatgcaactaagtaaggacaagctatagttggtaaaggaaaagctaaccctagaagcaaaacttgctaatgtgagcacagaggataagcagaaactgagtggaatcactgttgatgaaaattcacaggactactatcaaaagaaatttgactggcttcaggaagagtgtcacatggaaagagatagagctaaacttctggaaagagagttgaatgacaaacacaaacagatcaggatgctcaacaaagggtcagaaagtctagacaagatcttggcaatgggcagaactgattctcaaccaaggggtttgggttatcaaggttatacaggaaagatcaacaaggaagaaggaagagtcatcaactttgtcagtggtggttcaacaagtgaaactgtggtgagacaaagctatactgaaccgaagaaacaagtgaagtcacatgtcgaaacaaaaggagaatgttttgtgagaacaaggatggtgggtgtgatttgatgcgatcattgtggtaagagatttcatatgagagaatagtgttacaaattcaaagagaaactcagaacactgtggaatttagcaaagtgctacattgagccatcaagattctgcactgtgtagattaagaagaaagatctgtatggtgatatggaagctgaaaggtacaattacaagttagaaagaatgtatgaagaagaggaaatgcattacgccagtgtctacaatcaggtcaacaaagaaatgcaagacgaggcaaatcttgtttgcaactggaatctttctgagttggatgactgcactccacaagccaaagtggcttatacttcagttgtttctcaaaacaacagagcgtggtattttgacagtgggtgttctcgtcatatgaccggtgtacaatctattctaaaagacttttctgtcatcaacaatgggaaggtcacttttggagatggtggaaaaggaagcattaaaggaaaagggaagattgagatagatgatcaaccgcatctgtcaaatgtgtactttgttgagggactcactgctaatctaataagcataagtcaactgtgtgatgatgacttaactgttacgtttacaaagactggatgtgttgcactcgatattgctggcaacaatgttctatcaggagtttgttcaggcaacaactgctacatgtggaaagactctgaagtctgtttgtctgcaatcacatccaagcttgatctgtggcatcaacgacttagacacatgaatactcaaagcttggttaagattgtaaatgctgatgttgtcagaggaattccaaaacttgaaggcagtacaagtgttgtctgcaaaacttgcagccaaggcaaacaagttaaagtgcaacaaaagagggccacgcatattggaactactagtgttcttgaattggtgcacatggatcttatggggccagttcagacagaaagcttgagtggtaagaagtatattttggttctggttgatgactactctcggttcacatgggtgagatttctaagagaaaaatttgaggcagctgaaagtttcaagattctagctttacaacttcagactgagaaagggaatcttgttcaaatcagaagtgatcatggtggagagtttcaaaatgaagaatttgagaaattctgcagaattcaaggaatcagacatcaattctctgcacctagaacaccacaacagagtggtgtcgttgagagaaagaacagaactttacaagaaatggctagagctatgattcatggaaacaatgtgtcaccaagattctaggctgaagctgtcaacactgcttgctacatcgtgaatagggtgtacgtaagacctggtacaagcacaactccgtatgagatatggaagggaaggtcaccaaatctgtgctacttccatacttttggttgtgtgtgctatgttctgaacgataaggatcatcttggaaagtttgatgcaagaaagtgatgaagggatatttctgggttatgccacaaacagtatggcgtacagagtctacaataagagattgaagagagttgaagaatcagttaatgtttttttttatgacaagcatcctacaagactcttcacggtggaacaagatgatgatgagcaagtagaggaaataagacattcaacatctcttgttgaatctggaacttcaaaagatgttgaacagactactgaaccacgtacatcatcatctcgcctcacagttcctaaaagtcactcagaaactgacgttattggagagttggatggagacagagttaccagggggataaagatgaactacagagatatgattctgtttacctgttttgtgtcaagcattgagcctaaaaacattgaaattgccttagaagatgaattctggtaccaagcttgccatgaagaacttaatcatttcagtcgtcatgaagtatgggatttagttccaagacaggttcatgtcaatgtggttggtactaaatggatttttaagaataaaactgatgaagaaggcaatgtgacacgtaacagagctcgactggttgctcagggatactctcaggttgaaggaattgattttgatgagacttttgctccagtagctcggctggaatctattcgtcttcttcttggaatatcgtgcttgctgaaaatcaaactatttcagatggatgtcaagagtgcttttctgaatggagttattcaagaagaagtgtttgtgtctcaacttaaaggctttgaagattcaaaccttccagatcatgtgtacaagcttaaaaaggctctttatgggttgaagcaagcacccatggcttggtatgagcatctcactctgttcctaatagaaaaaagtttcaaacgtggaagtgtggacaagactttgttcatccttgttgatgaaaaggacatcctcattgtgcaaatttatgtggatgatattgtgttttgaagcacaaaacagaaacttgtctctgactttgtggaatccatgaccaaagagtttgagatgagcatggttggagagatgaaccacttcctgggtctacagattaaacagactgatgaaggagttcatatctctcagtctatgtatgcccaagggttgattcagagatttgggatgcagacagctaagacctcaaaaactcctatgagtgctactgctaaactgtctgcggatgaagctggtctaagtgttgatgagaagatgtatcgtggaatgattgggagtcttctgtacttaacagcaagtagaccagatctgtgtttcagtgtgggtgtgtgtgcccgttatcaggctaatccaaagcagtctcatctgaatgctatgaaatggattctcaaatatgttaaaggtacaaccgatgttggtctgttttactctaaacaaactaatcaaaatcttgttggattctgtgatgctgattgggcaggaaacctggatgatcgaagaagcacaacaggagggtgtttctttttgagaaacaacttagtttcatggcacagcaagaaacaaagctgtgtatccttgtccactgcagaagctgagtacattgcactggggagctgctgtactcagttgctatggatgaaacagatgcttctggattacggtatgacttctaacaccctgcttgtgtactgtgataatatgagtgcaattaacatatcaaagaatcctgtgcaacactctcgaacaaagcatattgacatcagacaccatttcattcgtgagcttgttgaaaacaagattgttgagatctctcatgtttcctctgaaaaacagttagctgatatatttacaaaatcattagatttgaacagtttcttgaatctgtgaatactagtgtgtctttgtgttaaagctattgcaataggttcctttgtacagagttgcattagctttttgttttcatcaatatgtatatatatttattgtgtctgtctttttggcacttcatttcaggaaaatagctgcttttcatgctcttcctcaatgaagtttccaaaaaggatgtgtctgtggtgtgtaataataataaaaaaaaaggcaaaaagaaaaaaaaaaaggcctgaaggaatgaacaaatgaaagttaaaaaaaaaaaaaaaacaaaggttgtgtgttggcaggaaagggattggtattctttcttctcttggggtatatatgtatctatgagtaccccctcaaaacattgttcttcattacaggctctaccaatccccctcgccgtgttacccacacacatcatgaggttgcttctttggagagtatgacgagtgtagactatcctgtcttgatcagtgtgtatggttcatcttactgggccaggaagctgctattttctccatactaaaaataagctatgcacctctgtactttggaatctgtccttctcgcttgaatgcatttcgcatgtgggttccttgcctagtaggagtctctttaagctatatagtatatatgtctatatcttaagattatgctacgttttatcattcagaggatgatttgatgagatctcacattcagtttgaatcacagttcttgaatgacagtggctgttaatttcaagtgttgatttggttgaatttgtggttctatatggtttagtcctaccttatgttgcaatcatattatgtacatatgttggttgtctactacgtctctgggtttctgttgtgatttgtttttgggcctggtataaggccctgtctgttgtttaacggatctggtttagtgtattgcagcctgtcttggttttcgtgctgttttagggtttcccttgatgcgctcgtgcctcttaaacctagcagctctcacagaaggctcattctccttctctgctactcaaacctcaaaattcaaagggtttctttctctaaaaacacaagtcactatcaatcaagaagcgacctcgttaactggagtctctggtgctggtcagccttccgctgcgactccttctgaccctccaccgcctccggttgctccaatgttcattcccaagactgaaccaggcatctgcatgtctaagaaaaccaagtccaaggtctctactttgactcagcgcaagagacagtgtacggctgcatctgccaagtttagatctaaagcgcgtgctcctgctctccgacatctgtcaagcaggaaatccaaccgatctgcctctcctgctggataatctgaagaacttgtccgtgactcttcagatctgcaagatggtgatgtcaccgagattgctccgcctctctttctttcttgttaccgagagaaccgtcggcttcttgctgttcgtgatcgtaagtatccggagctcaaattcccatcggagactccctacagtagctgttttctgactgaggaaggtcttgggcgctacaaggtcatcgggaatcgctgcttcaacgacatgcgtttccttcctctggatggaaacaacactgcgagtactcagcaacttctcttcaatggtggtttgcttcctactgtcaccgaaattgactcttatgtgcatgaggttgtcatggagttctatgcaaaccttcccgatggtgaagaaggtgataatcttgcctactcagttttcgtcagacgaaacatgtatgaattctccctggctatcatcaaccaaatgtttcagctccctaatccttcctatccgctggatggtatgtctgagattcaagttcctgagtccatggatgaagttgcgattgctctgtcaaacggcaaagccaactcctggaagatgctcacttctcggttgttatctcctgagctagctctgctcaacaagatctgctgtcacaattggagtcccactgtgaaccgctctgttctgaagccggagaggatgactctgctttacatggtggccaaagctctaccgttcaacttcggcaaactcatctttgatgaaaatttgggcgtattcgaatgtagttgcgaacccctcctctactctttgtcttgtccttccgaacctgattgatcaaatgctgcgctttcagcgcattgtccgctctgatgaaggagataccacttcgtctgcaccgttgaagttcaccatggaagtgaaacctgttcctttgctacagtctgacagtccaaccttggatgcagctctggagaccctcattgcatctctcacaacgatgcatgttcgtctagcaggtaagcctctctcactcaacttacactctgttttcttttgagaatggttttttatatgagtgtgcactcaagcagggggagagtattctgatgtgtcgtactctgttccggatgatgtgggagatgaggatgtggaggaagaggacgatgatgatgagttagatgacaacacttaattgcttagtcctggtcattttttttttagttgggcattgtgttagggggagtttgtcactgattgtttttgtgtgtttgtgaaaactccctgatcttgttctttatcggcttcttatcggatcttctgtgtgtttaatgattagtcttatgtatagaaccaagaactcatttctgtttcatgtttaaatggttatgtcttttggcagtagttgcttaaacttgagcctttggtttctatgtttggtatggaatattgcttggcttgtattgtggtctctactcttttgcagattacttgaggtgtcacactcaaataaaaagggggagattgaagaaacagagtgtctgaagttctacaggcgtgtctgaaacaacacagagcagaacagaggaacagaggaagcgggaaagtagcagttgcttttgccagcgtggcatgttgattggagtgaaggaaaggcgtatcgctttagacaaaggagacgaagtcgtcagacataggacgtgtgcctagtgtcaagataatgatgaggagctacacttgaacctgatggataaagtagagcatcctgccttttccgagaaactacataagagaagttttggtctcttattagggttagccactttacttgagaaaagtggaagagaagaaaagttaaatagaacttgttcttgtggtttcattggtgagtgaacaaagagagcacacggctgttgctgtgtttgtgagctgggtagttttaggttttgacaagagcaaatcaggttgttgatgttgcataacactgtccaaacttatctgtgattgatcagtttgaaagttgttctaataaagtgtgtttattggagttgtgatctttatcttgtcaaagtacttaggattcttttacttcatatgttagatataatattttgcttaattgaatatattttacaatgttcataagctataagatcattatatgatgcatacgttttatccaaccatatcttcacgtaaccaacttcttctcaattaccttaactgttcacatgtttatatatctaagcccatatttttaggtgttatacatatatatatttatttactttttgaggattctggaaaattgaaagatatgatacaacagttatacgatatatatattgaatttaaaactttaataattataattttaataatttgaatagacactgtaaatatagttttagtcggacaaaccttactcaacattcaatactaatcatataccaaaacataattgttttatctaatttagagaaaagaaacatgaagctatttattatcattgtggtgaccagtttaaccatctcaaaggtatttgacaaaacacttgtcaccattgaagcaagaaatttgaggaagatggaccgtcatgagcatttcaatgctaatgaagatttcgtggaagcaaaaatgttaaagaaaattgacaataaaaataatctaaataatagatgtataaatgattttgcgcctactaatccaggacataattctggtattgggcatccaaaagttataaacaacaaatttacaaaagattttgcgcctactaatccaggacatagtcctggtattgggcatctaagagttgtaaacaacaaatttacaaatgattttgcgcctactaatccaggaaatagtcccggtattaggcatccatgagttatgaatgtttaaggattgtaaatcttattatataaatcttaaagaaataaaataaaactaacaaaaaaacaaatttatatgtctatatctcaaatgtttttaacttttttttctgaactaaaagaaaaattaacaaatttgtttttatatgtgttattggtcaaataaattaggatgtatttatatttatttgaagaaaaaattagcatgtattaatttttttaaagtcatttaatttatgtgtacaaaatattattttacggttttggtgggaaaacgttggcttacagttgttgcgggaaaacgtgatttttaattttggcggaaaatactttttgtgtgattttggcaagaaaacactttttgtgattttagcgggaaaacgtggttttacggttttgtcgagaaaatgttggtttacggttgtggcggaaaaacgtaattttaatatttaaaccaaaaactgaagttaaatagaataatttagttttactaaggatgactaatagaaaaagaaaaataaatagacttaattggataccaatttatttatgtgaaaccttatttaataaatgagtttagttggcttaatccatttaatctcatttaacttgtttttcctaaattaatttaaatgggtcaaaaactcttactcataaccattaattaaataggatttgcatacccaaattaacatcactagtcctagacaaaaaccaaaatagaaaacaatatttttatccatttttacttttgctcatcgaccaaatttgggcctagtttgctacaagctaacaattgaaaagcctcttaagacacatgaaatagtaacgacgtcgtttactcatgaagcgaaagacggcaaacacgaacgggtttacgtagaccgtcaaacgctcctccgtccgacggagaaaaaacgagacggtgaagaagaagaagaagaagaagaagaagaacgactcaaagatctcatcgatcactctctccaagatctattcacgcatcgtcggaagaattttcgcttccgacgacgtttctctcgtctgattttgtctccgaacatcctacctaatcgtattcggtgctggatttgaatccggtgaactgaatctgacaatttcgttcccggaggtgtttaaaaatggccgggatcttgaataaattgcggaatctagatgcatatcctaagatcaatgaagatttttacagccgtacattatccggcggagttatcactctcctctcctccgttgttatgttccttctcttcttctccgagctccgtacgtattaacaacttcgcttccaattttgtgaatctccatatccagtttcgtaattttgaaattctttgattctgttgtttaggtctttatcttcatacagtcaccgagacgaagcttatagtagatacttcaaggggagagacgttacgcatcaacgtaatgttacttaatagtgattttgacttggtttgtgcttatatttgattagagatgtctgataagtttcattgatgatgcagtttgatattacgtttcctgctctagcatgttcgattcttagtgttgatgctatggatattagtggagagcttcatcttgacgtggtatgtttgtaaaattggttactgttatagcttagtgaatcttagtttttgtgtttgagacgttgattaagtttgttaaatgtgtgagttacagaaacatgatatcataaagagaagattagattctaatggcaacactatagaggcaagacaggacggaataggcgctactaaggtttgctctctgccattctattctttggggttttgtagtcattaggctaggattaaactgcaggcaaatggcaaatggcaaatggaatagtagtgtcaagaattaaaagtcgtttgtttttggggtctttaaagtcttatacttttttttttgtgcttgtgtagattgaaaacccactgcagaaacatggtggcaggctgggacataatgagacttactgtggttcttgctatggggctgaagcggtaattgtgttatctctctatttgactttgtggagcatggtttctcaagttcatattcagattactcttgattgtttagtgctagtcaagaggtcataatggaataaacaaaaacagatgtcatagtggattgtttctgtactatatatagttatcattttcaggatagttgatagtgctttttcaatctggctttcatttatttataagctttcatctgaagtatgttttttccccgtgcaggaagagcatgactgctgcaattcgtgtgaggatgttcgtgaagcatatagaaagaaaggttggggggttactaatccagatttgattgaccaggtaaattgctaagaaaaggttcttcgccttttaaattcctggcatcactgtttcaatgcgatagtagcaagttttgtttcatttctttcttcttgtttctttttcttattctttgttagagtctccaaggcttgtgtgcgttttgtttagttagtatgcacttgggaggctcttaactgaactatgcttcaaagagtttccatcttccaactgcgagctgaaatacttttcacttatctgtttgtgattcagtgtaaacgagaaggttttctacaaagagtaaaggatgaagaaggtgaagggtgtaatatatatgggttcttggaggtcaataaggtggctgggaacttccactttgctcctgggaaaagctttcatcagtcgggcgtgcatgttcacgatcttcttgcttttcagaaagacagttttaacgtaagaaatgacttgtcctattgactgcaactcattcgttatgcttctaatcttatatcaattcaatatgttgcgtctccctgcagataagtcacaagatcaatagacttacttatggagactactttcctggcgtcgttaaccctcttgacaagtaaataaccattctggtctattccattcacacactatttattttttcatactctctaacgtacttgaaattgcagagtcgagtggagtcaagacacacctaatgctatgtaccaatactttatcaaggtttgttccaagacaaacactgtatcatatacttcaaattcgtctataaaatacccgcgatgactctattctgctttgtctgctttcaataggttgtaccaacagtatacacagatatcagaggacacacaattcaatcgaatcaggtgaaccaaggcttttaactgttcgacctcattatctattcattctcttccgcgtactatcttaacttaaatgtaaaattggcagttctcagtgaccgaacatgtaaagagctcagaagcaggtcaactgcaatctttacctggagttttcttcttctatgatctctctccaatcaaggtgagtgtatttgtgtgttttaactgcagttttagagcgtatttatagtcataatcctaactaaaatgtgtcgtttccgtaggtaacatttacggaggaacacatatcattcttgcacttcttgacgaatgtttgcgccatagttggaggtatctctctaatctctatataccataacaacacttgttggttaacgcacattaaaatccgaaatgaaacatgtaaaaatgcgcaggtgtcttcacagtgtccgggataatagacgcgtttatataccatggtcaaaaagctatcaagaagaagatggaaattggtaaatttagctaaatcctttaagcctttttggggttttcgtctctctctttttgttttgcggataatacgattcatgctccaaatgtaatatggtgtcatttatttaattctttttgttaagctgactatataaaatatacatattgatacgttacactcttttaatgcaaattgaaggataagtcttgggttgtgtcaatccagctgttgacagcctcatgcgtgcgttacaattatcgtcttttgactttttgtcttttgaagatattatgggttttgaatctgaagttaagtcttgagtctatctttgattgtagtgtatggattcaatgaatggaagaaaaagaagcaaaacagtctccataataaacgcttagagtacagagaatcattattagtattgacgagaaagttgttattagtgaatatattaattccgattgcaatatatgttaggtctcggttaatactcggattcgaagaactgaaccagaacctatccgaaatatcggtttgggtctgttttggatcctctagaacatttgattgggtcttgtcttcatatattttcggtattggttcaaaaaggataatacctgataaattaacgggaactcgaatatatttgaagcctaactaaactcatgatctcctttaacctatattgcctggtttgattgggaacatcgggtttttcttttcgagtagtttggataaatttgagtataaagtaaccaacttgaactgtatccgataattttcaattcacccatatcaactatccgaactgatatgaacccgaaggttaccaaaccaatcccgaacaaaattttaaaatacccaaatagtacctcgattcctagtacgaaaccaaaatccaaatactcgagtcgaacccaaaccggtacccgaatgtgcaagcctaatatatgtgcattctctcattcctttggcttggcaattggtttctatatttgcatggacacttttatcatccaagtcttcctttctcatttgacaacgtttgctcgtaaaaaaaactcactttggttaccattgttaaacacaaaaaaagaaatctaatcttttgtgttaacttaaagacttgataattgttttacttttttttttacttattatctatcactcggtctattctaaagagaaagcatgagaatgtcgtcaacgtaggcactttgtatgaggttatctttataccacgtaaagttcaatcaaggatccttttcttccactcttgtgtttctcttttgacttcttcaaaataggaccaaaatttataatattaagctagaaatttagcaatttaaattttaagttttcactatattgttcccttttagactaatttactttttaatcatttctaagctaagcacaatggtcctgtcgcagaatggaacttcacgattctaatgtgttacaatatattcatagtagtaatactaaccatattcatttcaattaagagaaaagaagaagggtctacatggtacggcatgaacaaaaaagcttgagctgtccataatttacacacttgcattacattcatacaaaatgctaaattacaaattttacgcacagctaataaccctaaagtttaaaagaaaatacaaacaagttaaaatgaataaaaatgaattgaatcctaatttttcacgataaaattgaagcccaatctatctcataagaaggacacttgccgagcatgaaattttcattccatggcatctctggctcttggcacatctcctgcaccataacatccgaagtcggtgaacccgacccatcactttcacccgacccggaatgttgttgtggcgctgacggctgctcagctgaagaagccgcggctttagctcgtttcctcgacgtcctctccgttttgcccggctgattcttcggctcagctaatatggcttctagtttagcgtctacggcagcttgaataggaccatattcgccggtatcagacggagacgagccggtttggtatcggagagctgggaagttaagccgagccgagtcaccacgaagcttaaacgcggcgcgatcataagccaacgcggcttcttcagccgtgtcgaatgttccgagccaaagtcgggttcggttcctgggtaaacggatctccgcgacccattttccccaatgtctttgcctcactcctctatagagcttagccggttttgaaaccgaacccgaactcggacccggttgggtcataaaacccggttggctcggctcaatgaagttaagcatgcaagtgttgttgtcttggtgagtgtaagtgatagtgttttggtaatggaactgagattggtagttttcgggttgttgaagatccgacccgaatgaagatggataggtcatggatccagaataaatatccgggtaagaggttgtggaatgtgaagggaataaagatgcatgaggattatagtaagaagaagaagaaaataggtcgtttggggcagacgcaaacgcatcgtttgaggacgcaaacgcaggatttgaagcagacgtggaagcacttttgtaaaaaggttgaagtgcttccataagctcgccgccgtggccaccaccgaagagatccgccatcggagtttcctgaaatacaaaaaaaaatgtactacaaaaaacaagattatataaaattataattaaaaaatggttgaagaaataaaacctgtctttttagaaaaaattcaaagactggttttttggtttatacagaaataaaagtgatcaacgaggtttgaaataagcaacctccatagatcaaaactaaaataaatttatcaacaaaaaaagaaataaaataagaggatcaaaacttgagggaactaaaaaatgcccatgaagttgatcaactctataaaagaatgaaagaatattaattgacagaaaaaatcataatatttttgatggatatcgttttcttgaaaacacttttcaaatacaattttaaacaaaagtttgtcgttttagatgagttttggcaaaatataaactcataaagcaacacttcataagaaaatcgtgatttgtgttttctcaagaaagacgactgatgaatagacaggacatggaagagtttttttcttttggtttgaagatgaaacgaagcaaagaaagcaagaagagaataaaccctaatttcactcaaattttaatctctcaattttttttttcttctctcactcacactcactctctctcacacacacaaacactctctcttttggaagatgctctcaacctcaccttggtaatacccacccaactctcaccgtttatatagagggcttgttcaatgaagatagattaaaatattgtttgtacatcaataatcctaaaataatgtacttgacttttaaaaaaacgtatttgactttaaaaaaatgtatttgactcccactatataagatacatatttgatccaaatatatataaaaaaagaagtataaaaaataattgaataaaaactgaatataaatgttgtaactagtgaaatgtttcgaagaatagttatgaatcccttgttcaaaaagtcggctgatcggatagagtctaccgcaattttgtccaaatcgaaaagattaatcgttgatctgatttattcatcatagatccgcttaaacctgtctagaggatgcctagtccaaaacttttttttcatttttttttattttttaagataaacatttaaaaatatccaactttttaaatatccaaatttaaaacatcaaacttatgttctaatttgtatgaaaaaatcataaatttgaacttaaaatcttgttttcatgtgtttaatacaattctaaaaacaatgttatataattctcttaattgtaatggaggaatatgttttaaaaatattaaataaccctaaacttaatttccgattaattttcgtataatctctgatttttttgttaggtgatagacctatcctcatcgttcgactagcgcctaacgattttttgagcaaggattatgacaaagtgttttgggtcaaaacccacataaacatttatacggttgaatttgttcttcttggtagcgagtacggacgaactacggagtactgtgggcagagctgttctagacagaagcatatcaaatatgaacttgcggacttgcgtaagcataagtacaacggttattttggaaacaaatcaatacttgaattggttatattgtttgatgataattattgtagagtttgaatattaacattcgcacgacacttggactcgtacgtggagactgaagattccatgcagagcagaagttaaaggtgcatttgttcttagccaaagaaaccaggtcacatgtccttagtgccacaattcgcattttttgccatttttgcggtgtttacgttttttccttctttttgcaacagtcgttgaaaattagttgagaaaaaaagtgttaacatccttctgagatcgattagtacttctactataccattaagttactatgcttatacaaatagatttatcgaaaaacatttaagaccaattgttatgcaagtatattcaatttttattatactccttccgtttcactttaagatgttttagagaaattattttgttttattaagtgatattttcaaatttctacgcaaaaatataaatatatttgaaatgttaagaaaaattattgttataataaaaatgtttgaaatatatacttctaaatgttttgcatttgaattttctccgaacttaaatggatgatgttatgagtaaaatgaaagagtggcttcataaaattaccactaacacacttcattaacaaaaaaacgttttctaaaatagtgttttctcttttcaattcagtaattttgttgaaactaaatttgacaattttagcatcttaataatgctcgaaacctccaaccgtcaacaaataccgttggaacaataacagtgatataattaagtgataatttaatttaatgatgaaataataccttcttcaataagtgatttaagtgataattaagttgcaagatagaagagccacgtgagaacgaaagcatcacgtgatctcaggcgcaatttgctgcaagtgggaaattggactttacgttggcgtcgcctcgaaattaagactcacgcgtgtgattttttgtcccaattaatctctcttttcttttgcttacacaccatttttaacctaaaacatcaataatagtacaattcacaaatcttatatttacggacggttgcggtgctaacttttaaaatcaataatagacatttcaaaagtttcggaccattctaaaccattcaaatcgatgaattttaaaagttcttttttgtaaacatttgcgattatagacagttagcaaaaaagaaaaagaacaaaaaaaagtcatttaaacaacaaataaataaatattatcaaatcatatatatattaatgttcattctcaaaattttaaatactttttcctactaatatcagtgtatcaatcccaactgaagaaagataataaataaaagtagtattgtaataatattgtcaatttggaagatttatgaattagtttgtcatatttctatgaaatttacaaatagagctgtgcttataaaaaagaggcggatgcctcaaaccccaaattttctattgaatattaaggctccaatttcagatatataggtagttcaattggtcaaaactttgtatatttgagtgtctcgttttaagtttgagttcataatgattaattcccaatatttggtcataatatgttttttccttacgtttaagaaataacatcgtttcttttataaatgttcagttttttctatattattattttttatatcatttatataatgtatattatttatatttctgtattctttatcaaattttgaaaattagactatttgtatttaaataaacaattctgtattttatttatgatccagtaaaccattagttttcttttactaaacaaactaaaattgtaaatctctaattctttagaacactataatagattttcatatttttctatttatatttttttccaatgtaaaaatgtttctaaataatttttttaaaaattaggtacgggctcacattttcaaagaagcttgacacgactctaattatgatatatatataattttattattaattatattttatcatcataatataagtttttattatcaagtataacaacggatgtacaactgttaaatgcataaatattatatttattaatcatttttgatttaatagttattgtatccggtagttaactagtcataattttttattaatttaaaccgctaaattaactagtcattcaaaatgcttattaacatttgaaactgcagccacacacttctgcaaactcccacaatcgtagccaaattgtgtttataccaatcaggccattaatatttttatttcttacccctataagctatccctaactattattatgacactactacacctttcatagaagatatcctggattgtgggttgtaatctctaactattatggtaaaagatataccgctgtaacccataaaaatacaataaacaaaaagtggtcaatagcaacattttaaaattccaacatgcaaacggaatggtataatgatcaaaatgtgataggtatgaaaaagaaaaaaaaagtgaagggatgaaaattccttcataaaaaggaaatataaatatgattgtttattaatatttttgtgtcagttttcttctttaaatacatgttcaatattaaaaagttaagaatattctcatgatattataagtatgcgtatattaactcaaaaacaataaaaacaaaaaatcattattgtcttcgaaaaagagtcgttgacctgattcttagagtagaaagtcatttgttaaattgctacatagaattaaggaaacttttctaataagaattaaaaaaattaatgagttgcttttcttaaactcttgctcgaatttatcttcattctttgcctttataatatcgaatctcttatcaagtgccattaactcaacccgtaaagtatctcagacaaagtctagagatcattggtgattcaggtggtatttgggagaaaactgtataaaattgcctggtacagtattcgacttgggaagatgtacggtctcatggcagaacctcttagttgttcaaaagaaaaaatgggaaatttaagatcttcttgaaacactactcatatttcaactctgctcacatctttaaagtgcatttgtagtttggtattattttcttgaatataagtagcaggaagaaattaaaaatgttgataagattagttggaaaagttggggtgaaaggagaattagtgttaattggacatgattcttggaccgtgttggacgggagaccccaacaggccaacaccaatatcaagtttgctattattgtagtatgatataaccagggacttattacagtattaagtgtttctcaagtgatggagatacgatcataagtggcgcctattcattactaaacgcaattagtgactaatattattatattagtataagttatcctctttactttttttccccgggtttggtggtaaattggtgaagaacaaaaacgcgtttttgtatttaattataagtcaaatgtgttatacaacttttatccatcagtaatgaactttaagaactttttttttcactgaccatgtggctccttatgtggtttaacaaatgtttgtttaatcattttgtgaaaaaacaagtaatcatgaaagaaagcaagtaattgactactagacgaatctaaagtaaaagagagataacaaatgcttttagaaaaatggataaagatttggatcaacggaattaaccaaagtaatgcaaggaaaattattcaataaagatataacattatttaaaacacaattgaagaccatagagactaatcctttttcaagactcttatcacattaattggttaatactttgcattagaagtgattgacaaacactaacaatccaataatattatagtcaactactcatgagtaattataacttattggttaagatgtaattactctttatgttttgattgaggcaattcatccaaaaagttatatataaaatatcttctaatccttgtgagattatttattgtgtgtaattatttctacatagaaactatacttttacttggtcacttcaagtttcactgcaaaaaaagtttgttatatcatttattttatatctctttaattgatgcaaatcaattttacatcatttaaaaaaataattctgaaagtgcttatgcaaataattaacatcgaactattatccaccgctgcaaatttattttgtttttttttcatccgtctaaacactcgccgaaaatgtgctaagaactcgtctatcgtctagggaacgcataagagcatcattattggtagtatcttagattagtcttatcatagttcttaggaatatatataaattgattttaaaattttgatgttaagaatttggttaagagatttaaattttggcaatttataatggtaggttcttaacttggagttctttaaaaaaaaatattttaaaataaaattaaatactttaataattattgcaacttataaaatttgaaacatacttgacataaaagtttaaacaaatatgacgtaaacataaacaaaaattattagttaaactattcattcctgtcaaaaaatttccaaatatactcgatcaaattaaatttcaattgttgatgcgcacgtcaatcacgaagtcaagttctagtgtccaacatattttcgagttgatatccgaattcttttagttatatttattataattatacaatgttttgcaaaattaaaccaaattttagtaaaattaaacgatctttattaaaattgaacaattttttagtttttttttctcaaaaactgatctgaaactgatctgaatctgacaccatccgaaccgaaacagaaccgaatagtcatataatccgcacggataataaacttcctcatccgaattatccgaatccaaaataacccgaaccgaatccgatatgaaatctgaatgtccacgcctagatttcgtgttgtgtgaaagagagaaaaagaagaaacaaaagaaaaatgaaacacctaatcataaaatgccacatatccggttctttgattttagtttggcttttatataagagttattcttaacaatataatcaataaaaacattatatttcatatctaattaatctaagatactaccaataaaacgttaatgcgttttagaatattgattgtgttcttaccaaattctttctcaaactctgaaagatagccaaaaaaaaaagtactataatctggtactataatcttagtagttttattagttattgtctatggattaagatgaagagacttcacgataaattattttttcatatatagaatcaatgggtaaatcatttacatacagtataccgtgtatacgatggaaaatacggtaacctattaactattttccttaataatatttacacaaaagacaatcttatacgtataagctgatgtattatgaataataaaaatttatttgaataataaatttttttaatctattctcttggggaaaaacaagaaaaattcaatttaatgggtttgcatttatgaaattcgagtcgagtttgtaagaataaatttggtacgttgaaccttatacaaaactgcataggtttctacgtaagacaatgcatgacagcacgagacattcagtcgaggaatattattattattttttggtcaatcatcgaggaatattatttaaacattacaatatggtattatttccaattggcgtcaacgttactatagaaacaaattagtatattcgatatacctcaaagctaactttctacgagtagacttgaagagaagatcaaactattaggtaaaatattaagtgagtgtggtggtcacatgacaatttggtgtataatgaaacaagattccccattaattaacatcccacgttgccctttccaaatcaatcatttagatgtatttattcttattcgtgtgctcatgactcgtccttacggtagagcaaacgacattatttaatttatgttcgtttttcaaaactcagaatttaaattcataagttgagtttagatggaaactgatttttatcaatgttcaagaaagcaggataggcggctgtttcggcgtcatctaattgttaaacgcctgcgtaccattttgactttttaaaaattggttttattagacggtctgatagatttggcggaatatgtgtacattaaacagattagacggacattaagataagcggatttaaatatatcttaatatatttaaaattgcatatgaagacacctatacttttaattattttattttatcttactttataatattaaatttaaatttattttcaaaaatttgataattttcagatttttataatgtgttttcaatatttcatgtagtagtatataaatatataccgcttaaaatcgggtagattccgactaagcattctacgcgctaggcagaatgtcaccgtccgcttatcgtctatcgcttccttggacactgctatttattaaacaagtatattagcaaaaatatataggaattcataaaaaaaattattttcttcaacaatacataaatatataatatatactttctaataaaagtcacatgtcatttttataatataatactatataaaatcctctaagtaaaatgaaagtaaaatgtcatttttacacatcattacatactcttatcggtattttgtgatcatgaattcatgatatctttattataccctcactaccagtctacagccaccaataccaccaccacaaccatcatcatcaatattatcactatatttggtgagtgcatattccatgacaaagatctagaatctactatctaggttctcttatgtatatatttttgtcgaatctttcttttaaatagtttaattaacgtcctcctttaacaaaagacattttttttacgtccttcaatctcatagtttacataatattggactctagaatccgatttggtatgtaacacatattccacaacgagtttgctgttcttcgctgatatactattactagtataacaaaccataaaatttagaaaatccaagtttacaattttatggatcatatgcaaagttttatcttatgtagttaattcgtatatcattttaagtgcacttcttaaattggtattacagtttcataatcatccgtacatgaaacgactcaaatacagcgacatgcctttatgttcacctgcagtccacgtgggattatatggacatatagttgactttcttattgacatttaattacattgattctaatgtctcccgtatcaaatgatcttttgcgtcaattctaaataaaaaagatttgtcttcgctaaattcttaataaacaattaatctcttcgtaatcttacatattcttccttattcgtgagttggttggaggcttggagctgtcacgccattaatttgactatctttttgatataataaggttaaaatttgaaacgattcaacattatatggattaagttataagatatcgaaaagtgagttatattttcaaaattttatttaataaattacttccggtgaattaagttatcgcatgaatgaagtcaaatagtttcatcttcatttcattataaaaattaagtaacacttatattgtttaattagagattgatgcatagctctgggcaaaatacccaaatccgaataaccgaaccgaaccgaattcgaatccgaaattttaaaatacttttacggatcctaaacttttaaacccgaaaacccgaacttgatctaaacctgaacccgatcaagtacccgaacatatccgaaatatgtattcatagaaataatttattagtaataatcatatttacaaccacctaagtgcctaaaatatttggattttaagatatttttgaatactttacctacttttcgatagatttagatatttatgtattttcaagttatttgaatatattttgatacaaaattctgaattttggatacttcggataaattcgaatccgaacccgatccgaacccaaagtcttaaaatatcgaaagaattttagatttctaaatccaaaaaacccgaatcggaaaaacccaatccaaatccgatgcgaatacccaaacgcccaggcctagacacatgcggatgacaaattattttctaaagtttgtagtttaattttttttataattaagtataaagtttgcaaattatgttaatttttaagatatttatatttatagttttatatttgtcattaagtaacaatttacagagggacaaattttgtgttatacaaccttaaataaattaggccaattagatataatttaatcttggtgatattaaaaaatattaataaaatgaggatttaacccgtattaaaactacggctgaataatattttaattcttattgatatgattcaaccgcatcccacaatataacccgtcgcatatttatttaatatatatattcaaatatttggaatattatagtatttttatttgtatatatcaataataatatttgaaaaaaattaataactatatcaggtaaaattaaacagtttaattaaaaaccaaaatgaaatcgtatacaaacttttaaatttgatgtttgttaagttaaccttggtgctcattcatattttaatttattttgtttttctttataatatgactatgaatctttgcttaaacattttagccggtgtgggacgttgaatacacactttttcttgtagccggagaggatttaaagaaaatttcgagaacaatatcagatgattcaaagaagaaaaagagaaaaaaaaaattggagaagagcaaatgaaattagggttagggatttgggatctcaatcgattaggatagagttaattgggtttgttatgggccgcgactattggatgtggtttcccgggctttaattagccaatgtttttgaatattgtcgcttattattcgctaatcagatcagttttgattaaacctacaaataatcatattttgttttcagttttgacatatatagtatgagcataagtaccatatataattagcacaaatttgaatatatatatatatatatatatatatatatatatatatatatatactaattgaattgttggtttagagatttaaatttataggtaaattggtttttcattaaaattcttggttatatatatatatatatatatatatatatatatatatataatggttaaggatttcagaatttaaaatttaaggatttagagttttttttgtaaaagttttagagtttatgatttagtttttggagttttgtaagggttaataattaagacttataaggtagggttaagtattgaaaaaatagattttcttataagtatttatagtttctgatttagtttggtgagggttagggttaaaatttaaaattagggttaaaatttaaaattagggttaatttttgaaaataacatttaaatcttctttttagagtagtaaatagcgactgtttttgtgactattgtttccagtatgaaatatattcgttactttacgattatattagcgagtagcgactatcgtatttggtcacaaaattgcactgatatacgaccaagtatatgtggtcgcgatacagtcatctaatagtggctaagtagtagcaacttttggccgatgttttgttgacaaatgtggagtctcaaacccaagcacaatgccgtatatggcctgtttaatctacaagtctcggacccctaaatagtaaaaacaatcacaattaacaaaacatacttaaagtttggtaagatatattatgggtacataacagatattaccaaagaaactaccaattctgtctacatatacacactaatagggttaaacccatcttgtgacaacatattagatgctttttacttttcatttaccttttctcagtaaaaggagtccatatagtgattatcctttctcctcttatactccagcaaacttccataagtgcggtctgcgacccctacatatagtgcctctgtatcggggctgaacgagatcccggctatttctccaaacagatcaatctcttgggactgtagaaacccggactgcgtgtcgaagatgtgaacaaagtctgcaggctcagccattgcaagaaaccgcccttctggtgtgaacttcagtcctctgatggctcccatgtttcctttcaggacagcgaatgattctgacgggttacgaatgtcccagagacggcatgccgtgtcttggtttcccgttgctaagattagaccattcgggtgccaagcagatgcaaatgagtagtctttgtggcctctgaggcttgaaataacctgcaccgtaataccaagtccagttacaacatttgaatgtggatgagaaaaaaaaaagacaaaaaatgatgagcttcaaagaagttcagcagctcaactctaagctacagggctatactctgtccagcctaggactgaatgtagcagattagagctgttgtgagctaattagagagcagttagcggaataggatacttacttttccagaatgggaatcagagatcaagcattctgtactgtccccgactacagcgagtagcttcccatccgggctaactgaggtattctgcaagaacattagagtgtttctagttagagacatttggcggctagagacttgagatgttggtgggtgtagtggagaataaatagcctggaaactcacattgacagaccaatctaaagcaaattcactgacacgtgtaaagctctgagcatcgaatacacgaattttacagtcgttatttgcggttataagcctaagggagccactgcaataagaagagaagagaagaaaatttagctcgagttcaggatgataagtaaaacctctataaattgctaataactctctggccctctttatatactactataccttgggtctcggtatatatcaactgtgtttgtgatggcattatcttccgttgataatcttgtgcaaaaagcaaccccaggctgatttacacactggagaaagagaagagcaatacaagttaaacgatataggttttaaggtttatattatctactcgacgaaagcaatgactattcgaagaaaatgtgaaccttgcagagaagctccccgtcgaaccctcctaaaaggatcagattttctttgactgccatgctgctaacttgcaccctagagagtggctcagaaaacaatccaggtagtttctgaaagaaaaatcaaactaggaactaagatcaatctggaaaactatatatttgtaatagttttcatgtgttccaacggctctcacctgagtgggggtaactgatctggcgacattaagtacttctttccctctctggagtagagatgaccagtgcatgagtgaataattttgcattagatatacatcatgcttagatgtcgcccataccaaattccgaagctgtaaaaggaagaatatgaaagttcaatcacgcgccatatacgcagaaaacatgaaaacaagattttcttgtatatgaatatgaggtaagaaccagacttgatgtgaaattggctttctgactttctttttaatggactcaagttagagactaaaatgaacaatgttgttttacacaaaatgattaagttgcatctataactagattgagttaaacgccatcccatatatatgatatgcaatgcatgaaatgcgggaacagagaagttagtgaatgaatgagtaaagcacccaaaactactcaagtttaacaaattatatgcatgcatagccgtataatgtggtaagaaacaaaaaattctatctggacacatggttacaacattctcctatcatacccatatcgttatgctgctggctgctcagacagtactcccaactgcatcagaggttgaaattagaggaaaatatccctaagtgccacaaattattgagtaatatgttgataagccatgttcaaattagaataaacacaccgcagatctgcagaagaggatatatgcaaagtacagtgcaaaaacgatgtagtatatgattgttccaaccctcactttattcatacaacgtgcataacaactttaaagcccgactctagtttcatacttaagtctgtgattttgttcgatattggctgataaagtcacttgatgcagtctgatatgatgaacttaacatttaagaaacattttagaaaagcaaaatataaatacaactatacaagcatccgccgagacctctgcagaaaaaggattacagcgaatagaaaacccgagcgcaggccttcgatttctgaaagcataaagttaataaattcaaaaagaaaatggaaagaggatagtatcaccatggatgctggtagtcatgaactgtactcagagaacaatttagtcaacctgaagcactttcttagacaaaagctacctgctcatatatttgttatacctcatcgaaaccattttgaaattcatagatttttcaaatgagatgcaatttaacctatgctttaattatctaccaactaaaccaatattgaacaaaatattaacttaatccaataatgatgcaaatgatctgcctataaactcttaaatttgaagaaagattcatcttttacatagtggttggtaatgaatcagcagacacaaaatctctacctgaaaatgcacaatagtggaagtgacaagccttgtattgaattggaagtcataaaagttctttcctttctcaactacttgcccatgttcctgtcaattgtaacaaaataaacttcatgtatctattctctaatgatcaaaaatcacagatagtatagtcattttctatgtactgcactaaccttatcaagcttttctcgagagctaggccttaagatattaacaaagttatcatattgtttcaacctagtctcacgaaactcgtctctattatacttaaacccttcccactgaatcccttgtatgtctttaccattccttgcctcttgagctgatgtatcagtctccatcttcttctgtcacataaaacagcttaaagatcattcattctctgccactgaaacattctcaaagaaaatgcttaccgtttcacaatcatcctcaaaatcagaatcatcctttgtctgttccattgacctaactacaagtataaacactagttctatcatccacataagcttaaatcaaacttgccctaaccatgaaagcaagataagaagagaagtgagaaggaaggaagactgtagttttcttacatcagaaagtggatcggtgatgatgaaagatcttcttcaaatgattctcagacaaggtttagatattgtcgagaaagatgaagacttcggaagctgagagggagagaacaattgatttttggtaaagaatggttaagaagcagagtgggacctggatgatcgttgtcaaaagtttgataagaaatgaaaaaggaaataaatatgggaccttttttgcaaatgtataaataaccaacgcaacaaaaaaaaaaagtacttgggcttttattagttgaacggacacaacaacatctttttttttttcttataataaattccttttttgtttcaactataagtacattgagtttacaaacatgaaagcccaataaagcccagtcttcaatatcgaaaaaaaaaagaaagattctcttctctacacaaacgtgacaagctattaggctataacaatgccacatgttggaatctttttcatcgtcttctacctgcttggactctgattctggtgaacgaaatcaacgtcgaaaaaatatgatcatgatcgatgctggaaaaggaaccggacttatggctgaaaaaattatatttgaacttgaatttaaataaagtcgagggtattattcctaaaaaccaaaatgattaaatcgaagcaaaggaaaaccgctctcaagccagccaccaccgccatgaaagccgatcgatgctggaaaaggaaccggaccttgtccgggcacaaagccggagtgaaaaactggacggcgatttggactttgatcgaaaaagtttctttctctttgaaaagtttttttagagtgaaaaacgattcttttccactttatcatgcaacttttaaaaaatacatgaattatcctaatgttgatgtctgtttcactttcaatcaaccttttaagcacctttagttccaatgtcgtcaggatttaggcggcgcctgcgcctgcaactgcgattttcctttgtccatccagacacaacaacatcttgtgtaaacataatatgtaatttcgaattcgcaaatttccaaacataatatatagcgaataaaatttcaaaaatattatatattcttatataaaaatttgaagtagttaagatctatttcaatcacaagaaaattttacaaaatacttaaggtacttaatattgttatggattcttctagggttgaaatcatggagatacctaatgtctacagctataggtagggaagtaattcaataagaaactagtagagagattcatggttagcgtaaactttacgtgagagattgtagaatctattaattaagaagaatgtaagtaattttttttagcggattgatacaagtgtcaaaaataccaaactccatttcgaatcaccaaaagatagataatttgaattaaaagaaagaaaaaaaaaaagagcaaggaaatggaaagtgagctggtgcgtgaatcatgtttatgaagtgacaacaagtgaatcagagaatcctcctccttgtttatgttgaatgtgaaagatgtccacgcaataaatccataaaaaaaacacatagctagtgagttaagtgttttcatattgagaagaggtaagaaaactgatgaacccaaacaaaaaaactctagcagcaacatcaacatatttgatcttgtccttgtccagtttaacttggagatccgacaaagtaagtttcacatttctgacccattcttcgaggacatgacaactgtcgggaactgctttcttcctctccaaggaaacttccttgagctttgacttcaaccagtctagcttgaagcctaatttcttcagttctgtcaattggttttgagcattggttagttcagccgcagacaagctttatggagacttgcttagtgtcttgatgaggtagaagaagagagtcaagtacactgactcaagatcctcgtactttggcaagaaatctacttgaaagtctgggtgccgagtgaaaatataggccattgacagaactcgccaaaagagctttgattaggttcaaccagattcacaagagggaggtagttgttaggtataaatgggaaaccgaacttacttgagaaacaaggatatggacaccattgtattgtaatatatcactctcactcgattgtccctgatgaacaactttgactatttcaaggtaggcttaaactgtgttttaaatagcacaaggtgaggtaaggcgttgaggtgcttgtttgagcctcgagtctaggcgcatgagccttagagcctttgccgtatgaggtgcaacttaaaaaacaatagcttagttgtattcattgatacataaagccattttagaacaatttgtgagtctaaaaaagagataacaaagaaaatccaaacaataacttaaaccaaaagtctgaaaaagaaaattcaagaaaaacttaaaccataagtgtgaaaaaagaaaatcaaatccaacaaaagctaaaccgtgagcctgaaactctgaaacataaaaatgaaaacaaacagaatccaatccgacaaagataaaactttgagtctgaaactctaaaactcttcctcatcatcttccacacacaattcattatccttatcttctttttcgaaatcctcttcaatttgatcatcctcatcaatcaaagccattggagttgaagacgtgctctaagatgttcttggagttggaatggagcatgaggctgtattcttcccttttcagttctacttgaagacgatgctagtcctcttttgcctttagtacaatagttagactcattagcttttcagatacttggcttaccatttcccatgtcaaatcactatcatcaaaaaccagttctgttaactcaccagaagattccccatccattcatcctaccaaccactcattacaatcgtcaatatcttgtagcttgataggatcaagtgtgtctttcctctagtaacggcgtgctaaagtgcgattatacttaataacactacaaaaaatatcaacattattagcatgagagaagagctattatatgtcatcaataacgttttcataaacgttgtgttatgcccctgttatggtagacttcccatatacgatagcgttttttcggcatgctatgatagagcattacaccatagcattaacaaaatgctttgttagagcccctttatagcttttctaaattatgtaataagtcctttttcatgctctgttaggtgcttatatcataggactactaaaacgttctaatactaggatatgacccgcggtacaccgcaggttaatttctttataactaaatttaaaagttgtatttattttgttaatataatttgttttcttttttcaagattatataattgtattttaattgttaattctagtatttcatctgttgtataccgtattgtattaatatcgactaaaacccgtcttaccatataactttgtctcgtataattgtttaattgtttgttttcttttgtaagattgtataattgtattttgattgttaattataccaaaacaaccagtagtataccatctcttattaatatttaccaaaacccgtcatgccatataatctcgtcttatagaattaaagatcatttgtttctttttttttaaataatttttttatttaaaagacatataatttaagttaaatggttcacacaatcacataatagtttgattaaaataaaaacgttgtttttcatgaaacaaattaattatattattcgaaataattaatctggctggatataataaatatttatattatgtttaaaaataaatatttatgttaaacaattacaatatatatttaaaacatcctaaaacaacctgttttaaaaaatgttattaaaaacaattccaattttaaaaacattataacatagcaattctaatatgaaatgtaaaatattttagtctgctatgttttttgggataaacgacattctactaaaaacatgagaattaaaatgttgcataggccaatagctaagtagcccaacacacttcaaaggagaaccaattttgaatcaaaaaaccccaacagtaggtagaagaaaagatatggcccaaggagagtaatcatgtacggatttcatgaagctgagatgaagaatcgatgaaacagagaagaaaagtcgataatggaggttgaaggagatcaaactgaggcattacagaagctcgatgggaatttgattggcgaaagggcttgttattcaatttcggacagttagttcagcctcccaaatcaaagcattgacaaatttaaaagtaatttggtgcacacgattattacgcgatgaccgcataccacagtaagtagatcaaaacatgccaaccaattaggagaagatttcggatgacctcgaggtaaaacactttaattgaaggagaagagcatccaatctagggaggagaggtcgttgcaacgacagggaaaagctttcctagactacttgactttagttgtaagagatctgcttagttcaatctttggtttctaatttttcaaccacttcgtttaaatattatgttataagaatctctagttggaattttctttataatatgtttcgtcctcatgttctcactcgcgtggtcttgttcaatttcaggatctctgatcggttgattttataactctaatataatcagcacatgcaagaaatggtaatctctttctctcgtctctcttataatttattgactaatgcttgataataaccaatccagtagctgtgagtattgttattttggaaggtaaactgataatgttcttgttagaataaacttactttttgcagaatcttgtaacttctggaatttatagatcaaagataacttgagaacaaccttctccattaatattcttgaatatataacaaataaatacagaactcgctaaatatagatttagaaattaaatatgatgaataagatttatgctagctaattatagtacattatcatcaactaattataactttattgctttatcctaaactccctcttacttcgagattctcaagatttttacacgactttgctagtctgaaatgagtgaatgaagatttgaaacatcaataagataagcaaaatgagaagaaacaacaaaaaaaaacgtaagacaaatcaccataattccattagcagcttcacatgatttaacaaattatcataatttgtaatagatagatgcaacatacctaatattcccggtattcctcatatgcctatcaagttatcattcatagggagatgtttcacatacttgataaccaaatcttttttcatcagccatcatgttagtatacacacgccaagaggtctattctgaacctatatcgttagtgagaaatggtgttaagcgtgtagagatgcaatggaaatgagtcttatttatagtggtgtgacaggttaatagggttttggggatggagaatattcaaaatcttgaccagcactgattgaatatctttgaaaatattcaaatcggcatattcagataacaaataaggataatatcaaattcgttacagtttatgtttagaaattgccatatattgtagtttgttttaatactgaattgatatggtttaatttttttgggaaataatatttatttctaattacttgtttgcatgtttgtacgaaaggaatataaaaaggaaatagaaaaggaatctaccaaagaaattgaacttcggtaaatacaaaataacaactcataatatgaattgcacttaactcattagcaccaatttaggaaacgattaacatccggaatatatgtttgttataactgaatcaacatttctttgtgtcaggattttttaaggaatatctcaaattattaggatccgtatgtcttatttgcggatcaacaaacttaaaataaaatcgacccgattggatttcttaaaatgtacttcaaaaatgttaagtaaactaggatatgatccgcggtacaccgcgggttgaatattttgtttattttcaatctttataaaatgaagaatttgttgtgtataatgtttgtaggtatttgtgttagattaataattctcaataaggttgtgtatggtttttagtgaattgtaagtttataatattagtaagtggtgcacgattctataatattttattttattctcttttttgtattaaaattataatttagtgtttttaaatttaacccgcagaacatatataatttagtaactttgtattacaattacagatttagatgtgttaaagaaaactaaaatgtagaggtgtcaaagaagattaacgcttattttgatatactataatgttgatttttaaaagacctaaaaattacatttttttgtaactaaatatttaaattttaaattgtagttgttatgttattattgtagtttttagtgttatttttaatttgatggttacttctaggatttcatccatcttgcggtatactgtctcatattaatatcgatcaaaatctgtctcatccaaatccatccggccatataagcccatctcatctaaatccatcctgccatataaacccatctcaccatttaaacccgttccagcgtcccgtgatatctaagaatccttttgttcactttcttttcaataatattttttatttaaaatatatatagttagagttaatttttgtaaaaatttcaatctaactaattcttaaacttagtgaaagagaaataaaatattatggaaagtatctacgatatgacccgtggtacacatgttaattctcctatttatttttaactttatatcttatattttattttattttgtataaaattagttgttgtttttgttgattataaaatcatgattgattctctaaggtttataattagttgtaattttctgtgattatgtaatctaatgttatttttgtattttatatggttttcttgaattatatatttgttttatactaacattataatttataaaatttgttcaaatcattttgtttattaattaacaacataaccaaaataataaacaattgaaaacccaataaacaaatcccaaacccaataattcattgagattgaaacccaacttaagtagtcatgtgatggtttttgtaatcaaaagaaaaaaaaagaaacggtgaataattggtatctagaaaaaaaacaaagacccggaaaaaaaaagttatcctagataaacgaactggattcatgttcaatttctctccgatccaagttggaaactaattctcctttagtgtgaagaacttgatcagattaaaatcgggtcaatcgatatgtaagtgattttgactctttactgattatttacttatcaaattctttggctcctctccaatggaggaatccaaagacgatttcgtatctgtagacgcgaataatctagttcggccccgaaccgtgaagtagaatactgtcccctacactattccagagtggagtggccctccgtgtcaccaatttcagcttgaagttctcaaagaaggcgccattgttgagaaattagacgtgtaagtaaactcaaactcttatgaatctattaccctctaaagctttaaggcttctgattgaattaggaaggaaatggtatgtaattcgtatttgttcactttgcagctataagagaggagcttacttgtgcttgctgcttgtgtcaaattggtgtatctaatttgactttttaatgttatggttctgatactagataatattgttatcatgtatctctctaggaagtaaaagaggccaaagatggatttattatgattcatttgattaaatctcaatatatgtgaactaagttttgatcatatttttggtgaggattatggaatgttcaatgtactgcttgcctttgagacttgagaagcatgggagcaaaaaaaaaacgaaaacattgactactgtaaatcattctagggttgtgcactctgcttatttctcaccttctggctttacttgcaactacgagatataacatctctcgagataacaattttgcctttgctcaagagctcttccattgatccaagctttatgctctttgtatctctttccttatggattcttaatatgtatcttcatattgttttggtttttaatcttctttagctaatactatgcatgtcctcatggtttctgttgtcgctgctaattttgtttctttctttattaacacaaatcttccgcaaagctatggagagaacctaagggcagcttctaaaggtcggatctgcagctcgattggcttccgtaatcgtttgtgaaatcttcctttcttatcttctgaactacattttttaatgcatttcctacatagtctttgaatccattcaaaaatgtcgttgacacaaatcttcagcaaagctatcgagataacctaagtgcagtttgggcttatctccagaccgattggcttctgtgatcgattggtaagtcttcctttcatttggtcagaaccttgactacaacatttgtcacgacattcttgcaagtatcacttgttgtgttagtatattggcgccaagagtaaagcaccttcacctgcacatgccaagacgtcttgtatggctggatgtctctcaagaaagcgaaggaagcagccatttcatgtcggtaagtgtttctgctttgaatatatcgagtactagtttttaacccgcggaacaccacgagtctatatttttctagaaaaataaaaatttaatttgtttagtagattaaaaataaatatgatttaatgttttgtattttctaaatgtacatctcttatctctatatattatttagtgtataataactatgtttgatttttactaaaatataggaacaataacatatcatctcttatctctatattgtatattatttagtgtaaaattactattgtttattttgtttagtgtttaagataatataattgtattttgattgttatatctaggatttcaccgtggtataccgtctagtattactatcgactcaaacccgtcctaaccaactaaacccgttcaatgaaattaaatattatttgtcatttttgttttgataataatttaatctaaaatatatataatttaaataaatttaaaagttttctttcaaatggttatttaattgttctaaagttcatatattataatattctaaacccgtcgtaccatctaatcttgttcggtgatattagacattattttattttttgttttaataatatttttattaaaagatttataattcaaatcatttaaaaaattttctttcaaatgtatttaattttataaatttcacatattataaatattctaaatgtttttttccgttaaaacatttaataaactttaaataagtacaatatttacctttaataaagtataatattactaatgtcttataatttatctttttaagtaattaaaattgatagagatatattagataaaaaaatgctagtaattaagaatattaattaattgataacaattaaatgccactggcattgatttgtaaataagtcccaacttaggatttatttgctaaaagtgttgcaaaaatgtatatgtagatgctcttttgatagaaaccttggattgaagcaaatgaattgagttattatttatagtggatgaatggtttgtagggttttgtgaaagcgaatatacacaatcttgattatcaaggattttgtaatatttgagaatattaaaaagaacatacactgttattagattcgagtatatgccgtgatgttaacagagaatataatcagttgccaaatgatgaggcacgtttttaaactaactagatactcgagattctattggtgaaactttgtgaaaatctacttagtcgtttggtgagatttaggacaacaattggtaagtgaataaccttaataaagattttgggaaaagaaaagatatgttttggtaaccatattgatttcagtaattcaattaagcgagtttcaaggatagtgatagattacgattattgggatagctgtttttggggagattatgatattaacagcttgatttactatatattcttgctgtgattaagactgatttactatatattcttccacgaaatcgggtaattgaatgatttagccgcgattgattatcataatgatttagccgatatttttgcttcgtttgtttgcaggagcgggaaaatttgaaggttgcgaaatataggatttgggccgaaaagagagtgaatttactgaatgggccgaaaaaacgggtaaaaacccgggtaaaacccaaaaaaacacccgacccgaaaaattccttattttgtacttcaaaaatgttaagtagatttcacatttgggaaaaaaagtttctgccatttatattaaaatctatatttcataaatgatccacaccatacaagtaacaaatctcaatcaaagtcttaaactaacattacaagtggcatgagttaacaaattcgttctcatctaagctccactcactctcaagggttgacttgaggcatcaatatcttgagctgcactcacttgagacttgacaaatcaagaattggaacctacactgcagtagacaaaaaaacattggttaattaagaaagaaactaacaaaatcaactactcttgtttaactttccattttttgcgtatatgaaaacaaaaatctcaagttgttcactattggtctgcaagatagcaagacaagatagcaagtgacactgaaaattcttaaagtacttggaggagttaacaaactcacctttttcataagagtacacaacagatgttgtaacgtcgtcatatcttccaattgtattgactattccagcgtttaaaccgtacttgtaaatgaaacacatttcttgaacatttaatctccattccgaatataaatacacgagttccttacaaacatgaagcgatcagctatgaggttatgtgtgttcttcgtcttaagagtctaaataaaatcagatttctctattcaactccaaacaacttaaggttcaacataccaacttcaaaacaaaatctttgttctgtccaaaccacttgaggttcggaatcacaactttaaaactcatattttacatatttgagatattatgatctgaaaatttaattttaatgtctattgaaaacaagataatcaatgaaaaaaacagtttcttgaatcaatgaagaaacttatatgaactggggacaaatacttactgcaaaaaccagacatggaagataaaggtaaacaagaaagcaagatagctaaactacaagcgacacctgctgcaatatgtcctgagatcacccccaacgcaatattccagaactaaccacatatgagaagaagtttattatgaaaccacaagaatataataattaaacaactatatatactacgagcagcagaatgttttgtattcttgttatatatgaaaccaccaattattagctagtaaattttcaccaatcatagaacttgagtatgtatgtttggatgatttagcgaatataggatcctgacttcaaaaggaagagcaaagttaccaaaattctcaatatccaagtcacttcaaaaattagagattgtggaaaaatgaagtttggttgacaaatctagagcaaatccatcacaatccaattataaactccttaaagtcatgaaatccaacataatctcaggtaacacaagtataaatcactaatttggccaagagaagactcatctcctaattacctcatgaaaaaactttctctttctgcgacttgtcgacactcttgcaggccaaatacttgatagtcttcttcttccttcctttatacacattctacaatacaatttgaacaaaacgttacatcaatggctttgtgaatatatggtattcccttggttaccttaaatcagagattcacctccaaatccaaacccgaaacttaaaaaccctaaattagatcgaagtttctattctatcagattcaaaacccacgaatcagcctaacaatgttcaactgtgtcttcgaaatcgaaaatccccagatgtaggaaaattgtaacaacctgtagaagcaatagagaaagagacttacctagagcgatgttgtcgcattgaatagacttaggcttgttgagaccatgagaacaatcttcaattcgagtttcataagcaagagaggcatgtaggctcgatcgaaggtaatttggaagctcacctcttatgccactattggagaagaaataatcactcgtgccattcttatgtttggaatattattattgatttttatttaaatcgaaaaatgaggaaaggacgaaaaacccttgcgaaaccacaaaaactacaagaaaacttaatttgttgggctcgggcccaaaaaaaaatgtaaatactcggcccagttgtattatttacagaaaaaacctaagtaaaaacctaagttcccccttttcacttctcgacttcttcctcttctctccgtcgtcgtcttctctcgtctccgacgataccactttcaccggaaaaatcaatctcttctattcttctttcttctccgttttcgttcgtctttgtctctttcatatccgcaaatttattttccaatggctagagtaaaagactcatctggagaatatgaatcaactagggttgaatcgaccggcgaaattcctccatcagtcgacgacaccgccgccgagattccccaaagagatgaagaaggcacagagcttcttacaacagaagaggaagccggagaaattcagcctacaaccggcgattgtgacgcagccgatttgggtaattcaaacgccgtcgcatgggaatcaattgacgatctttcagacccaaatgccgattcttgtgcagaagaagaagaggcaacgaatgcagttgttcaacatgatgatggagcaaataaggtatgatagaagaccgttatttttttgattaggctcgttttaggatattatgcatgcattggtaaatgattggatttgtgaatggtgcttcagataaaacaaatagtacaactaggtcgtaaatttgtgaatggtcattcaggaacaactagtacaactaggtagttaatgtgaaattgaaagtattttgaattgaatatgcaggatgatggtgatgatgataacctgccgtagaatatgcagcatggtgatgatgatcttcagccgcagaatatgcaggatgatgatgatgatgatgatgataatcaaccattgccgccagaagttatgtactttgatccaactacctacacgaaggtgtgtaagataggaacgaggtgtcagttggtacaaacagtggaatttatagagactttggatgcagaactgaagtggtttaggaatcatgaccaatttaagcacatattccacatgcctaaggagcccaatcacatgattcaaggcatgtggatgcttatggttcgcacggctaagacagaattggcgagagagtgttggtttgttgtcaatggagtacctataaggtactcaattagagagcatgcattgttgaccggtttgaactgccgtgagtacccaaaaaactataagactttaggcagtttgaagtttgtggagaagttgtttaagaggactgaggacatcaagattaaagacgtggaagagaagctggaagagtttaagagtgagaagtctactgctaggttgaagttggcaattctgttattcttagctaaggttatgaaagctgattctaaaggggattcgaagataaaggagtttttgcttaggattgtggataatgtcagagcttgtgagacattcccgtggggacgtttttcctttgagcagtgtatggaaggggtgcggagagtaatgaagaacatgaaaggtgtggtgaaacagaaggcacagactgctttttatggatttattactccacttgaggtaagtagtcgagtaaattatatgagtggctagattttgttattgtgaactttcatttacttttatgtttttgtgtctagattctggcatttgagtgcattccgcagcttgggaagagatttagagaagctgtacgtgcagacaaggaatgtccaagaatgtgcaagcacaagttcagtgaaagttgcatgaagggatttactttggaagaaataaatgaagcacttggagatataacggttagctttgttctcttgaaatctatgtttataatctttgtggtgtttgaaatatatgtttacttgacaggatatttcaagcatcttggaacctgatatggatgagagaaaaatgttgtcacgcgttgtagagaagcatgttgatgatggtattggatatattgatccaattgttgatagttagaaagagaggcttatcgtagagaaaaagaagattttctggcgtagtctctaccaagcagacattgatggtagacgtattgaaactgttgatgatgttccagctgtacctgaacctgaaatccctgggacatcgattctctcgttcaaggaagctatggagagaggatttgacaagctcacggacaagcttgctgtgatggatagcgaaatcaagcgaatttgtttgagagtacaaggaatagaggaatatgtggcagatcaacttgagaaagaggcagaaaaagacaaatatgaagatatgcgtcctggttcagctgctgattttgtgccaccgtcttatcagccaagggatactcagagcaaggccttggttattcacagtggaatccgtgacccagcacctccaactattgagtctctaagtgagtttttgttgaacttttgtgtagtgatgctttcacaatagttcttacatgtttggttacatatttttgtaggtgatggcagcgatgagtccgatgaagaggataagaagaagaagaagaagaagcagatatcgaagaagaagagaaagcatgttggtcctactctggaatctgggaaaaaacgtggaaggaaaccttccaagtataagggggaagagtttacagctgaggggaagcaaacgaggaagagactttgacttttctttcttgcttatgtgtgtgtgtggactcttaggtgtttggagaaataggactttctttttgtgtatttgggaatgttatgcgtagtttatgtgtagaggacaaacttattttctgtaatggtttatgtgttttttgattttattaaaatcaaaacgtttggctaagttgtcccggttggccggtcaatagtacaagagttgctaagttgtcccagttggccggacaatacacataacttaaaatacaagagttgctaagttgtcccagttggccggtcaatacacataacttaaaatacaagagttgctaagttgtccctattggccggtcaatacacataacttaaaataggtaaatagctaagttgtcccagttggccggtcaatacacataacttaaaatacaagaatagctaagttgtccctgttggccggtcaatacacataacataaaataggtaaatacatgtctaattaggttcaaatattacataaaatccagaaacataacataattaggttcaaatgccatacaccatcctcaataacataaaacacatcataatcaccatgtagaaagtaatgccctaagcctatcaatctcgacttctttggcgagtaacctttctttaagggtttcaatttcgccttgcatgagttgaatagtttcccggatggactccaaagcatgattgcatgctagttgtccatgtcttagtgcggaatcaagtttgtgatttaccttctcaagctcctcagttaccgcctgatcccaccactgaataaggtggtttcgggactcgtactcttcatcctgcgaaagagagaagacttcataaatataattcacatgtactttgttgttccaatgaaatgaaaacacaataacttactttaagcattgggcatttgtagactctgtcgccttgcctgtaaccagttttgcacacttcaagttttacaggcttaccacaaaaacatttttctggaaccccccaatttgcatcggcattcgcctctccactattccaactagtttaggacgtggatggttgagagtaactatagggcctctacaaaatagagaaacccgtaagaaaccctagatctactaattacggcggctaaaaacccgtaagaaaccctagatctactaattacggcggctaaaaatccgtaagaaaccctatatcataccttggttgttgttgttgtcgtcggcggcggcagataatgggaaccctaatttcagttgtcgtcgccgatgttgggaaggaagaagagagaagaacgagagagaggaagaagagagaagaacgagagaagtgaaatagaagagagagggagaaagagagattgaaggagaataaataggtagaaactttgtaatgtgaacgcaataatcgtagtgtgaacgcaagtcgtggggtctatttttaaaaaaaattgtatttatttgaatattcagaatacacatagttgtatgtatatgtacagttggccggaatcacaaacagttgaactattctaaattttgtgtttttgaagttgaatctgaaaaaccaactcattttttagttggtcccataagttttaacatattaatggattttaataagttttgatagaatcatatttagtaaataactgttttcatacataacgtatgtacattggacaatcatgaactatatgttccttgttatacataggtgatttattaggaaaccagtttatgatcaagtttagtaataacaatgttgtaatatcatattttggatttattcaatgtttagatgttgataatagctgaaaatattgagaattattttatcattttgttaatcctaaaatacagatacatatatcagttgtctcagttgaacttaaaaaaatacattaaacttgcaaataattcaataaacttgcaaagaattcaatacaaatacgaaaacataaaacatagtacatcacacttacaaataatataatacaaatacaaatgaacttagttgtattggttgaaccctttctccagttggcgaggttcttccggttgaaccctttctgcatcagacttaatcttcctcaggctgcaaccaagcctccaagtttattccaggttgcgattttctcctctttcgcgcttcaccagctgatggaaaccgcttctcttgatttcgtcctggtccttttggtgtgtattccggcggaaaggcaactaactctttaatatgggcaggaagaacccaaaccgactcatgtgggactacatacaacgttcggtaataggccaatgaccaactatctatcaagtaatacacagagcagagtccgtaaatcatcacatcaatcattggtaacaagtgatattttctcgcttttttaaacacaccattaatggactccgcagaattactagtgtcaatgttatacttgtctcctttaaaatggcacctcgaccatttctcaaaccctactttcacaagaaagtcaacagctttaggccataaacttgtaaaatgaccaaactctttctcgaactcactctcagtatatgcatgagcacaatccctgaacttgacagcagctccatccttgtcaattttcacacgatctctcatgttttgacacaaatgccatatacaagctgcatgaagcgcattcgggtacaccgtcttgacagccttctttatgctttgatgcctatcactaataaagaccaatctgggaacatccgaatatacagttttcagcttttctaagaaccaaatccaacttacatccttctcgctatcaatgattccaaacgcaagtggataatgatgatgattaggatcgtgtgctgttgcaataaccaacatcccaccatacacagttttaagatgagttgcatccacaactatcactttccgcattgccctaaaaccttcaatgcaagcgcctaatgcaatgaagaggtacttgaactttttctctccttccaactccacataagttactgtccctggatttaccttctctaacatgtaaagataagaaaataacatcgtgtagcttctttccggagtccctcgcacatcactaacatgtagcattttgcctcttaaggcagtggagtatgaacaatgcaccccaagtcttcctcttacaatcgacataatgttttttggagttggggtctctaaatttccgggatagtcacaatgcaaaaaccgatgctattaatcttggtgtgcctcgctgtatactgttgcttgtagtctcaacactccgagagcatgtatgcatctttctatgcactctaacactccaaaaatgagatttcttagttctcgcaactcttagataccaagtacaccctttagaagcttggcggcatcgtagcataagtctcaacgggtctgacttaatagtatagactccaaaaacttctttctttgcagctctgttaaccaattcccacacagcctcccttgaacaaaattcttgaccaatttcaatacccgtaccatcatcccattctataacctgcggagtaacttctacacttcgtggaatatcgtgaatatcatcataatcaatcctatcatcctcatcttcttcctcaacagaattcaccggcctttccatcggcctttcgacagccacgatcttcgtacctactacattctcacaatcattcacatcattatcatatccatcatgcaccatctcatatacttcatttaaaacatttacaccaactgaaattcgacgctccggtacagaaatttcctctctcctctcaactcctataccatttaattcctccacatgcaaaacaggaatccgactctcttcatcagattctgttaaaaatatgaagacatcctcatcatctacaatatatgtctctctcctaactttagacagattgtaactcagtttcaacttgacagaagcttcatcaatcgcaaccttcttcatgatcttgtcaactaacatcgaataggtaatcttctccaaactactcgtcttaaacgatatagcatatagtgaatttttaccaatccactcattcacttcagaatagtatcctccaaagtcaaaatgtaccttagtgtggatcttcttcttcatcgctcctgaaaatacaaccaggtcaactccaatcaaacattttaatagttataccacatgtactcttatcatacgttgaaatcaatctctcgtcgcactcgattctactgaacctaattcgttacctttcaattgatttccaatgttaatacatacctattcgttaaactaattggttaatctaaactttgcaaacacaaaccccccaaatctttaatatgaaatctcgaaattcaaattcaactcacattcaacctacattcctttgctcatcacctcaaataacgtttcggcaacctctaatcgattactctttactttgcaaaccaatcatcaaactatcaaattgaatctgggaattatatagaattcaaaatcccaatctaaaatcacaatacaccaatgtcaaaggaaatatgagaagaaactgacctaattcgttggcttttacgccggatttcaagtcggcggcggccggaatcgatggtggccgacgaagaagatgaacgtcgaccaaagaagaagaacacgacgacgaagaggagagagaacggaggatctcgattctttatttagcttttgaatttctttttcatttttttaattaactcattaagggtacaactggtatatcacattttcggtggcattcagattaactgatggcagtccagatcagttttttcaaaaaagtggcataagtgataaaagttcaggtaatttagggtttgggtgagcttggtcgaaaaaattagaggtggagggaggaggtggctgaggggaaggaggaggtttggggagatggtccagccatagcggcggaggcggtggaggagcagattagagacatcattgatagatggagaagaagatagttgctcctcgagagcttttttttcttcgctcaaagttattgtgtttttttcacaagtattggcacttaactaaatattttgggctaagtagtggcggaataagtgatttagttttccccttagtgaaattatatcttagcgttgtttcaatgctattatacaatatctaaaataaaatttcatttttcataacatttacggaaaatgagctttggtggtgtgctatcaatgtggatatttgttgtagcgtaaacacaatgtcattaagcagttcttgagccaattggattcctttccttggtatggagatgtgaaaacacactccaatttctctcaaaaccagtcgcactacacgtgagacgaagaatattgcaaagtctctaagtgttggtgttgtgcctccatacgcagaccaccacgtagctggtgattgcttttttcttttgacttattaccattggaatcccaaagagtccataagcactcttaaactattctagttcgtcgcttaacctatcttgagttgcaacagcaagaaccaacctatcaaatgtgtagatagacctctcccaacctcttcacaatgcactccagactctggattatactgaaatttcggattcaagaagtagccatcaggcaaaggctgatggagttgacaatctcagtgcttatcgataatttcaaatgaatctttgtatttgtcttttttaccattgaaggttttaacaatggccactttagccttatccattgcttcatagatgtatctcgtagctggtttcttctctccgtcaaccatccttgtgccagaaactgtcttgcataatgatcctcttcacagtccttgctcctatttccttttgccatttggaatctgcccattcttgagaagtcgcagaattcctcaagttttttctctgcttatgatactgcccaattgtgtgaaagacgtagcaaaccgtgttacagccgatctttgcagatttccatcgcttgtgaatttttctcatcatattcacaagggaagtgtgaccatagatataatcattcttgaagatgcattgtgtgataacagtcttcacttccgaaatctttcctatatcctcaagcatgaggtatatgcaatgagcagcacaaggcgtccaatacaaatgaggtcggtttgccattgatagttggcctagaacataaatgaaacacaaaacgagttagaagcagctatgaaaaaaccaaactcataaagctaaatttaaaagattttaaacacactagctttcacatagtttgatgcgttgtcgattaccactttgacaacattagcttccccaacttcatccaccataagatccaggtgatcgtacaacatgttagcatctttcagaactgttgaaatatcaattgatttgatgaaaattgatccctttggcgagttaacaagaaagttgacaatgtcttttgtacaatagaatctcgccatctattagacattattaaacaacctttaattgcccattctgacttgtgctccaccaactttttctctgtttcaatgacttctttcttcaataaaggtactcttagttcataaatgattggtggcttaaagcctccttaaaactatcatagttaattgcattaaaggaaagttttgcatcaaagaaccacctcgcaatagcactacatgctatatgcctaagtttcttatcacacactccacaattatttattctattgtcttttctacctttcaatacattaggaagagttggacaaacaaacatgtccattagacctttttgtttcttcacaggtggctgtcttctttcatttcccaaaacttcagctgcttcttcttcttcaccataatcgtcatatgaagtggctgggggtggcatcatttgagtagtggctttaatttcagttttcttaagcatggaatcttttatttcttccctcataataggaggaactagagaacattgagtaacattcctaaaacctccaagaatatgctgttttgcacctttaactccaccatttgtgactttatgacaatagttacacctccaactaccatgtttaagtggcacaggctgtgcatatttcttgactggatcaagattcttatgagacaactcatcagacatgataagttgttgaaagaataaagagatgggagaatagaatgaaaacatagaagagagtgtgaagaagatgaaagacataggctgtgagatactgagaatatgaaaagacaagaggctagagacgtgaatatatgtgaaaagtttttaggggtgttctcattaaattcgcatgccataattttgaaaacataaaaaagcaagtaaatattgatagtatagaataattaccttatttttctgaggcgcttttcaaggctaggcgtgatgagaatctcctaaggagtcatcactctaagtcggtgaaaagatattccttagattcaaaggacggtgaagccacgaagaatatggacggtggagcgaatggtgacacaagagttgcaagactcttgatttaccgaatttgaatctcttagatatgacacactaagatgaattcaaggctgaaattgggaatcactctctacaagactcctggatatgacgcaagctcacttaactatggagttctcttaggacgtttgaccgaaaaggtaagtgcactttagtgacataggtagccaatcaattcttttaaacctttctgcatgcatcaccatattcctgaaactggggtgttacaattattgtcgtggtcgtcttctaaaagcttggtaagaggcaacaactttgggataccccattgtttagcctcagcgtagaacaatctgcatctctcagcgtttgtatatagtataatgtatatatcgtcaactcaagactttaatcttcttcaatgaacgtattaaaaaagaaagagtcaaaagaagttgattactaatggatctgcaaagctctttgctagattgattcaaaacaacaacgaaatagcgaactctccttttccatccaggtctcaatgattcaagactaaatacgtttagatagagagacaagtgatcatcacaagcagggaaacccttggggtggacaataaaatacctaaagacaaaaccaaaagttctgaaatcttttacacaatttgtgtaagctaaattaagccttaagatatgatagaaagtctgtggatgtcggactcacacactcaagtatttatttatttagtgagaaggattattcttgaggacaaatagatagacgattatagagaaaactatgagctttgtaagaaaatgtgtatagtcagtttgcacaagaatgcgtgtgtcctttacatggtctttgacccataatttatactcaaggaatacatttaatcctcatttacacacaattactctgtcttaaatgtgtccgttttagtcttcgaattaattattcaaacgttcgaatttgaactcactccagacttcctgggcttcaccttccggtccatctggcttctccaatccgagtaattttaacttcggtgttgtatccacctcgcgaatcaacacctcgcttatactcttacttcgaggaaactcatgggcctttcctcctttgggcctttcttacctgtgtagtaatccttggccggtcccgagcccatggtgcgggatccgacaccaacaattagccccccaagtctttcgaagtgatactccaatttggaagactttaatgctctaagggaaaagattgcgccaaataactctctgatttcccgcccaaatcacgttatttctttgatttcggaatcaactacaattactctcgtgacatctgtcacaattatgaccgtatatcgcttatttactattaaagcggggaaactcttccacttcccccacgactcccaaggcggtttcgtcatcatcactggcttgcgtatggtaaattcattttactctttccttgttacttttcacgcttcacttttcttttagagcaaagtccctttcttcttcttctctttgaaccttcaatctcttcactctttgtacgatgaattctgaaaatgaaaggcctgaatccccatctttcgaagatctcggttctagtaatgacctttgcacccggccaaatgatatcgccggtccccactaccaaaccacgtgcactcttcaatcccttaatcgattgggagagctttgtcggattctggctgagattatgaaagactcgcagatgccggagcccactgaatcaccggaggaccaccgtcccgggttcttttgtgtaaacgagatctacttcaagggttgcggtttgacttttccccttcccggagccctcgttcgatacttattagccctcgaaattgccttgccccaattaacccctaacctcctccggactattctagggattattactatcgcggcggaagccggatatgtcatcggagttcccgaactgaatgaacttcttagcgtgaggagttcttcgaagaaagtgggatacttctcggttatccgaacgccaacaagaacctcatctcgcatcttcctaataaagacgagaactggcatcacccgtggttctttattagtcatgtttactttgtaattaaactaggattcaaccagcggttcaccgcaggcctcggttttatatgatttttttattaagtatttgattatgttttatattcataatttacaaaaaatattttttatttaatcctttataaataatgattgggattttgtattggttagttgttatttagtgattagaagaatgtattttaatgtgtttaaatatgtgtattaactagatttttaacccgcggtataccgcggggacaataaatatttttttaagttagtatatataaaagtttacaaattgtatctatctataaaaaaaatttattttatagtttacaattgttattaagtaacatcctgccaaacccgtcccgccaatccgtcccgtaaaaaaacctatttattttattaatgttgaacttatttatgatatgtttatgaatcattgtctaaatattttgtaattttgtaataattaactgctatcaaatatctctgtggattgatgcgtataatcgaattgttatagtcatgcaaaaaagcaatatcaaaaatgataattttgtaatttttaaataatgttaaatattttggaagttttattttagtaactaatcgtgtagttaatgtagagagtctttgggaagatagttaaatgtcaaatatttaatttaaagatttactttctaattatcaaaaataattattaaatgtcagtggcagccactgtaaataagtctcaacttgaggatttatttcacaaagtggctgcaaaaatgtatatgtagattagtaaatccaaagataccatgaacaatatatattcgaatttggaatataattgaatgattgactatatttagataaatggtgaatattgaagagttggttatggttagtattagatttaagagaataaattattcaatcttcgagcgattaggcagtatatgatcgaatgtgcagttttagggatcgaatatgctcatatttagataccaaaaatgaggtaaatatacaaaaattgttaaaaggttaagattgcataatatggatgctaaacccgattaggaacttgaatccatgattaagagtaattactcctaacccatccgagtcattaacacgcggatcctataatatttaataaaaatttattactaaattacccttgacaattatgattaacaatgaacaaaatccaaaattgaaattgaaattgaggcgaaatttgaccatttttttaatttgtacttcccttttaataataaagggatttacgtttcatttcatgaaattttctgaaagaatgatgaattgtatttgtggaaatgtaattttatttttttggaatgtatatgaattagtgtgtgaatgaatttatttaattttgtaatgtcacaagaggtttatatttaattcgccggtcataattttataaattccaaaacaaaatcagtaaaatctaactgaattttgtattttatatatagtgttcaacatgttgatagatatattatacttacaaatttttattgaagttaatttaaactgttgtttactaaatgggcaaagtgtgtttgggccaataatgcaatttgtatatttttaatgagggtcaccgaataatgagttaggcccaataatgcaacgtttatttttttaaattatgagtgtcacaaaataatgagttaggctttaggcaggccttgaaagaaatatttgtttcattacaatttttttttaattgtagattcaaaaaataatgaatcagaaattgttgtcggcaaatggctcatcatctcctccatgcggaaataaaatccatcgtcttcttcgtccgatcactattctccattgataatttctttttcagtagcatcgattaaatgcaaatctatcgtcttcgtcgtttctgaaaatgttttatgtatcatcttcttcgtgtcactgcaaatcgtcatgaataattttgtatttgaacggtccagataaagtgtaaaaattgacgttgaaatccgatgttggtgaatagaagtaagtccatatatgagatttgttatttatagaaaaatgttagatgatcaaagaaacatggtgacaaacatttttctagattttttttttttgtgttcactttaatataaaaaatcatacaacctattcaagtattgaaagataggaaagcaaaagtagatacgatatatctcgaaaactaattcatagtcgaatatattatatgtgaaccaatattaggtgaaagagagtagatgtcgggagactacgagtgaatcaaaggagacgacaagtgaatcattgaagatgacgagagaaaattataatgaaaggtgatatatgttttactattttaaacatataactaggtcagtacctgtgctacgcacggtatccatgctttaatcactcatcaaatctcaattatgtatatattacgaatttaatatatttagtttgtctgtaaatatttgcttctattatttaaaaagtttatcaatatattattggtatcatttaaatatgtatattattgaatttattatataattgatgtgtccctttgtgtacataattgtatatttaggatatatagtctcttcaacttgtattttgtttgtctttaaatatttatatgtattctaattttaaaagtttatgaatttagtattggtatcatttaaacatgtatactaatgaatttattatagaactgatatgtacttttgtgtacgtaattatatatttagtatatgtacttgtacacatagtatgtgtggtttttcgtgtactttagtaacttgtaaaattaattataaaatttgacaaattaataagacaaacataaatttgttcaaactcataattataaacaaaaaactaaaaagaaatattaataaactacatacaataaaggaagcattaaaaaatgatagttctataataattattccaacctgcacatacaaaaaaatgtctaagttagtatttcataaaattgtatagaataattactatgttaaagtaatcataataaataatttatacatgtaggattaatctactaaaggttttggaatatttatttgaaaacaacatttgtgtttcttttttctgttttcctttactgcctataataagaaccttcaaccctccttttgatttcactctagacataacgacatataactgtctatttgagaaaataggcttcggaaaatatatatcaatattggctaatgattggccttggcttttattgatcgtcatagcaaatgcaacagataaaggaaactgcctccatcgcattttaaagggttgactatgctacattacccaaactataccgattcttcagtatacaccataaactttttgcttcttttttatacatcataaacaattatttgcctctattaaacatcacaattatatcacaattatagattctcttttaatagcaatatagtgattctaaattgtgatttgatttagtaaaccgatatttgcgtttagaaaactatgattagaataagtaaacccaaaaccactttttttttttcttgcatgaataaaaagggagaaaaaaaataaaacccacgtttaaaacccatcttcttcttctacgtatctaaaatcacaaacttagggtttctctcttcctctcaatttctctggtatggtcttttctctctctttggtttcatagtttctttctatctttggtttcatatagcttctctctcactggttttgtaggttcataattttttttaagtttcgtaatcaacgaaaaagacatggatgacatataacccgacattgacatggaagatgttgataacaatggtagtgaggaaaacgaagatgacaacaaaagaaaaagaaacaaaagggaaggtaagaaaaagaaaaacaagagtaaagccgaagatgttgaggatgtgattgatcggtttgagttcgaagtagaagattcagtaggaaatttcgttgatgagttttctgttggccgaaatgaaattccagatagttcagatgaagatgaagatccgattgttttgcgagatagaagaattcgaaggaacatagtcgatagattatctataggtcaattattcttcaatggtgttgagtttaaagaggctgtaattgagtatgctttaaacacagggaataatatagtttaaggaagatgggagaagacaaggcttgaattcaagtgtggtatcgtaggtaagtgtaaatggagggtgtattgctcttatgatgagccgagacatatgtgggtggtaaagacgacatatagaaagcacagttgtactccgaatgggagatgcaaaatactcagaagtcttgttattacaagacttttcatggacaagctaagagtaaatcctaaattcatgcctaaggaaattccaaatcacattaaagatcattggaagatagtgagttctaggggacaatgccagagcgccaggctgctagctctgaagttgcttgagaaggagtatgaagaacagtttgctcacattcgcggttatgtggaagaaatgttatctacaaatccgggatcaactgccattgttgaaactatccctaactctgctggagaagatgtttttaaccgcttttatgtatgttttgaaataatccgcatactttggagaggctcttgtcgaccaattatcggacttgatggtacgttcttgaagacggcagtgaaaggcgtgttgttggctgcagttggtcatgatgcaaacaatcagatttattcacttgcttgggctgtagtacaatctgaagttggggataactggctatggttcctcaagcaactcaaggctgatttaaaacatcaagatggagaaggatttgttttgatctctgataaatcaaaagtatatcaaaattgtgatttttctctttgttgagacttttctttctacgcataggattttgtttttgctagttttcttctcattgtctttgctattgtgaataataattatctttctattttcagggactcatcagttctgtacaaacagaattacctaaagctgaacatagattttgtgtaaaacacataatcgagaacttgaagaataagcatccaaaaaaagatttgatcaaactatttatatggcaactagcttggagctacaacaagactcagtttaaagaaaacctcaacaaggtgaaagtgtatagcattgacgtctacaatttagtgatgaaaaagcaacccgagatgtggtcaagagctttctttagacttggaagcacctgtgaggatgttgataacaacgcgacggagtcattcaacgcatcaattacgaaagtaagagctaaggcaatgattccaatgtttgacacaattaggaggcaagctatggagcgcatggttaaaaggcataacaaatccaatcatgaagggatgtatatagagtatgttgccaagattcttgcgaaagagaagaaagatgcaaacaagtgtgaaacatttccggcaactcctggaatttatgaggttatgctttatgggaatgattatttggtgaatacgaagaaaagaacatgtacatgtggtaaatggcaaatcagtgggattccatgtaagcatgtgtatggagcaatgattgattacgatatgaatgttgaaaattatgtatcaggatttttcagcactgatttgtggcaagtcaattacgagcaatccatacatccaatgagagggccactacaagaatattcagttttaatagcattataagatggcggtttatgtgtttttgctattgttgactcattcctaatttttctatagcgtttctaaatagacgaacgctatgatatattgtgtttgtgaaattgttatactcccgcatatttttttagtttttttggtttttattattatctgtaatagcatatacaatatttaaaacgttatcatagagttaacctaaaaaatatttagtggccgcctctttttccatgggcgctaatattttggtataaaactttttaacttatttttatctgcgaaccaaaagaatttggtggccgccctttaattaggtgaaaaggagaatcaacttaaagagaaaaagagagtgaagaatcgattatcttccacttgagcgaaagtcaatttctcgtttgcacttccacatcatttacccatcaattgaaaatcagataatcaatcgagggaagcttccgcctccggttcctcttccgcttcatctaccacttccccattttttttctttccccaattcctcaaaccctagttccagatttggatatttagggtccaccgtttcggatctgcttcctccgcaactttaccggcttccgacatgtgcttcagttgacggttacaacatcatctctcttctgggcagcaccagcaccagcaagtgcttttaagtcttcgtatcttggttttgtttttctaaacgtaagtttctcctttcattctctctctcttttcctctcttcgttcgatcttcctctcactctccgatctggttgttaatgaaggtacgattcacatgagacttcttaaggtcgctcctgtttctcatacggtttatgcagattcaatattgggcattagattggcggtgtttgttatcctagttttggtgaatcatctcaactggataattgattaggtatgtgttatgtttattaattaaatcggttatcaaggtttgatttttttcacttttgttatgtgttgtgtgactaattgaattgagctgatgtggttttatagttcgatagatccatttgttctacttgtgctgacaaagctatgatgtcaaagcaaatcatgtttgtgtttttggatctgaatatggactttcttttctatatgaaattgccactagattcttttccacaaagtttgagtctttacgtttctttattggtgtagccttcaaatttgttactaatctattctggttgttaatgtatttcagatttttgttgtgtacgtgtatttgtgagacgtggtgggtgcaagaggcgcctaaagacatttctattaataaaggaggaagctaataatgttgatgatttaggagaagaaatttcaaagattagaggtccaagaataaaagattcacaagtttaaatataagagttgtaagaaattatcttttaagttttagttttgctttgtactataagttttttaatcatggcttcatatcaatgcaataaaagatggctttctttaaatttgtaaaattattcaaaaaaaaaaaaaacataggaaacaattacagaaatttatccctaaaagtttaaaaaaagtgctatgaataaatcaattaataacaaaggatatttgctattataaaatatataattgcataaaaaaaaacgttatatttgacgaagatacgataacaatgctaaaaaatgctatctaaagtgtctcacctacgatgacgggcgcagaaatagcgcttgataaaacgctatgaattagttagatagcgttattcggatgctaagaaaagccatttttcttgtagtccggccaagatctggatgacttctacgtatcggttggtaacatcaccaccagagcctatactacctgggaagaaaaaaacaaatagacaaaagacatatccaaggattaaaggaaaacacgagtcgccgaagaagaaaaccataaaagaaacacttggaaggaagggacgcattatacattgttcttcttgcggtgaagctggtcataatgctactaggtgtaatctatatcccaaggaaaagacaaagagacaaagaactactgaggtatgatccacttttttcttctattacgattttggttcatttagtaattttatgtgtctatgattcttttttaggttgaaccatcgtcgtctcaagtaccatatacaatctctctcacgcaaccatcacaaacaagccctgacatggtggtttatgagtgaagtttaataattttatgaacatgttccatttagtttaattttgcaaacatgaatggtagtttttagagtttttttatcttggtgatagtttttattttttgaaccaatgagaaatcgttggctataaatctaaacataaacctaagtttttaatggctctacttgttcctttatcaattccagttttggtttcattcttatgtaatcggtgaaagaataaacatttcttttgttttattcacttaagtttgactgaaaaaacaataaataagcaaacgtgggttttattttatttttcattttttttttttccttttattcatgcaaggaaaaaaatagttttgggtttacttattccaatcgtggttttttaaacgtaattatcggtttactaaatctaatcacaatttagaatcgctatgttgcaactaaaagagaatttataatttgtgatgtttagtagaggcaaataattgtttataatgtataaaaaagaagcaaaaagtttagggtgtatactgaagaatcagtatagtttgggtaatgtaccagagtcaatcccattttaaagggtaatatactatccgaatgagttaggagcatcttgggaataacgaccaatttaccaactctaatacatgttaatagacgtccttgcaaaactttatctctaagtctaacaatctgaagccttgtacaattttcatcaaacctccatgtggatcaagattacgcaacaacataacgggcaaccaacttttaaccaaagtatatggttaggtactccagaaaacttaattttattgagaaaatcaggtgtatatacgaggttattatctccacgtgtgtcagaaggatcaatagaatcagaacttcgataaatcctttcttcacctgaaaaaaataatagttcaatatcatatacacttatccgtaacagcagataaagttatatatatatgcttttgagtaatgaaaaaaggacattcactaacctgttagcttggaaagcatatgatgggttaattgagttaacatcgtcattggagggacacaaaggcttaactctttaagaattgagtttagtttgttgttccaagccctaggtgcttgttttaagccataaagtgccttgtttaacttgtaaactttttcttcattcccttttgtcacatatccttcaggttgagtaacatagactacttctttaagctctccatgaaggaacgcagtcttcacgtcaaggtggtgtatctcccatccgtttgaggcagccaaagcaatgatgagacgaactgtctcgattcgtgctaccggagcaaacacttcatcaaaatctatcccgtgtcgttgcacataccctttagccacaagccttgccttgtacttgttgatactaccatcagaattttgttttgtcttgaatacccactttagtccgattggcttaactccagcaggaagctcaactaaatcctatgttctgttcttgtttatagacgacaattcttcttcacaagcttctctccattctcttaactctttagcttcaatgtagtcccacggttcttcatttattgtcattaagagcctttcaatttcgagttcagctagcatgatgtagtcattaagataacacggcttgttcttctgcctctccgatcttcttggtgtagatggaggcgttagttcaccactacccatgttagatgaaacatgatcatcttcgacatgtatatcattattttcatcgaaaccatctccccctggtttctctgtttcttctcccacattctctgtttcctcgacatgatcatcgtcacgtataccattatttccaaattcctcgaagctaaccacaaatgttccagagttatcacaatcggagaagcacttagaagctttgacttccattatgaccttgtacaagcgattctttgacctcattgcctttaccaatagctttccatctcgatcatacagagttaaataattttctttcattctaatattacatcccgcctcagttgcttgtccgagactaatgatgttactctttacatctggtatgaaatagacctctgctaagactttcttctcgccgttcttactcataaaaagtatcgaaccttttcctttgatatctatgcaagaatcatcaccaaatctaactttccctgtgatactctcatcaatcttagagaaatatgctcgattacccgtcatgtgattactagccccattatcaagataccaaacattgtcaccatctagttctgtttcgaacacacttggtttaacgctttttcattcaagtacactatctcatgcatcatgagcctgtcagcttcttgggtttcgtcttcttcatttgtttgagcttcttgaattttaagtaacctatccgggcagtttgacgcatagtgtccgagtttgtcacatcgataacaagttactttcgatgtatctcgggatcctcttccccggcctcttccacgtccattaaaacctcctccttgacctcttcctctacttgcataccagctatcttgtgtgtcagtatttgcatacattagcttcccttgatcatcttcttgttcttctccatcccaaactctttcttcgtataccttgatacgtccaacaatgtcttcgaagcttgtgttgttgagatcaagaacttgctctagtgaagcaatgatatgaatatactttctcagtggtaaagcattaagaaacttcttcacgagcttagatgtctcaatattgcttcccaacgcatcagaccttgttgctaattctgcaagtcttcccgcaaaaacatcaattttctcactttctttcatcttcatcttctcaaattctgccatcaaggtttgtaacctagcttctttgactctatccgctcctacatatcgagtttttatcgaatcccacaccaactttgctgttgcaagagttccgacttgtagggttaacgattccggtatggattgaaagatgagaccccgagccatagtattcttatatccatcgtcgatccctggttcaatggtctcccacattttgttaacactacgtgcaatttgcatacgaatagcccatacggtgtagttagttgatgtgagcatcggacattgagtagaactagggacgttctccagaggtttgacagccacaatatcgcccatcgttcttcaaagatcgttttctcaagctctgataccaaataaagttttaatgagattaagaacacttaggattataagaataactctcttattagcttagaaaaataactcaaaacctaaacaatctctaagtcttaatctctctaaaactcataagttgtatcacaccttgatacctccttatataataagcttttaaccttatcctaataattagataactcctaatattataagataactcataacaatatattctagattatctcctagaataataaagcttaatttccttttctctttagtaacttgctcttcaagttacttcttcttcttcaagcttatttcaacattaaactcctatctaatgactaaaaatagtatttactcatcatagcagcttcatcccaaatgattaacttagttgttgttactaattcagcaagatcagtaccacgtttgatgttgcatgttgaggtctcatgaggattgagaggaaaaccaaacctagaatgggtaccttctaataacagagatgcaatgtcgcttaatgcaacatttaagcaaatgtctcctttacatcttatcgccgcagataaaaccttccacaaaaaggtttttccagttcctccaaaaccatataagaaaaaacacctcctctatcattaaggacaacatcaattatttcatcatataccttcttctgttcagcagttaacatttttatccaattttcatgctttgttttcaatgactcacatttgtagttgcgctcatcgacgatcaactgattaaaagcaggtgatatggttcaaattacctagaactactctctctaataagagatcaattgcagtattttaggatagaattcacggagttcttttgttcaaacaatgagttaaatatcgagattaagctagcagggtagtagtaaaaatgaaagagaacaaagtaaaaagacaacagattgattgtgttgtaaacgatttaataaagagctaggaacagggtattctcaggaaactattggtttgtagatctaatgaaagctaggttgttatcgaaccgttcttaaactcaaattctaatcatggaataaccggtgggcgtgccgcgaaactccctatatctatagctaataataactggagaagccgagaaactatcaacctaaatatgcattcttaacgagttcaattgttcatcttactagatagaccgattcttattacacacctataaaccagactcatcaaataatagatccaactacagatacctatggcgggcatatctattgtctggattcaagatctagttaattactctagatctagcattaggcataattaaagatgaagaattctaaagataacctagtgaaacaacccgacccatttttttaaaacataattaaatattcccataaatatctaattaaaccaaccaataaaagaacaattgaaccgcaagtcaagaatactattttatgaataaataaataattagaccaacaaaaccaagaataactaacaatccttaccgggttccaataaccaaaacacaaaaataaatcaaacgagttcctagatcatactctcttccttgccatgattccacgatcacactttatctttacttgcatcaaaaagaaagagatgcgtagatattatcacaaatacttagtgaggcgatcctcccatctacgagctatacacacaagcaagtaaaaggggtataatcacaaataccacacaaacaaaccagtcattgaacaattcaccaaaacacattcaccacatttacatatcatcacacaaaacaaatcacacaacccaatcgctcagataagctcatggtcacacactcaccttaacaaattgattctaacaataattaaacctaggagagactctccttgcgtctgaaaaagtccagaaacgtcctacaacaagtcacaaccaaaaacaacctttaaaacaaactggacatgaaagacagaaacaaacagtctcaaagacgaaaccctaaaatataaaatgaccgttaactattaattccctttggtgaaacgctagccttagacgtcacgaagcttcccacaaagtatcgtgccgatcggaaaacagacgagaccacgatcctagtttcaatccttgcaggttttaattcgcgtctgagaaaacgtgtctcacgaaacttcgaataactcaaccaatttttttccaaatccagttctgtaaactggagaataacgacaaaacgacttgggaataactctaccaaatttcgttacttttgaccacgatttgatatgacgaaactgaacaaaccataacgattatgctccttctctttctctatctttttctcctttataaaacgaaaagcggctaactaaatccataatttcgagtttcctttttttctaggcacactctagggtttccaattaacccaaccaattaaagcggatgatttaaaaacaaaacctaaccgattttccggttcacgggcgttacaattctcccccactaacatagattcgtcctcgaatctagcttcacccttccactccgaaaaactctgtgcaaccatcactacggtccgcactccctccaaccagacccccgctaggtctctctatctagtcgatatactcacgatttactagtaattgttgctcacaactcactctccactctcagaccgcaatcttcgagcataaaccgtcactctcaggcctcggcctacggtatctcgggtatcacacgtattatcttctccactcaaagtcaaaccctgagttgtgtcggatcactctcagccacaaagtcatcgagttacgacacttggagaaaataatacctcaaaactcgctctcgggtcgtcaccctaaagcgtgctctcggatcgtcacccgaagccaccgtacccctcgtactctaaagacaccaagtccctcgagttaccggtacctcaggagcataccccgctcctcacgagtcgttgggaccctcatgtttctcgagcaaacaatactaaacgcttccgaccatatctccagactctctctcatggattcgcgtaagacacctctatgccccaccatccatcaaatcacctcgaggatatccttaggaccaactcccggccatctcgtaaacacacctttctcttaggttgtttactcaaactttccaaaaatagacaagtcctttctgggaactttccgtttctggaaaccgcacaacacattcttaaataagacaactcaagtcaaatccaagaaaaaaatgctcatcttattaatcatcaaatgtcatgatcgttacaactccaaacgaaaatacaaatgaaaaagaaataagaacaacaactcaaaagctcaaaaactcaacatcactgaaactggaaaccaaggataggcaaactcatgcagcaacctgcttctcgaaccacttcttgaaccttgcctttatcctcgcctctggctcccaagtctcctctgtcacaccatcgcagtcccacaagactttgatcataggaatcttcttccgccgaacttccttgatcctcctctcgagaaccctcactggtctcgcctccaaagtcatgttaggctgaagatcctctgggatcttagccaacacctcatcatccttgtgaagacacttcctcagcatcgacacatgaaagacattgtgaaacgcacgcataacatctggcaactctaacctgtatgccactggtcccaccctctcaacaatcctaaacggacccatgtacctcggactcaacttagtctctgaggtagacgtattcggacctcgcaatatggccatcttgagatacactctgtcccaacctcaaactcaagctctctcctcctcttgtcagcataactccgctgtcggtcctgagcttccttcatgttcagcttcagaacccggatcctctccgtggtctcctgaacataatctgcaccatatatgctcttctcccccacttgggtccagcataacagtgtcctgcatggcctcccgtacaacgcctcgaaaggagccatcccaatactcgcctgatagctgttgttataagcaaactttaccagactcaagtgatctgcccaatgacctccccaatccaagacacacatctgcaacatatcctcaagcgtctgaatagtcctctcagattgcccatctgtctgtggatgataagccgtgctcatctgcactttagtgcccatctctacctgaaaggctctccaaaatgcagaagtaaacttggaatccctgtgtgacagaatactcacaggtactccatgcaacttcacgatctcgctcacatatttcttaggcaacaccgccgctccatcggtttttctgatggccagaaaatgtgctgacttagtcagacgatccacgatcacccaaatagcatctttggttcgcgacacacgcaacccaaccacgaaatccatcgtgataaaatctcacttccactcagaaatgggtaaactctgcaacaggccacccggcacctgatgctcagccttaactaactggcaaacatcacactctgtaacccaattagctacatccctcttcatcccaacccactgatagtgccgcttgaggtctcggtacatcttagtcgctcctggatgaatggaaaacatgctcgcatgagcctcactcaagatctcccgtcgcaactcctcatccttaggcaaacaaactcgctcatgcacaaggatagtcccattagctgctcgatccacagcttccaatttcaatggctctcgtgccacaacacacaaccgcaaagcaccaatctcactcaccaaggcctcaacactctgccctggagccgcacccacgcgcttacggctcaacgcgtctgcaaccacattagtcttaccaggatggtaggctatctccagatcataatcagccaccagctccatccatcgcctctgcctcaggttcaactctggctgagtgaaaatatccttcaaactcttatgatccgtgaacacttgcactttcccaccataaagataagacccccaaatcttcaaggcaaagattatcgcagccatctccaaatcgtgagtaggatagttgccctcatgcttcctcaactgtcgcgatgcatagacaataaccttcccacgctgcattagaacacaacctaaaccaactctcgaggcatcagtatacaccatgtaaggctctgctctggcaatgctaacactggtgtactcgtcaacatctccttcagactcacgaaaccctcctcgcactccggtgaccacacaaaaggaatatccttctctgtcagcttagtcatcggctgtgccatactcgcaaaccccttcgaacctcctgtaataccctgccaaaccaagaaaactcctgatctcagttgcattcgtcggtttaggccagtctctaatagcctcaatctgctctggatccactaaaactccctctgcagaaacaatgtgacccaaaaaatccatctctctctgccagaaactgcacttgcccaacttagcgaacaacttctgctcccgcagcttctccatcactctcctaagatgtacctcatgctcctcaggactcttaaaatacaccagaatgtcatcaataaatatgatcacaaactcatccaaaaactcctggaacacgctgttcatcaacctcattaacgctgttggtgcattagtcaaaccgaaaggcatcaccacaaactcaaaatgtccatatctcgtcctgaaagcagtcttgcgaacatctgcctccgctatcgggaactggtgataacctggcgtcaaatcgattttggagaaacaagtagcacccctcaactgatccaacaactcatcgatccttggtaaagggtacttgttcttcagagtgacccggttcaacccctagtagttaatacataagtggaaactcccgtccttcttcttcacaaataacaccggcgctccccaacgtgaagtactaggacgaatgaatcccttacccaacaaatcttctagctgcttcttcagctctgctatctctgctggaaccatcctgtagggtgtcttagacaacggcgctgtccctagttccaactcaatcgtgaaaggatcagatcgtgatggtggcaatccctgcaacgattgaaacacatcctcgaactcctgaacaacccaaatatcgctcactgctacctgccccacagactccgacatagatatcgtcaccaggtaagcctcgcaacccttctcgatcattttctctacctgcacttctgagatgacgagactccttgaggtaggtctcactccctgataaaccaacctcccctctggccgctcaaaagaaactctcccacggtggcagtcaagatgtactctgtaatgatccaaccaatccattcccagaatagcatcatacaacactacagggttgataatcaaatctgctggcattgactcctcttcaatctgaatattcacacccttcgctctccccagaaccgttagaaactgtcctccagcaatcttgacggctccaaactgctcaccaggttccccacggatgttgtcgcgtgaggcactctccggggtaatgaagcaatgtgatgctccagagtcaaacaacacatgacctctacaccgcccactaataaggtccctacacaaaccttatatgctaagaaccctaacattcatcacacaataatgatatccaaaataacaaaaataattcacaaagtctgagtctaagaaatcataccaatgatcgctctgttgctggtactgcctatctcacgcgtagtatagccatgtggtgccgctacaatatgtgctaactgctgcacattctgctgcactccttgctgcacctgcgctctgtgctgcaccgccggctgtactagtgctactgtcatctgctgcagcttaggacaatttgtctaagatgtcctctctccctgcagtggtagcactccctcgtctaaggtcgccgcgtacaatccgctaccttgtggtcaaggttctcacaagaaaaacatcccgcacgaccaccctgtccagctctaaaaggatgatcccacttcctcttctgcacctgcgcaggcttgccgcccttgctaggtgccacctgctgttgaatcttcttcggttgtaccgatggactgactgccaccacttgcctctgaaggtcctcctctacctcagcagctgtctacaccagggccgccttcgtggcgtactgcgacactctacaccgcaccctcaaatccggtcgaagtcccctcaagaaccttctcatctgggcctggtcatcctccatgccccgacccgcatacaccaagagtcgcttaaactcacggccatactcccgaactgacaactcaccctttgtcagctcaagaaaacgtgcctccatacggtcgagcgcctcctgcggaaagtacttggcattaaactcagccacgaaatctgtccaagacatatccgcctgcctcctcctaacagtcacactccgccatcacaaatgtgcatccccatctagaaaatgcactgccagatccaccgatactccgccgggcatcttctagaaccgaattcctttcaacccgcgacctctaactgtcggcctcctcagcactagtaccaccagaaaaatacccgtgccaatcctctgcaactgctccatcatcctcaaataagatggaacctcctcaacaactgcagccctctgctgcacctccgccactcgtggcgcaactggagcatgcactggtaccacacctggtaaccgctccaacaactgtctaagtaggcccgccaaaccaacctctggaacctgggctcctcctgctgcgacacctaacactcctgggtccttagcaccaacggcatgcacaccaacactgacaccagctccaccagcccccactccggttgcaccagctatatcggcaccaagaccgtccccaaccccgggctccacaaactcaagttgcgaacccacactctgctcaatcgtggcactgcggccatcactctcgccgataccctcgaggactcgtctcctaccgcgaccacgaccacgaccacgatcacgaccatgaacttcagctcctctaaccatctgcgctactcaagaacaaatggctaagaaactaaaacaaacaaatatatcacaaacaacttaccgtggaatctcatttaaggctcagagaagatgatgctaggactccaacaaacacaattgactaaacactccataatcaatcctcattatgctaacgccctaactcatcccacatcaatcatcagaaaaaataattcatcaattaattattctacacatcctaaaaccgtgatcgctctgataccaaattgaaacaacccgacccattttttttaaacataattaaatattcccataaatatctaattaaacaaccaataaaccaacaattgaaccgcaagtcaaaaatactattttatgaataaataaataattcgaccaacaaaaccaagaataactaacaatcctaaccgggttccaataaccaaaacacaaaaataaatcaaatgagtttctagatcatcctctctttcttgccatgattccacgatcacactttatctttacctgcatcaaaaagaaagagatgcgtaagtattatcacaaatacttagtgaggcgatcctcccatctacgagatatacacacaagcaaataaaagcggcataatcacaaataccacacaaacaaaccagtcactgaacaattcaccaaaacacattcaccacacctacatatcatcacacaaaacaaatcacacaacccaatcgctcagataaggccatggtcacgcactcaccttaacaaattgattctaacaataattaaatctaggagagactctccttgcgtctgaaacagtccagaaacgtcctacaacaagtcacaaccaaaaacaacttttgaaacaaactggacatgaaagacagaaacaaacagtctcaaagacgaaaccctaaaatataaactaaccgttaactattaaatccctgtgttgaaacgctagccttagacgtcacgaagcttcccacaaaatatcgttccgatcggaaaacagacgagaccacgatcccagtttcaatccatgctggtcctaattcgcgtctgagaaaacgtgtctcactaaacagcaaataactcaaccaatatttatccaaatccagttctgtaaactggagaataacgataaacgacttgggaataactctaccaaatttcgttactttttaccacgatttgatatgacgaaactgaattcttccaaaccataacgattctgctccttctctttctctatctttttctcctttataaaacgaaaagtggctaactaaatccctaagttcgagttttccttcttttataggcacactctagggtttccaattaacccaaccaatttaaccggatgatttaaaaacaaactctaaccgattttccggttcacgggcgttacacctagcaaagggcaatctactaaaccatatgaatccctaatgagaaactctattcctaacaagcagacttctcagacatattggatgaagcaaacaacatgattaagtgtgaaagcataaacacagtaaatagagaaggggaaataagggatctcttcattgtattaaaaattggaatgaatctctcaagaacaatggatgaatagcttatgtctctcacaatagggtttgaaaagaacttgataaaagaaacttaagtctaaaaacaatatgtatagaccctaaaaacgtccagtgactaataatgcaaatagggaagtctcctggggcaaacttgaccttctgtaaactcgatagcgtctagggtttttgctggaccgaaactggtgtcgatcgacaccatgagtgtgtcgatcgacactcctcgctgattcctggaccaaaatcgtccttagcttcattttccttagcttttgctccaaaatgtctccttatctccattgttgtcccactgcatagaatacctgaaaagacactaaaaagactcgagaaataacataaaaactcaaaatcctatacctaaaacatagataaaatcggtgaaaatcgggttatatcaactcccccagacttagcttttgcttaccctcaagcaaaacagaaaagccgaatccgtggaagaggttttgaaaacaaaggaactcccaacatgtacttctctacaagcttacacaatattctagattccatacctaagttccacaactatacccaccaggctttcatcgtcgggtctcatcaaacaagccaacattcaagatccttctagactcattcatgtactataccatgataaattgaccattctttatattttttttttctttttcggtgttctttctctcccccagacttattctttttagagagtaagcaaaggggaactcgcatactggatcaacaccctcggcattttccaacctttgtaattgatcattccaaataatgtataataatggggtcatagaaaacattcctacccctatacactatctcaaagttgtctcaatctctcattattactattttcttataaggggagaggaacatattctttttatcacactggtctcaatatcaggtatgaacaagaagtcaagatctatgaatactaaccgtttgaagaggtaaaaggaagagcagtgagattagctccagccttagtggttgagttggaaactaggatatcctcaagtatgttggtttgccatctagattttccaatagttggattgaatcgaacctgcagcactcatcaatcaggcaataaacatgagaaatatagatcatgattcctaactaaactaaagaaaacgtttttttttttttttttcttaaagaaaggaaagaaataaccaaatgaactgcaaaataagaaacaaaaataaaagcatcattagtaaaaatctcccccagacttaaacgacactgtccccagtggcattcaaatccagagaaagcgggaaaaataaagcaaaaataaaagaaaataaaagaaagggaaaagaaaaatcaaaccagtgggttgcctcccactaagcgcttgttttgagttaatagcttgacttggcggagtttaggatatgggtgtagtggtggtggataggtgctgcctcaccgccttggatctggttggagcagcttccggtgtcgatcgacactcaggtgtgtgtcgatcgacactcttctcgtcacctgcaagaacaacaggagagacaagctttcgaggaactctaggcttcgaataatctaaagaattaatcaaagataaaataggagaagagagagaagagaacttatcacataggtccctaattggtgtgggctgaagagaatgtgcagaatcctctgtctgtgaaaccagagggtgtcgatcgacatgggtagtggtgtcgatcgacaccgttcctctgcaactctcattggtgacctaacaggttggagtgttgtgtatggctctgtggtgggattctgattagtctgaggaggtgtgtctgtgctggaagcaatgcaactgataggtttagtaagctctgaaccatccatgccaaactccatctccgaatcacaaaccttaagagagattctccctctcttcacatcaaacctagcaccagttgtagctagaaatgctcttccaaggataagaggatctttgggttccttctaatagtccaggaccacaaaatcagtagggataacagtattaccaaccttaacaggaacatcttcaaggattccttcagggattcgcttggaacaatccgcgaagagaagagtgatgcgagtaggtctgtagtgagtcatgccgagtctctcagcaacagacttgggcatgaggttgatgcttgatcccagatcacacaaagagcggctgaatctgcttgtggagatagagcaatcaagaacaaagctacctggatctggaagcttctcagtggtctgaccaggagtaatggtgcggatgtactcagctatgtctactctatgtgccttctccttcttggccttaggcagcatgattgcactgatgtctctggtaagcagtttagcttcatctaagctaattccattgtcaacaagtcgcttgacatacctgttgagtgaggcggaagatgtctctaaagcatccttaggaagagtatagaggatcttctccattatggttgtgcacttagcagcgtgaatctcctgcttagaacgacgcctcctcggataggggacatgaggagtgtaaacgggctcgggctgcataggtacttgcacctcacaaggtgcagtccggatccagtgtcgatcacactggatgggtatcgatcgacaccgtcgtattgagtcgtctctgagaaaagagtcctgtatggtgtcgatcgatacaggagggtgtcggtcgacacaggagggtgtcggtcgacaccatctctgtaactgcgagctccaactcgtcttcagtgtccaattcctcccacacatcatctccttctctgatcaagatagcattgcagctcttccttgggttagcatcaggattaccaagaagaaaaccctcttgtctcttgatagattgtgcagtttgagctacctgtacatctagcttcttcaagtgagagctcagattgtcgatcttcccattaagatttgtgtagacaccatcaaacttgccattaaactccacaacaagctttgtttggctttctagaatctgctcaagcatcgattccattcttgtctctgctgagggtggagggggggcttggtaagttgaattaccatagttcctctgaaagctgctctgaggaaaagtcttctggaaagcaggctttggagtgtagttggaggaaccctagttccttgtaaacctgttgccactgaagttgccatgtggctgcccaaacttcctgtatctcgaccaactatgtagaagactccttcctctgactcaggctcaggctcaatagtctcttcctcagctgcaaagtggacatgcttcttccctgtgagcaagttatgaactgaatccatcttagcattcacctctgccatctgatttcctgaaatagctccagcaatcttcttcctctcgaaatcagcattcttggtactgttgatgcaagcaaggttctctatcagggttgtagcatcagctgggtaatgtgtattgaaattaccattgctcgctgcatctagagccatctagtatctccaatcaactcctctgaagaaggtacctagaagttgtacctcactgaaaccatgatgtggacaatctcgttggtactccttgaaacgaacccaagcagctttgaaagcttcagctggaccttgtgtgaaggtagacagcttgtttctcaattcctcagacttagcatcatcgtagaaattgttcaagaaggctatcttgatgcttctccaagtcttgagggaacctgctttaagttgtttcagccaagaatctgcttccccagcaagtgaataagggaagagcttgcacagtaggtagtcctcagagactccattagccttgatgctcaaaacaagatcctcgaatcgctcgatatgatccattggctgctcatgagataagccatggaaaggatgttggccaactaaagcaaagtagccaggctttagctcatagtcgttcctctgtaatggtgggggtacaatcgctgatcgattagcatagaacaggtctggcctgttgaaatccccaagagtacgacgtcgttccacagctggaggaatagatgcaggaatctggtgttggtgtcgatcgacacctctgttgtgtcgttcgataccgattgcatccgcatgctactcccgatggtgtcgctcgacaccgagccctgctgcgtctctagcagctaattgcgcattgaggcgcgcctgatcctcattggcatcctcaggtatgatgagtccatgatcatccaatctctgaccagcctcattgtaggcttgcccatcctcatctctcaaaactccttttacatcagctctgatgactctgtcagccattgctaatttctgagttttgttaacaattttagtattgttggttgctttatcattggtctgccctctaggttatgatgatatccttttagttttggataaattttctgcaatagaaaatattaatatcaaaatataatatataaaaataaaattttatattaacaatttgcatgaaaatattgtagattaaatcgtatataagttagttctttgtcaaaaaaaacaaaattttaaaaaatcatcgtatataacttagtaacctgatttcctattttttgcggcagctcttggatgagttggacaataaacttttgagctattggagtcattgtatatttccttttgtgtttggtgtattataatttactcttgcaaaaataaaacaataatatataaatcaaaataaagtggaaagccgtaatgatgaggatatatgaacttactacttgtaagagttgattttattgtattaatgggtgtaatgggtgaggaactactattattatttttcgaataaaggggtaaggacattggagtatgaggagtctgacttctatttgtaatctcgacaattgttaatttcactaagcactctaccaaaaacagaactgacgctaaccaaattttttgatccaagtgtttgattttgtggagaaaagttggtttcatcgaacaaacgtcttgttcgttttgaacattgaagacttttttgttgttgatcgacagcattttctttcttttcttcattgtacacgaagaatagaaacaaacaatagaaatttagcttcagtagaaagtcaaagtattaaaaaaacaaaaaaagatgataaacataacaatgctaaaaaattaggaaacaatatatatggaaatatattgttaacaataatatatgtagtataattctattatggcgtaatttataatatttacagctttattttagttaatatctgattattgagcaaattttaacacaaattatgggatgttcgattaggaaactcctcgttgaaatcatggttgtttccaatatagaagattctatggcgttttaaaggcatggttcattgtatatatattttaataaaatctaagttttgcagatttgttttgttcctttaaatacatgcatatcgatcatttattttagttaaatttgatttgagtttcacgtttaaaaaattgtgttaaaattatctaaatatctaaatattttaaatccaaattgtaaataagaataacaacatcaaaacttagaaaatgattctaaacttaaggaactatagtgttttaggtcgcattaaataagacaaaacataagcaaagttaatatcttacaaaattcatgcttatgaaatgaacataaacataaacaaagtcttaacagtacatttttacacataatattataatttataaaggaggatagaaaggggtctggtcttgatgtcttcaattctcatcaacaacttcacctagctcagttggtagcatccatttaaggaattggtcttgtaaaggtgggcaagaaaataaaaatattattagtttaaaattttatataatacacttctcagtaaataaattgtaaaaatagaaacgttcttacgagatgtgagtcatgttaatctctgggtaattttgattgaatacaattcttgaagcaccattatgtgagattagacattgacgacctaaaatcattatgtttgtaaaccattgtattagctcgataaattaaatagacaatgataagagtgctaatatttaccttcatgatcagaaatcttccaaaattgaagcacacatgttgttggattcatcccaaaagtccatttgtaacagagacctagtccaagatccctccataaatgcacaaacaaatcacaagtatatccacttgcaacacatgtcaaagattttcccctaataataacataaaaattataaagattaatgctctaagttctatgaatttagacacctatacatcaaatgatttactatatttaaatatacatatatataaccatatagatgaagatctatataatcggaaatactaaccaagtatttcttagctcaaactcaagaaattgagaaagtctaggattttcaaaatcttgaggaacataatcgggtcttgttatattttcaactctcacgacaacatcataagcatctacacaaaataattgaaaacatgaaagtttaaatttaaatataaacagactaaattttttaataaattttaaataagaaggttaccatgagcaattctagaattaaccgacttgttttcgatcttgaagaaggaggctaatcgaaagaagttatttgaaccaatctacccacaagtgacattttggtgttcggaagaaacttgattttgaacttaaagtcggtaaaaggaggagatccgacggatactttgatgacatgaatgttttccatgaagtaccaacttccttcttcgagaactctagggatattatgttcatagatgtaaggaggagctatggcatcaataattgtccccttaataaaacataaaaggtttaactcatgcaatattaatagatcagattcaatgaatattccaagttaatacttacaatttcgtcgcacattatcatgtggtgtctcttctatccatcatgtggtagtgaaggccaaaaacttagtatcttaacaaacacattccactcctttttcgcgaaatttatgtatgagactcctttgtagtaaccacctctatcatctctctcgacatggttaatggttcgaagaaaaatgaagaaggtaagtataatggatataaagaagaggaggttacattttctcggttaatgggttaggatatgtgtacgtatataattttgaatatttagtttatattacttttaccaacaaaatcaaaattgaataaaaatttatatggtatgcaaatcttgtcaatcgaatttggaatctcaataaaaagctatagtactttttatggttacttgagaaaattaatgaatttgtaagagacaaaatgtgacataagttatcatatatcttggatgagttgtcaaatcttgttatcaaccaaatatggtaagaaaagttgtcaacaatatatttccattgagaaaggaagatatataaataaattggattcaatatagaagttaatatttatgcgaattgtattagtggacatgcaaaatatgtacaagagaataatatatatatatatatatattgaatccaatttattgacttcgcataaatatatatatatatatatatatataatataatagactgaaattctatatatataatatattttaaaaatgttaaattttaattgtgatatatgtaataatttctttataagtcataaagtaatgatatgactttaatatctatccaaaaagaaacttttaaagtagtacatagatctccccaaaaattattttttaaatgtgatagaaaggacattagaagacaattcttttgtatggtttgaaatcaaaagagtacatatatatgtgcttttggttttaataagataatgatattgagttgattagatatttagaaaatatttaatgatattggtaccattagatcttgtaataataatttaaaatatttaatagattttcttccaataaattaatttataatttaatttttgtaccaatcaattgatttaacatttatatcttattttcaatgtcataatgattaactatcgaatttatagtaaatttattttatatgatccagctttatatctagtgtttcatagcagttttatagaataattctataaataatgatgaccacgttcacatatccgatttgcggcgaacaaagtgaacaaaaaagttgggcctttcaccctctttctagttactctgggagctgatcttctaaatccatggaaactcaattgaagaaacgagtagacaattgaagggaatcacacattgaaagagaaggaatttggcgggtaagaaattgagtgtatataaagaaattgactcaccgtgacgcattagtatgatgcgttttgggagcatcttcttctcatttgccatctttttctctctctatatttatcctaaaccctaaaccctaaaccctaaactgttcgaatataatacattatatcttgtttgaaaatatagttaacaaaaaaatgtaggttcaaatactaaataatgtaggttcaaatactaaacatagttcaaaataaaaacaacttgaaatgacaaagtttggaacaaaatatacataaattcaaaacataattttaaatttcaaggagcggctacgtcaatctcttaattttcttcaatcaattcaagtcttgggttctatgtatcatactcgccttaaaactgcgggtgtaaacacacaaaaacatcagatcggtgagtttgtgaacagacatcatatcttttgagagaaagtatattcgagtcttccaaaacgatttcatcagcaatgttaccggtgtagactttagcaacagtaatgaatcatatccaccaaatatgttttccctttaaatacataagagaaactgaaaagtctttcctttcaaactgttgatcacatcaggcaaaacagttgggttttcgatctacacaaaaatagagaatattattacatgaacgtagtcattttaatatatgcgtttattatgtgataacaaaaaatacctcatcaaatgaaccatcaagcaattcaggggcagtggtgccaagaatatcctttgcatgactatcgaataacatgcatctagtttcgcctatttggtccataatatggagatgtaatcaaaacctaaaaaagtgttaataggtaactaaaattttgacacccaaagtattattgaagatacctaaaatataaaggtttcataaaaactcacttggcaacgaccgattttaaaaaaccattgcatatgtcccaccaaaatcttggtttttgaggtgtcttgacatctttccatttgataacttcctctttgacaaccttcttattgtgagcacgacaacaaaaatagtaccaagatcagtctgtatcaatggccgaaagaatacaaacagttttgcacttacccaccttcgaatgaagataaagagcgaacacaaactaaatttaaaataataaaataaataatagaaaggttgtaagataaaacaaattgatggatagtacaacagtaacagtgagaacttccatgattgtttgccttggatgatgatcatcatcatccccaatttttggtgcatagtgtcttttgtggaaagaatccgaatttcccaaagttaacccatcgtttggtatgctataattaaacataatagatttaaaaaactggtaaagcatgcaaatatatttagtgaaatagaaataaaattacttttgcttaaaaagtgccaactcagccaatgttgaatcaacgaagacttgtgaaacatcaaaagaattggaaatactcctattatctgcgtataaataaaatgacatgtctaaaaaataatatatatatatatatagtagtacatatcaatataattaccgttgtacagattgatcttcgcaaatcggattaagcaaacaacaataccatcagttgacttcttgcaagctttgtcaacgatctcaacatacttcccccaagtgtacatgccaagcgagtgtcacttaaatagaaaaaagaaaattgatcactaaataataaataaacaaaaaacttggcatgtacccagtggtatagattgtttgtattgcatgtatctcatatggaaattgattttttttgtgggcttgttgttagtgttcagatcttgaatttcagtccgatcaacaacctgacccataagatctgtataaacaaaaaagagaaatatataaatagttgactatgcaagagcatgtatgttcaaatttaaaatttaaaatttaatttagccgtgcaagatatttgggttagcggatccagaaaggatcacgtcaaacttagcaagggagacaaacaaagcatcgaagacgttatcacatgaagataccgtggttttgaaaacaaaatcaatcttgtatttcaagtcagaaatacgatactagacacttgtaggatttagagtgatggtcgtaatgatcttccaaacaccctcggttaagtacttttcaaacttcttgatctgctctcttctcacagcagcataaatcttatcaccctgtatgataaaaagaaaaaaaatgaaaaaaataaatagtgaatatgatgcttgccaaacaaacaatattatggaaaatatacacatcaaatataatatgtattgcttcatcaaccaaaatcatttcaatggattcaccagcctttacagagtattgcctccaaacatgacgcaatttaatctgaatacgccaagtgttcttgtaaggatttagtgatctcaacggagaaaagggaagaggattagcgagcatcatttttgtagaaatttagaaatgaatgtataaggttaagttgagtgattagatttaaatgagacgtccggatttataagaataattttttaggtcaaaaaatatgagcacaagattttattcgtggaattcaagtttagtgaatatgatgaatcccataagtataaaaaaatgtttagcttttaccgtaaaagtagttatttaaattaagaaatagtatttaaaatttatgataattccaaatgaagatccaaactatatatttgattagctataattatggataagtgatatattcgaaagctataaacgaatatatgcaatgaataaaataaaattaatgcgattcgttgcctgaaatattatgtggaacgataaaatagaacggtaataataaatcaattcaatggccaggattagaccggagaatccgacttcttaaaacaggataaaaaggatccgcgtgtttttagggtgaaactacaaatttgaacagttaataacaattcaattcaatggccaggattagacgtaagaacccgactttttaaaaccggatagaaaggatccaagtgttttgaaacggatttttcatgaaataaaatttttaacccaatgacaaatttgttatttcttccaacttcatgcgtatctcattaaacgtacttcttaaataataatatagatgcacttaaataaacaaaaatcttttaaaattcaaataattatatttatactcaaaaattcttattaataaacgttctaaactaaaattaatctagtagttaaccgttaagatttaaatatctaaattacaaaggagacatgaaaaatcaattttttatcctcacatgttctaaagtaaagactaagagtaattatttactaaaacttactgcagagattattgttatttatcttaatttattaattattttattgaaatacactcgaatcccgaaaattagctaacgagtttttttttttttttgaagcaacagaatttcaaaggtttaaactagaagatataacaatgtaacgaatggataaaaccaaatctttataaatctaccgaaaactctcaaaaaaaaaaaatcatcttgagagaacacacttcacatttcatatataaaccttcccacgacgttacaagctcctaaagaaaacctaatagaaaaacaagagaaccactaaccaaaccaaaaacaaaatgaagccatcctttgttcttctatctattgtactattactctcatcatcactatcggatgcagccgactttggatcaccgtcacagccaccgtcgatggctccaacaccgcaaccatcaaactccaccgactgttccagcgtcatatacagcatggttgattgtctctccttcttaaccgtcggatcaacggatccaagcccgaccaaaacatgttgtgttggggtcaaaaccgttcttaactatagccctaagtgtctttgctctgcgttagagagtagtcgtgaaatgggattcgtacttgatgatacaaaagctcttgccatgcctaaaatttgcaacgtccctattgatcctaattgtggtatatatttttctcttttggtcacattattatttattcgtttatttaatgtggattaatattaattcattgttttgttatttaatttgaagatgtatctactccggctgcatcaacaccaggtaagattcaaatctatcatatgaataataatgttatgaatttataatatatttttatgtttttaataaaattaattctcgtgaaatgtaatatagcccctgaatggatgctgattttcgattcagtttttcgatttagattttagttttagatttttgtttaaaaaattcaaaaaattggtttttgatttttgagaaaaataatgttgattgagaaaattttaggagaattagaaaactaaaatcatgaacgaaaattttgaaaaacaaaaaccaaaaactcttataaaatatagaaaacattcaaggccatatattttagtattttattaattaaccatgtccatgcagtttctccaccggtagagtcacctacgacttcaccatcttccgcaaagtcaccggccataaccccttcatcaccggcggttagccactcaccaccgcccgtcaggcactcatccccgccggttagtcactcatcaccgccagttagtcactcatcaccaccaactagccgctcatcaccggctgttagccactcatcaccggtggtggctgcttcatcaccggtaaaggctgtctcatcatcgaccgcttcatcacctagggcagcttccccgtcaccgtcaccgtcaccatcaatatctagtagcgggattttattagtatccaaactattcatagctgttgtgatggtttcttcttttctttacatcttagcttaggggttttttctgtttttttttaagtatttaataagttgaatcatcttcttttattttggattatggattgtggaaaaataatttgtgatggttattatggtttttatgagcaatgacgaattaagtttgttgtttctgtttctatttgattgagctaaaaacttgtgttataaatggtcttattgagctaaaagtcactaaaattcaattcattcaaaatgtaaggtccaatacaccctctcagtgtcctttattttggtcgagccaatctggttaattggtttgatattgatccataaaaattcacttctttgggttctttcattgtaagtcaacttctaaatttttttaattggaattaaactatctcaatcaaatgttcggaaactagtcaaaaatctgtaaataattttcttcaattttttattggaattaaactatctcaatcaaatgttggaaactagtcaaagatctgtaaataattttcttcaaaaaaaaatcttattttaatttttttccgttgctataaatccttacttatctaaaaaaagaagaagttgttttgtaaacatataaaacagaaaatgagttattatcttgtaatttcattggatctgaaaatatctagttttcaacaaacttcagattcttcgatctacatataaatctgttacattctttttttttatcaaagaaatcacattattttagtaactaatcctaactataaaatctttattcaagtatttgattatccttgatgaacttttaacaaacggaatcaaatataggaaactaaatcgacctatacagaaaaataatatctaaatacaatacttttttttcctacttagcacttggatggctttattggcttcatgatctagtggagcaagatcagtagagatttgatatggttcaagtttgttctggtctagtttttacgtcatttttatgtactctcgtgaactttcaagtttaataaaatccatggtgccattgaaaaaaaaagatctcaaagacataagcatacaataaaatttgttttaaaaagtttgaaacaagtcaacgatgattcgttaattttcattgctaaaatgattggatcattcacaattaacaaaaatgaggaaagaatattgagagaaagatgataaggttgccatacaatataaacccatacctaactctcaactatatctcaacccccagtcatttatagttactattaagccattaatattatttctttgttaatgagaccatttttattcttattttaaataatcaaacaaaatgaagaaccatatttgactgtgtttttttgcgatttttaaattattttattgtaaactaaactgtggaattatttattttgttgatattttaatttttttattcctacaaatagttaagaatttaatattggaaacatgaaacttgaatgcatgtatttctatcactacaaaataaaattgatggttgattttaacataaccttttttattggtcaaacattttaacgatctgatgattgattttatggtttgttacttctaataaaaagaaaaatatctcattattaaaaacgaaatttctatgtataaaattatcgctatattatcacttttactgaaccgatgtcaaattactcgattacaacatcaattgttataattgatgctaaactacatagtttgtatcatttattaataaataatttttaaattgatattgtttatttttgtgatactatgtaagtgctgcaatcaaccatttttcttgtattgtatgaaaatgatttgcctaaaatcatatatcagctaatcaaagagatagatgcatatgtgctaattaattaaacaatacatatgaaattatacctcttatataaaaccatcgacaaagagttgtgatgaatgatgatttctgtatattaatgatttttggtgaaacatataaatgattttataaatatgaatggtttgcaatacaatatgcttttatgaattatagtcgtgataaataaagtaaaagcatatctgagacactaacatatacgatatagtctagaatgtggtaaaagtttttattatccttagcttaacatggccatgcatattattgtgagatgaccacctcatgcgtatgaggtagatagatgaagaattggtaaaaatctatgaattgattttacatgactaacttgaacttgggtgcaacactaatctagatcttggtccaatatacgttctactaaatgagaaacaaaacattaaaacatttgaaacacataatttacaagcaagaggaaaataaaatgttggtaacctaaaccacccaaccttgtgtcaacgactcaacgtacacaaatacaattcctcttggctttaatctattatattacacattcctaagacaataataaatattttctttaaaacggaaacagaccgaccaaataaacgaaataataaatctcatacaatgcgatccatttgctatggcctcttgtgacgtatttgaagttcatttaacacagacggtagaaatttattgtcttcttcatggcttacctaatactattttaaaatagatatctttcattgcttaacaaatttataccattcttcttttattcggcacaaatctatgttttgctatcatttgctttgttcggatacaaatgtaaaagagatagttatgtagtaaactaaatgtagtaaacttttaaataagaaaattatgaaataaactcaaatcagcattttcttgatactttctaatagtcttaaatatacacaagaacaaaacataagtatataaccataaattgaagttagctaaagagaacataaatctaaagatggtaaaggaataatatttcttgatttggcctgcgaatatattgagaaaaaagtttccaacaagttaaatgtatcttatataaagcattaagaatggtatatattaatttaaatataacctagaaaaactatgcaaaagatttgtttgggtttgaagattatccacttaaatttggcaattaaattcaagaaactattggtaaattatatatgccaaaaactaaactggcaaaaaatattgaaatctccggagataaccgaaaaacctaagttttatcgattaaatctaatcatattctctagattttctctgaaattaaaaattattctgatgtctataaaaaatcacaaattccatataaaatttcctgtaatcatatatttttggtttggttaaaatttttttttttccaaaacttgaaataaaactttgtataataatactatgcaatagatttgttcgggttagaagattatccatctaaatttagcaactaaattcaaaaaacaattgataacataatatatctctgtaaactatatatgccaacataaaaaatatttttttctgcaaaataaactggcaaaaattattgaaatcttcgaaaatgaccgaaaaaccgaagttttatcgattaaatcttgtcatattctctagatcttctctctgaaataaaaattgttttgatgtctataaaaaatcacaaattccatataaaatttctacagtattcaattttttttttgttttggtaaataaaaaaacttggttctaaaactggaaataaaacttgaaataaaactttgtataatactacaatgagaagcattgggaaataatatagcggaaaaaacaagagtggggggatgaaatgaggtagctgaggaacaagtacggcgcctcctaacaaaaagggatcgaaaaaaaacaatggaggtgtggagtgtggcggaggcagagaccacgtgctctctcttctcttcttctccttcatcttcttcctctcttcatcatctcccattattaactcttctgaccccactttccttctcctcttctaactccaacctaccctcttctctcttccctctcttaaaaccctttctctctccctcattctcttccatgtcctcctctctgttattctttagctaaacacccacaattctggccttctctgatgcctctttaagccaatttgtatctctgcttccttacaaggtttaaagttttctgcttttgctgattttgttatttgggtgttttaaagttttgatttttatggtttagcaatcggaatttggacttgtttttgtgattttttacttgttgttggagttgggttttgttgagtttttgttatttgggtgttttaaagttttgatttttatggtttagcaatgagaattttgcacttgtttttgtgattttaacttgttgttgaagttgggttttgttgagttttcgacttcaatattgtagaattttagtgggtttggggagtttataatcattagttctgagatctctcagatttctaaaggaactcattattattgggtaatgatgctttcttacttgcaagatctttgcttatgattgcgttttgctttttctatactctttttttcttcatgtgattacgcaaaagcattgctgtcatctttgttaattccaccttgtaatctgaagcatctttgtttgttagattaagcaaccagattaggaattgttttaatattcctgttatgttctttcaagtcattttggtagatagcatcagtttctttgtaaagtgattcagtatgtgtttatggctgttttgtagatatatctgaagcttaaagggcagtgacaatggctggctcggttaacgggaatcatagtgctgtaggacctggtataaattatgagacggtgtctcaagtggatgagttctgtaaagcacttagagggaaaaggccgatccatagtattttgatagctaacaatggaatggcggctgtgaagtttatacgtagtgtcagaacatgggcttatgaaacatttggtacggaaaaagccatattgttggtggggatggcaacccctgaagacatgcggatcaatgcggagcatatcagaatcgctgatcagtttgttgaggttcccggaggaaccaacaataacaattatgctaacgttcagctgattgtggaggtgaatccaacttttgggaactactattatctgaattatcgtgttttactgtacagaacacatgtattaagctcaatttcagcaatgaagttttggtctttggagttatttttcattcatctgaacatctttgtctacaacctgtgtgcagatggctgaagtaacacgcgtggatgcagtttggcctggttggggtcatgcatctgaaaaccccgaattacctgatgccctagatgcaaaaggaatcatatttcttggtcctccagcatcttcaatggcagcactgggagataagattggttcttcgttgattgcacaagctgctgatgtacccactctgccatggagtggttcccatgtaagtaaatttactcttgttaagcttagcttgtgtaccagaggtatatattttcatttttatatactgaattcctatgttttcaggttaaaatacctcctaatagcaacttggtaaccatcccagaggagatctaccggcaagcatgtgtctacacaactgaagaagcgattgctagctgtcaagttgtcggttacccagcaatgatcaaagcatcgtggggtggtggtggtaaaggaatcaggaaggtcagcttctgtagatatgccttttgattgtggactaagccgattactatataagtacttattctggttttaaatttataggttcataatgatgatgaggttagggctctattcaagcaagttcagggtgaggtcccaggctcaccaatattcataatgaaggttgcgtcacaggtatggctgcttaactatatctcttgatcgaagcttagctgagttcttatctggttactttactagagaatttaaagtagtaatgcattgcttttctttacatttcattttttctaattttttttttgtatagagtcggcatctagaggtccagctgctctgtgacaagcatggaaatgtttcagctctgcatagccgtgattgtagcgtccagagaagacatcaaaaggtttgttagtggttgattctggatttttaattgtctggttagtggttatatagaaaaacattctgtccatttattcttatatagttatatacatcaatttttgttctccaactgagttatagtcccttttagcgattgcaaattattgcatgagctcttactttatcgtttgtatcgtagatcatagaggagggtccaattactgtggctccgccagaaactgtcaagaaacttgaacaagcagctagaaggttggctaagagtgttaactatgttggagctgctactgttgagtatctctacagtatggacactggggagtactacttcttagagcttaaccctcgcttacaggttggtttcatactgcagctttttgcgttgaaatatattgaaggtccggacttgaaaattgaatgacttgtttaacttgatgtttgaggtcaggttgagcatcctgtcactgagtggattgccgagataaatcttcctgctgcccaagttgctgtggggatgggaattcctctctggcaaatccctggtataatctacgtccttatttcttacaggcagcggttcctcttctttatccatgcacacgaataatgtactgtctgtttctctttaatttcgtagagataagacggttctatggaatagaacatggtggaggttatgattcttggcgaaaaacatctgttgtagccttcccttttgattttgataaagctcaatctataaggccaaaaggtcattgtgtggctgtacgtgtgacaagtgaggatcctgatgacgggttcaaaccaaccagcggtagagttcaggtaatgtgatatctgtggaatgcaaagtgaaagttcattcactgagaactctgtgggtaacacttgtatgaacttgcaacaggagttgagttttaagagcaagccaaatgtgtgggcgtacttctctgtcaaggtaattatatctatagagactctgctatataagtgtttcacaatgttttaaattttacgactacttttttacagtctggtggaggcatccacgagttctcggattcccagtttggtaagttgaatgaaataaatgtatttgggctgctaggttcttttcttgagtttacaaaaattgaaactttctttaatcttccattcaggacatgtttttgcatttggggaatccagagccctggcgatagcgaatatggttcttgggctaaaagaaattcagatccgtggagaaattaggactaacgttgactacacgatcgaccttttacatgtacgtttcttcttgcacacaaacttacactctgtgtatgcaataccctgacaagatcatttcaattgtcaaccaggcttctgattaccgtgataacaaaattcacactggttggttggatagtaggattgctatgcgggtcagagctgagaggcctccatggtatctctctgttgtcggcggagctctctatgtaagaacctctttctcagagatttatttgtcttgaaaagtttctatctggtgacgaaatgttctatctgtccagaaagcatcagcgaccagtgctgctgtggtttcagattacgttggttatctggagaaggggcaaatccctccaaaggtaatccaataccagggatctcttttgcctttctagtaatgttcttgtagcttactttttctctcttaacttgcagcatatatctcttgtacattctcaagtgtctctgaatattgaaggaagtaaatatacggtattcgcctactatcaaaattttacgtctctgcaatttcgtattttcctctgccatattatttttgcgctgaagatattgttaccaggcttactaacatgaacataactgttctagattgatgtagtccggggtggatcaggaacctacaggctaagaatgaacaagtcagaagtggtagcagaaatacacactctacgtgatggaggtctgttgatgcaggcaagttttctgcctttgttctatattacaagacaaggacatacatgtgtcgcgcagaaaaaaacttctggagaatctcacttccttttcttgttttcactgtcattgcagttggatggcaaaagccatgtgatatatgcagaggaagaagctgcaggaactcgtcttctcattgatggaagaacttgtttgctacaggtttctgctaatttttttgtgtgtttaccattttacttcacgtttctctgaagtcatctttagcttttaagctgtctgtcaattttggcttattcagaatgaccacgatccatcaaagttaatggctgagacaccgtgcaagttgatgaggtatttgatttccgacaacagcaatattgacgctgatacgccttatgccgaagttgaggtcatgaagatgtgcatgccacttctttcacctgcttcaggagttatccattttaaaatgtctgaaggacaagccatgcaggttcacttcattgctaaacaaaaagcctacagttctgtttaaattgattaacccatccattatttttttcacaggctggtgaacttatagccaatcttgatcttgatgatccttctgctgtaagaaaggccgaacccttccatggaagtttcccaagattagggcttccaactgcaatatccggtagagttcatcagagatgtgccgcaacattaaatgctgcacgcatgattcttgctggctatgagcataaagtagatgaggtaaacactgtttgtttttcctatttgatccaacttttctactagattatttgactatgagatagctcatacgttgcaggttgttcaagacttacttaattgccttgatagccctgaactcccatttcttcagtggcaagagtgctttgcagttctggcgacacgactacctaaaaatctcaggaacatggtaaacacctgtgtagtattcataatccggtttcttatatattgatatttgttttgagttcaagacttttaatcatatctaaataaaactctttatcagctagaatcaaagtatagggaatttgagagtatttccagaaactctttgaccaccgatttccctgccaaacttttaaaaggcattcttgaggtaattgactattatttcttccattagaattaccatcctgtttcttactctctgaattttttctgtctacttcttgcaacaggcacatttatcttcttgtgatgagaaagagagaggtgcccttgaaaggctcattgaaccattgatgagccttgcaaaatcttatgaaggtggtagagaaagtcatgcccgtgttattgttcattctctctttgaagaatatctatcagtagaagaattattcaatgataacatgctggtattatatggctcaatagctaattaacagatttttggttactagcgatgtctgaggcgtctaaataatcattttatttttcttgaataggctgatgttatagaacgcatgcgtcagctatacaagaaagatctgttgaaaattgtggatatagtgctctcacaccaggtctgtgatcatctttctcagaccaggtttttctttccgtcatgactatgtcactgaattggttcttcttttcagggcataaaaaacaaaaacaaactcgttctccggctcatggagcagcttgtttaccctaatcctgctgcttacagagataaacttattcgattctcaacacttaaccatactaactactctgaggtgcgtttggttgctttatgttttataatatttttgtctacactctcaactaatgatcagtttgtgtgtgtagttggcgctcaaggcgagtcaattacttgaacagaccaaactaagtgagcttcgttcaaacattgctagaagcctttcagagttagaaatgtttacagaggacggagaaaatatggatactcccaagaggaaaagtgccattaatgaaagaatagaagatcttgtaagcgcatctttagctgttgaagacgctctcgtgggactatttgaccatagcgatcacacacttcaaagacgggttgttgagacttatattcgcagattataccaggttcgagttcattcttccgcacccttattgttcaaaattctttttgtactgcaattgattacagaaaattttgacttcattttaacccgactcttgtcatcagccctacgtcgttaaagatagcgtgaggatgcagtggcaccgttctggtcttcttgcttcctgggagttcctagaggagcatatggaaagaaaaaacattggcttagacgatcccgacacatctgaaaaaggattggttgagaagcgtagtaagagaaaatggggggctatggttataatcaaatctttgcagtttcttccaagtataataagtgcagcattgagagaaacaaagcacaacgactatgaaactgccggagctcctttatctggcaatatgatgcacattgctattgtgggcatcaacaaccagatgagtctgcttcaggacaggtacttgacacagtataaactagctttggtgatatagtgtctagctaatctgttatcatttctggtttgtttatctcagtggggatgaagaccaagctcaggaaagagtaaacaagttggccaaaattcttaaagaggaagaagtgagttcaagcctctgttctgccggtgttggtgtaatcagctgtataattcagcgagatgaaggacgaacacccatgagacattctttccattggtcgttggagaaacagtattatgtagaagagccgttgctgcgtcatcttgaacctcctctgtccatttaccttgagttggtatgatcatgacgatgaaatttcttgtttaaagcatatcatattctttttaatggctatttactgtttgtctgatgcaggataagctgaaaggatactcaaatatacaatatacgccttctcgagatcgtcaatggcatctgtatactgttacagacaagccagtgccaatcaagaggatgttcctgagatctcttgttcgacaggctacaatgaacgatggatttatattgcagcaagggcaggataagcagcttagccaaacactgatctccatggcgtttacgtcgaaatgtgttctgaggtctttgatggatgccatggaggaactggaactgaatgcccataatgctgcaatgaaaccagatcacgcacatatgtttctttgcatattgcgtgagcagcagatagatgatcttgtgcctttccccaggttgctatggctgtgtccttgacaagttattgtttgtaatgtcagacaatatcctaataatatcaacgtgtttcttacaggagagttgaagtgaatgcggaggatgaagaaactacagttgaaatgatcttagaagaagcagcacgagagatacatagatctgttggagtgagaatgcataggttgggcgtgtgcgagtgggaagtgcggctgtggttggtgtcctctggactggcatgtggtgcttggagggttgtggttgcaaacgtgacaggccgtacatgcactgtccacgtaagttccgcttacaaaaaatttggttgtacaaacaatacagagagtaagagtacacatctcgatgacttacctgctgtgatttaatatttcagatataccgagaagttgaaactcctggaagaaacagtttaatctaccactcaataaccaagaagggacctttgcatgaaacaccaatcagtgatcaatataagcccctgggatatctcgacaggcaacgtttagcagcaaggaggagtaacactacttattgctatgacttcccgttggtttgttactgaattcataagattcacacatacgcttactcttttggctatttccaaccccccttatgttatttctttccttttcaggcatttgggacagccttggaactgttgtgggcatcacaacacccaggagttaagaaaccatataaggatactctgatcaatgttaaagagcttgtattctcaaaaccagaaggttcttcgggtacatctctagatctggttgaaagaccacccggtctcaacgactttggaatggttgcctggtgcctagatatgtcgaccccagagtttcctatggggcggaaacttctcgtgattgcgaatgatgtcaccttcaaagctggttcttttggtcctagagaggacgcgtttttccttgctgttactgaactcgcttgtgccaagaagcttcccttgatttacttggcagcaaattctggtgcccgacttggggttgctgaagaagtcaaagcctgcttcaaagttggatggtcggatgaaatttcccctgagaatggttttcagtatatatacctaagccctgaagaccacgaaaggattggatcatctgtcattgcccatgaagtaaagctctctagtggggaaactaggtgggtgattgatacgatcgttggcaaagaagatggtattggtgtagagaacttaacaggaagtggggccatagcgggtgcttactcaaaggcatacaatgaaacttttactttaacctttgttagtggaagaacggttggaattggtgcttatcttgcccgcctaggtatgcggtgcatacagagacttgatcagccgatcatcttgactggcttctctacactcaacaagttacttgggcgtgaggtctatagctctcacatgcaactgggtggcccgaaaatcatgggcacaaatggtgttgttcatcttacagtctcagatgatcttgaaggcgtatcagcaattctcaactggctcagctacattcctgcttacgtgggtggtcctcttcctgttcttgcccctttagatccaccggagagaattgtggagtatgtcccagagaactcttgcgacccacgagcggctatagctggggtcaaagacaataccggtaaatggcttggaggtatctttgataaaaatagtttcattgagactcttgaaggctgggcaaggacggtagtgactggtagagccaagctcgggggaatacccgttggagttgttgcagttgagacacagactgtcatgcagatcatcccagccgatcctggacagcttgactctcatgaaagagtggttccgcaagcagggcaagtctggtttcctgattcagcggccaagactgctcaagcgcttatggatttcaaccgggaagagcttccattgtttatcctagcgaactggagagggttttcaggtgggcagagagatcttttcgaaggaatacttcaggcaggttcaactatagtagaaaatctgagaacctatcgtcagccagtgtttgtgtacatcccaatgatgggagagctgcgcggtggagcgtgggttgttgttgacagccagataaattcggattatgttgaaatgtatgctgatgaaacagctcgtggaaatgtgcttgagccagaagggacaatagagataaaatttagaacaaaagagctattagagtgcatgggaaggttggaccagaagctaatcagtctgaaagcaaaactgcaagatgccaagcaaagcgaggcctatgcaaacatcgagcttctccagcaacagattaaagcccgagagaaacagcttttaccagtttatatccaaatcgccaccaaatttgcagaacttcatgacacttccatgagaatggctgcaaagggagtgatcaaaagtgttgtggaatggagcggctcgcggtccttcttctacaaaaagctcaataggagaatcgctgagagctctcttgtgaaaaacgtaagagaagcatctggagacaacttagcatataaatcttcaatgcgtctgattcaggattggttctgcaactctgatattgcaaaggggaaagaagaagcttggacagacgaccaagtgttctttacatggaaggacaatgttagtaactacgagttgaagctgagcgagttgagagcgcagaaactactgaaccaacttgcagagattgggaattc

SEQ ID NO: 75 - DNA, 115963 bp, Arabidopsis thaliana
gaattccttgacatataccaaattggtgacgttcccgctacgaatcctctcccggctattattgatgtcaacgactcacctccaagctctcctataattactgcaacaccggctgctgcatcacctcctcctcttcgtcgcggtttacgtcaaagacaagaaaatgtgcgcctaaaagactatcaaacttattcggctcaatgtgagtcaactcaaactctgtccgacaacattggtacgtgtatctaccccatggccaactatgtatcgggtgaaatattctctccaagtaatcaacacttcttagctgccattagtatggttgatcctcctcagacttataatcaagccattcgagagaaagaatggcgtaatgcagttttttttgaagtcgatgctcttgaagatcaaggaacttgggatattaccaaacttccgcaaggagttaaagctattggatcaaagtgggtatttcgtatcaagtataactctaatggtaccgtcgaacgttacaaagcgcgtcttgtggctttaggcaatcatcaaaaggaaggtattgatttcacaaagacatttgctccagttgtcaaaatgcaaacagtgagacttttattggatgttgcggcagcaaaggactgggaacttcatcaaatggatgttcataacgcttttcttcatggtgatttaaaagaagacatctatatgaaaccacctccgggttttaaaacaacagatccatctcttgtatgcaagctcaagaaatctatctatggtttgaaacaagcgcctcgttgctggttcgaaaagttgtctacatctctactcaagtttggttttactcagtctaagaaagattattctcttttcacatcaattcggggatccaaagttcttcatgtcattgtctacgtcgatgatgtagtcatttgcggaaaggctgtccgggaaaataatacctcaaaactcgctctcgggtcgtcaccctaaaagcgtgctctctgatcgtcacccgaagccaccgtacccctcgcactctaaagacaaaaagtccctcgagttaccggtacctcaggagcataccccgctcctcacgagtcgttgggaccctcatgtccctcgagcaaacaatactaaatgcttccgagcatatctccagactctctcatggatttgcgtaagacacctctatatctcaccatccatcatatcccctcgaggatatctttaggaccaactcccggccgtctcgtaaacacacatctctcttaggttgtttactcaaactttctaaaaatagacaagtcctttctgggaactttccatttttagaaaccgcataactcattcttaaataagacaactcaagtcaaatccccgaaaaaaaatactcatcttattaatcatcaaatgtcatgatctttacaactccaaacgaaaatacaattgaaagagaaataagaacaacaactcaaaagctcaaaaacactgaaactggaacccaaggataggcaaactcatgcagcaacctgcttctcggaccacttcttgaaccttgccttcatcctcgcctctggctcccaagtctcctctgtcacaccatcgcagtcccataggactttgatcaaaggaatcttcttccgccgaagttccttgatcctcctttcgagaaccttcactggtctcgcctccaaagtcatgtttggttgaagatcctctggaatcctagccaacacctcatcatccttgtgaagacacttcctcagcatcgacacatgaaagaccttgtgtatgccactggtcccaccctctcaacaatcctgaacggacccatgtacctcggactcaacttagtctctgagatagacctgttcagacctcgcaacatggccatcttgagatacactatgtccccaacctcaaactcaagctctcttctcctcttgtcagcgtaactccgctgtcgatcctgagcttacttcatgttcagcttaagaacccggatcctctctgtgatttcctgaacataatccgcaccacatatgctcctctcccccacttgggtccagcataacggtgtcctgcatggcctcccgtacaacgcctcaaaaggagtcatcccaatactggcctgatagctgttgttataagcaaactctaccagactcaagtaatccgcccaatgacctccccactccaagacacacatccgcaacatatcctcaagagtctgaatagtcctctcggattgcccatctgtctgtggatgataagccgtgctcatctgcaccttagtgcccatctctgcctgaaaggctctccaaaacgcagaagtaaacttggaatccctgtctgacacaatactcacaggtactccatgcaacttcacgatctcgctcacatatttcttagccaacaccgccgctacatcagtttttgtgatggccaaaaaatgtgctgacttagtcagacggtcaacgatcacccaaatagcatctttggttcgcgacacaggcaatccaaccacgaaatccatcgtgataaaatctcacttccacttaggaatgagtaaactctgcaataggccacccggcacctgatgctcagccttaactaactgacaaacatcgcactttgcgacccaattagctacatccctcttcatcccgacccactgataataccgcttgaggtctcggtacatcttagtcgctcctggatgaatggaaaacatgctcgcatgagcctcactcaagatctcccgtcgcaactcctcatccttaggcacacaaactcgctcatgcacaaggatagtcccattagctgcaaactaatattcagagccctctgccttaaaagccataattaacccgtcatccttctcctgagccaaccgaactctagtcagaagatttgctcgatccacagcttccaatcccaatggctctcgtgccacagcacacaaccgcaaagcaccaatctcactcaccaaggccttaacactctgccctggagccacacccacgcgcttacggctcaacacgtctgcaaccacattagccttaccaggatggtaagctatctccagatcataatcagccaccagctccatccatcgcctctgcctcaggttcagctctggctgagtaaagatatacttcaaactcttatgatccgtgaacacctgcactttcccgccataaagataagacctccaaatcttcaaggcaatgattaccgcagccatctctaaatcgtgagtaggatagttgcccacatgcttcttcaactgccgtgatgcataagcaataaccttcccacgctgcaatagaacacaacccaaaccaactctcgaggcatcaatatacaccatgtaaggctctccatgctctggcaatgttaacactggtgtactcgtcaacatctccttcaggctcacgaaaccctcctcgcactcccgtgaccacacaaaaggaacatccttccctgtcagcttagtcatcggctgtgccatactcgcaaaccccttgacaaacctcttgtaataccctgccaacccaagaaaactcctgatctcagtggcattcgtcggtctaggccaatctctgatagcctcaatcttctctggatccactgaaactccctctgcagaaacaatgtgacctagaaaacccatctctctctgccagaaactgcacttgctcaacttagcgaacagcttctactcccgcagtttctccatcactctcctcagatgtaccccatgctcctcaggactcttagaatacatcaggatgtcatcaataaagatgatcacaaactcatccaaaaactcctaaaacacgctgttcatcaacctcatgaacgctgtaggtgcattagtcaaaccgaaaggcatcaccacaaactcaaaaggtccatatcttgtcctgaaagcagtattgcgaacatctgcctccgctatcgggaattggtgataacccgacgtcaaatcaattttggagaaacaagtagcacccctcaactgatccaacaactcatcgatccttggcaaagggtacttgttcttcatagtgacccggttcaacccccggtagtcaatacataagcggaaactcccgtccttcttcttcacatataacatcggcgctccccaaggtgaagtactaggacgaaggaatcccttacccaacaaatcctctagctgcttctttagctctaccatctctgctggagccatcctgtagggtgccttagacaacagcgctgtccctggttccaactcaatcgtgaaaggatcagaccgtgatggtggtaatccctgcaacgattgaaacacatcctcgaactcatgaacaactcgaatgtcgctcactgctacctgccccacagactccggcatagatatcgtcaccaggtaagcctcgtagcccttctcgatcattttctctacctgcactgctgagatgacgagactccctgaggtaggtctcactccctgataacccaacctcccttctagccgctcaaaagaaactctcccacggtggcagtcaagatgtactctgtaatgatccaaccaatccattcccagaataacatcaacactctcgcacaaaacacattgatattaggcatcattttattcgtgaacttgttgaggcgaaactaatagttattgatcatgtgagtattgaacatcaactaggtgatctatttaccaaacctttggatttcaagagatttattagtctgcgaacttccattggtgtatgtgaactatgatgtgtttgtaaattgtgctgatctaagacaggaacataaagtgagaacaggtcatagaaatccaaagatgaatagaggatgaaacgttgcttgtcatgccggttcaaatcagacatcaaacgttgccatttaacaggaggtcaaagagctgagaagatcaaccaattgaatggacttgatacacacattaaaaaaaaacaaaaaaaaatgtgtgtgtgtcaaggtcactaagttttaatataagcaattgagaaaaagtgatattgctgatataacaaaagaaggagaatttcgaaaaacacctatcatcacactcctgtgttagttaaagtatcttcaaaggaaattccagctgcctgttatatgttgtcctgatcgtctaggactgaagacatgacagtgtgaaagactagccactaatcactgagctgattcctcaacgatctgattggttgtgacagtttcttgctgagttctgaacaattgatgggaacaatgcactgaactgggtcaaaagtgaaaggtatattgaagatcttaaatatggttggtactcgcttgtatcaattgactatttgggtcactattcgagtgcatgatgaaagttgtgattgccgaattatcactcaaattattatggttattgattgattgaatgtgtatttgcaagtgagcactaatgaattgttgagtgtttcagattgtcaagtttgctgagtctaaggtcgtctgggccgtttctaggcccatgaggtgcaagtccaacaggcaggaatcgattggagggaaaaagctagggtttttaggatcaaatctgaaccgctcaagaaagtgaaaagtcgtttgcgtgctctagagaattcattctgatctctgaagaaaaaaaaatcatttccattctctgcttgaaaatgaaatcgtttttcaagacttttgtgcaatcaagaatcgagtcttcgggatccgaatctttatccacaacatcagaaagctacaacccaaatctgctggacgatcttgtgagtacgcctcacaatcagttggtgttgtatgcagattttggcgggtcagatctgcgacgtacttcatcaccggaccgctccactccacatgttcggcttcctgttgagcttgtggatataagtgatgatgataaggacaatttggcttccatcgttccagtcaaaagccaacaggtttccatgccgatgtctgccaaagttccaagggtactaacagtggcatcgcgtctgacaaagcgcaaacgagacaccccaagtgagaagtttctgtcacaaaaacaacagaaaggaaagggagttgttgtttcaagtcttggaaggagcgatctatttcatgagttcaaattcagttctcctctcgccgaacaaaggtacttgtatttctctcattgacaaatgatcaaggaaatgaatttggatcttctggttgatcaatggatcaatggatcatggatgtgatttctgaggcgagtcttctcaacacagtaacgggagtccaaggttttgaggaagaagtggtctatgaattctgagccaatctaccctcagttcgggtggagggagacttagtcaaggtgttagtaaggggtttcgagtgtgaattctcacccgcaaagatcaatgctctgttttatatgcaacatgttggagccagaactcaatgcattcagactgcggggttggttgatgaggaggtggctcggtatttgacagatggtcgagtccaaaatctgcagaacattgcgatgaacaagttttcagaaaactgcaagagtctttttaagatatcgtgtcggaattggtctccccaaaccaatgaagggtatgcaagcattgacagaggaaggcttgtctatcgcatcgctcacaaaatgccgattgattttggagaaatggtgtatgatcatgttcttcaactagccctgatgtctgtctccaagttcttcctgatgttccctagtctaatctatcggttgattcagactcaacaccctgacatccaaatactcagacgcacatctgcaagtgcttcacaaggtcagtcaactggtaggaaggtgccatcttcaacagcaccagccacttctctaggtcaacattctgcatgctgcattggatgcaggtaagtgttgtgcctctgctctctgttcttcgcattgaaatttttaactgagttgtgcactcaagcatggggagatgatgcgagaactgcggatgtggatggggactttgatctatgaactaagggggcgcatgatttgtgggggaggtttagtttgtgggggagtattgttttaagttgttttgagtgtttctagtcgtttgggtctagggttattcagaccagaacaatgctttgctcgagtgattgtatcatcacgggtgtgtaataagatgtttaatacatggttttttaaacttattactttatgttgattggtttatagttctagattctatctattggctgtgtggtgtgtcttccatttgagtttcaggttatatcaatggaggaatgcttgagtatcaaactcagtcaaaaaggtggagattgaagatgcatagttcaatcaatcagctgatggcgatcagaaccgtgatggatttcaggaagctgcatcaaattccatcaaacgcctgagttgctgacatggatgcaagagcagacgtggcaagctgtagcggatgatgtggagagccaagaatggaagttagcttggcgtggtgtcaaagacaagattcaccgagaagatatagaagatattgtctcgaagaatacgaaaatgaataggcttggaaacaaggaagattccatatcgtgagattctcggagatcctaagtttagggttctggagaataggtataaggattcttgaacaaagggggagccgctttgagcaccctaggatatttttgatacatagtgtaaaaacttcaaagcgttgtaatagcttggaggtgagtgtgtagttctcttcgtcttcacgagttagtgataagaaacagagaagagaattagggcttagttatttttagtcgggtttgatcttttgggtagattagatcaagtaagaatcgagatagtacttgtaaaacagttttactatcaataagaataagtgtttaagcaactctctgtgttgtgttggtctctataccctcttatgttgttctaatctaatctacttatatcagtgccatgatctgactgacgaagggcttgcgtgctgggctgaaccaagtttagttcccgaatgtctattatcgagtcttaaaaatctcgattgggaacaatatgatggtacggaagttgaggaagaagtagcagcatcttatatattaaagcagatgtcgaaaggcctcacgttcgctctcagaaaatgaactgacggatttgtccctccccccaccaaaggattttaaggacaaattagtcttcttactaattaatcaaataacttattaatttctttccatgttttaatgtgtagaaaataaaaaaaagctttaattccttattaaccctaaatttcctattttttggcgcccctaatcaatcctaaatattaaccctaatcaaacctactcaatcctaagttgcccacaaccctaacaggcttatattatgctcgtataatttacgccgtcgtatgtaaaaccctaaaaccttatgctcaaaattcctataaatataggatccctactctcaaacacaaacatcgtagtttgattttaatgcaaagcaatagcaatatcgtttatagttattttttgtatttcaatctaggtcttttctatgatgcttttaatcgattttttcgaaacctttttatgttatggtcacttggaaactaagatctcatacatctttgccaattggtgatgagttgtttacccaaaatttatagtttgttcgattacatgttttggatctatcgtcgttaccatatgatataattaatttggaatttctttcttttaatgttagtggatcgatcccatctttaaagtgatggtgtttgtgtatgattttgcaagttggtgtttatgcaacgtcgtaaattggtgcaactaaccaaatctccaaaaaatctgagggtttgtttaatcctgcaaaaaggtagtctcttatctaactatattttctattttatcatggatttagtttttttttttttttttctggctgctataaaccctagcgttcgaattgattcacacagatcatataaacacaaacattgtatgtaagtcattgattttgtttatagtttgttcgagtttttttgtttatcattggttttgagaagaaatatgcatgaaagtttgtcaatttagctgaaggaacgttattttgttgtatatgtgcagtcttagacattgatgcggtaggaacattgttacagggaaacctgcgattcacaagaacaatccaaatctccaattatcattcgaaaccaacaatcaatcgatgttcataaaacaccaaatgattcagctagctctcgatgtgagagaaatctagcacttacaaagattctagagaattctgaagattacagattattcgataatgaaagcatgagcataacatgttgctcttatacaaaaaggtaaagaaagtaaacgttaaccacgttaataacgatcgccgttaacgtccattgcattgccagctcgccagctcacaagtactttgcctaacatccgacttcacattgccagctcgccagctcgtcagctcaccagctcaccacacgttaatcctgtatcaaatctcccccctttcacaaaaccttgacctcaaggttctatgcttcaaactcaggaaatgttttctgcaaatcgaagaggaactcccatgtagcttcttccaaaggttcattgctccatttcaccaacactttagtgacagcttttccctgacgattgaccattttcctttccaccactttctcaggtactttctcaaagacatcttgcatcactgaaggcaaatgaactgttgtagagacattgcccactagcacctttagctgcgaaacatggaacacaggatgcacttgagagtaagaaggaagagccaacttataagccacttcaccacaacgatcaatgatcttatatgggccaaaatacttcggtgacagcttctgattagcacgcatcaccacagattgttggcggtaaggttgcagcttcacatagacataatccccaatctcaaattcacgttcagttcgatgctggtctgcaaattgtttcattcggtgttgagcgcgcatcaaatgaaacttcaagaacagcaacatatcttccctctcctgcaaagacctagccacaaccgccacttttgattccccaggcagataaggtaaatggactggaggtacctgcccatacactatctcaaatggcgtcatcctgctagaagagtggtaattggtgttgtaccaatactctgccaatgcaagccatttactccacaactgaggtctgtcatggcacatacaacgcaagtaggtctccaaacatctgttcacaacttcagtttgtccgtcactctggggatggtaagcactcgtcaacttcaatgcaactccctgtaacgtgaagaactctctccaaaattcacttgtaaacacaacatctctgtcactgacaatcgaagtggggcagccatgtaacttaaaaacgttgtccaagtaagcctgtgctactgtcaatgcactataaggatgtgataatgcaatgaagtgagcagccttactcaagcgatccacaacaaccatgatgactgttttgcctcctgaaactggtagcccctcaataaaatccattgacacttcactccaaatggtatcagggattggtaatggctggagtaaccccggtgaagctgcaggatcagacttacattgttgacatgtaccacagctgcgaatataagcttggatgtccttaatcatgcctttcgagtaaaacagtcctttaacacgctgatgagtcacgtccctgcctgaatgtcctcctacaccagacccatgtaaccaaagcaatattgtattcttaatgttgtcatttgctggaactacaatcttacttttccttctcagtatattctgactccaagagaaatatttttttgaatctggatcacgttgaagtgcagtaataatatcttgtaactgagagtcattggcatagcctgcttgaatatccttcaacaaatcacactccaccactgtcatagccatgtgcaacacctcagatccttctacccgagacaaagcatctgccactacattttcttttccttgtctatactggatctcgtagtcaaactcgagcaatttaggaagccactgctgctgaattggtgtgttcaaacgctgctccaatagatacttcaaacttctttgatcagtcttgattatgaagtgactctgcagcaaatagtgtcgccattttcggactgcaaagataactgccagcaattctttctcatagatagataggtgtagttgcttcccttttaattggcgactaatgtaagccaaaggatgtccctcttgcatcaaaaccgcccctatgccctgaccacacgcatcagtttctaccacgaattgtttatcaaacagaggcaaagataagacaggcgcttgacacaaggccgctttaagatcctcaaacgcttgttgtgctactgctgtccattcaaatgcatcagttttagtcaaagcatgtaatggtcccgcaataaccccaaaactccgcacaaaacgtcgatagtaaccagcaagacccaagaaccccctcaactgcttgagtgttgttggttgaggccactccttcacagccttgattttcgcaggatcagtttcaatgccttgtgcactaatgaagtgtcctagatattcgactttaggaaccgcaaaagcacatttgctgagtttggcaaacaacttattagctcgcatgacttcaaacacttgcttaaggtgctgtctatgctcttccaaggaagaactataaaccagaatgtcatcaaagaagaccaagacgaacttacgtaagaagggcttgaatatgaaattcatgagaccttgaaacgtagccggtgcattagtgagtccgaagggcatgaccaagtactcaaaatggccactatgcgttttaaatgctgtcttttgtatatcatcaggatccatccgcacctgatggtaaccagcccgaagatctatcttggaaaagataactgcacctcccaactcatccatgagatcctcaatcaatggaataggaaaactatcttttacagtcatgccattcaactcacgatagtcaacacaaagtctccaagttccatccttctttttgaccaaaacaacaggtgaagcataaggactagaactagcttgcactgttccattagtaagtaaatcctcaaccagtttatcaatttcattcttctggtgtattgaatagcgatagggtcgctgattcaccggattagacccctccaacaatttaatcttatgattatgcttctcacgaaatggaggtaaagcagtcggttcaatgaatatatcaggatactcattgagtacttcttccactacagactcctcaccaagctcactggttaaagcattaatagtacaaagttccccttctgtactctccgaaacttcttgtacacataacatggccagctgaacttgatcttcctgtagtttctgcagtttctgcgccttcacttccctgacagaacctgatgtaagtccatgtaaaagtactttctgattattgaatttaaatcgcatttccagtttcttgaattcccaagagatacgacccaaagtctccaaccattgcacccctagtaccatatcaatcccttgtaagggaatcaataagatatcagactgaaaagttgtagtctgcaacttccaagagaaatcagtaactttaccctcaacacgcaatttcctgccatcagctacagatacacgagttaacccagctgtgtccaccttacacccaagtttagctgctgtatttggatccagaaagttgtgtgtcgaccctgagtctatcaggatgaagataatctttttgtcatatgttcccttaactctcatagtcttgtaaccagctattcctgaaaccgcattgacagagatttgtggcatatgttcatcatcgtcatttaccaactcttctctagcatcttcaaactcttcatcaacatccattcgaaacagttgtgttttcttgtgaaccaaataatgttctggagtgtacttctcatcacaaaaatagcatagccctttagacctcctatcactcatttcttgttgagacattttcttaggttgctgactaaccggtttaaaatttcccttgttcccataatgatctgtcttagactcgccttccttctgatatttgttataaccgccagtaggtgcagaacgatttgtggaccaagtagtattagctggtttcttaaggtgtgctttctcatatgtcttgcccaagaacaagcaatgtctcacagtttgaggctgaaacatccggacgtgcatttgagtgtctgtcctgagtcctgccaagtacacactcaccaaatattcttcagagagattaactcttgttttaatcagctcaaatttctgatgataatcaatgatgccatcagtttcctgcaaatgttttagctccgccatagggtcatcacaatcatcctcaaatcgttccttcaacagcttcacatatcccttccaatcatacaacacctcaagaccaacacccgactgaataaaggactgatgccaagtagaggcatggctatcaaagtggatcgctgccattttaaccttcatatcttctggagttgaatccacaccaaaaaactcctcgactttaaacaaccactctttcaaccgtgtaccatcaaaccgaggaaaatcaattttccctaaccgtgtaagattattataagcattaaaatggtctgatcgcacctgctgatgacgagcatcacgatatggatcaaggtaaccggatctgttctccatcgactgagacgacctcggcgcactccgatctaacgtcgattgctcatccaccatcttaccagctgtagatcggctaagcactgcatacaaatcagcaaactgcttcatcatctccttatgttgctcagcgaccgtcgtttctaaccgcgtaactcgggaatccagcggaacctccaactccacctctttcccctttccgtcaccctcctgcgaccttgtagtcaccatgttttccgaggaactacagagctctgatacctttgttacagggaaacctgcgattcacaagaacaatccaaatctccaattatcattcgaaaccaacaatcaatcgatgttcataaaacaccaaatgattcagctagctctcgatgtgagagaaatctagcacttacaaagattctagagaattctgaagattacagattattcgataatgaaagcatgagcataacatgttgctcttatacaaaaaggtaaagaaagtaaacgttaaccacgttaataacgatcgccgttaacgtccattgcattgccagctcgccagctcacaagtactttgcctaacatccgacttcacattgccagctcgccagctcgtcagctcaccagctcaccacacgttaatcctgtatcaaacattcaacatgtgtcacgcagctctcaagtatcttaagaaaggagcgcctggaagagactcatcaagcggtcagttcgattattaacagaagcgctactttgcactacacagcttctaggtaccaaatacatgtatctgcagccaaggtaatttgattagtctgataaagtcattcagtgtctcgagttttggtttggcaatcaagaactaacttaaaggaacaatagaatgtagcaaaatgtgatcttaggagtttgaaacttgaaacaggttgcagttgatgctaccacaagaaacttggcattggagtggggaactgactatgatattagagtgaacaggattgctccaggtcctattggaggtacaccgggaatgagttgtacctgaggagattgaaaacaaaaccagagagtacatgcctctttataaacttggagagaagtgggatatcgcaatggctgcactctacttgagctgtgattctggtatgctgagttaaataaagcacactctttagtataaaatatatatagatatagatggttagatgacgaaactcattgcttgatttgtttaacagggaaatatgtgagtggactaacactggtggtagatgcagaactgtgtcttagcaaacctcgccatttggccaaagaagcggtgaaacaactctctcgtgcagtggcgaagaagtctagggccaagcgaatgattattactatgttttggtgcatattatacaaagaatgtagtattaaaaccaaaaacgtctttggtgctttggtgcatattatacaagaaaattctcaccaaaaacgtctacgaggaagcaaaaacgtctaagccaaaccaagatgaagtttcagaccagtctccagctctgaatacgtaattatggtcaaaactcaaacgtatggccgagccagaagaaaagtacaagtcccttgactcaaaatcagcagatgatgctttagagaaagaggataaacttcggtccgcttttgaccgggttcaagtgcttgagcatgagttaattatatgagaccaaaaaggtaaggtctatattacctcaatcatcaaatcactcgaatatgtagtaataattggtttggcttctttattttttccggcttaggctttggatgaaacgatggttaatcaaaagggtattcttgcatatattgagaagaaaaagaagaagaagagaatggtgagacaaatcattaagagagcatctataattaatactacattctttgtataatatgcatgaaagtttgcatatgtaatttaatttagtatgaattggaaatatattacgatttatcatctgatccatataatatattaatagatagcacttggagtatgacgataatccacaacattaggaagtttgatgaattgaatttggtttttacagcgtcacaagtatgggatattttctggctcggtccaccacctaagaatccttggcttagacaataaattcatgtactgtgtacagaagaaaacattattgatgttttagatctgtatttatgtttggctgaaacaaattgtttatctacagagttatggactttagcaatccaatcttttttttttcttttcttatacgtcgttttattgatcttagcagtctttttgtccttggttattttctgaagacaaaatttgtatttttcatacactattctttttggcagctactgatatcacctcggaaatataaaatatggcctctttgatattatcatatgatcctaattacagtaataatcttttgttcttttgtaccaatgcaaaacataaaagaaaaagtacagatcaaagaagaaaagaaaagaagataaacataaaagaaaaagttttattaaaaaaaaaatttgaaaaaagagaaatcaattctttcgattttttagacctagaattgacctcttgagttggttaaggcgactagcgcttgcgtcccaaccatgagtattacttgggttaagtccccaagcaatccaagaagaaggagaggttccatgttggcgaaagacgatggaaacagtaccgtttggttcgttgtatatccagtggagaaaagagcctaaggtcggagctcaaggtaataggctttcggcaagacaaagttattgcagaaattgtgtttgtacacacaacaagactaataagaaaagagttgccaagacggcgaatagagcgtgttaggagattgtattcgattcatgtctttgtgttttattttgaaggttgggtgggattaatgagagttacgaggtttttaaagagatatataggcacactaacattgatgcatttttaaaggctatgaaagttggaagctggtctttgttgactttttgtatcattcttttctagatgtgataatcataactctcatatatatcaactttaaggttttttataaggacatggttataatatgaaaagtttttggagagaagtccccatttctgtaaaacataagttttgcataaacgtatccgaatacacacatactttttacttctcggattagtttaccagttgaagactatagattgacaagatccatcatgaatcccatctgctatcgttattcgttacgattgtctccaccacatgcaccaaattttgttgttattagcctttgttcgtcattgccaacgttctaatcatgtagtaactgcttgaatgatcaagaggtaggcagagaaatagaaaataaaagaatgagcagattaaagaggaggatgtggaaaagcaaagcagaaaagataaatcgagaaaaacatttaactcgctagaagaatcatacgggttttctaccgagtttttaaaaatttggtggtttaaatgtatttatagataaaaaaataagataattcaagaggagaaaaataacaataatactataacaaataataacacagtacgtagttttttcttcacacaactatattttctttatcttaaattaatccaatcgctagctctgtaatgtcgttttcttcttctatctaaggggttttaattgtgaaattctgtcttcattttagaatttatctttgttgttgcttatcagggtttgtagaaataatcctattcaagttcctataaatgcatggcgtaagaatctttgaggaggacctgcgtctagagaaggtaaatttttcaatctttatttttttttatggtgtaagatggttcaccttctcaagatatgcctttttttatatccgatcaaaaaaattcatgttttgctttaaatctctgggaattcaagggagctgagatgatgataggtttatgttggttgataggtttgattttttactgtgataagtatttttgagttttatgatgggtcattgcaccgtaaactggagattgaagaagaaaatataagaagacaaacgtaaaagagaatattttatcaaaaaaacttataaaaagcaaaatcaattctctcgacttttgagacttttagcagacctagaaatcaagatggtggatactttcggtatttggttttgttgtcgttaactaatccattgttctctactctaaatttgtttagtacatatgtcattttcatatcgtttttcttcagtacattgttcagtgctatgataagtcacttcagcgtcaagatgacaaaacagatttttgataaggccatgcattttataaagctccaaagtagagatatatttgtttattggacatgtcccaaactagaagtttttccggtgtggaggagactaaaaatacactaattttggtgtggtttacatagacaagaataaaaagacggtaaatgtcaatagttgtgccttcttctcatgtaagttaatcagctacttgaacacttgtggttcttgaggatttaagtgctaaatactaagaagagcttatgagatcatgttctttaccatctcaacttctaaaacttttatgtaatttgagtgagctctgtttttttttttcaatccgttgaaaagttttgaaagagatgtgatggcaattttgaaagtgtatagtagtcaactattgtgttattgttggaaagcatgtattatgttatgtgtatttctttaattaccttggtgcttaatttcttattgtttactttaccaagaattttaaatagtttatccaaatttatcttaaccttcaattatcttagaaaaagtagtccaaagaaacataggttgaataattaaatgaaaagatattttgagaattcttataacaaagataatgctagaaacaaagttgatagagtcatccatatttttctggttattatcgatgggttaaaattttatttgtgggagtattgaaaacgtatattcaaagggaaaaaatgatttcgtgagttaaatttgttgccgtctacaacatcccagcgtactatgtgagtcgacatgtagaatttataatttaaaactgttattttaataagtagttctcttacgtttaatatatttttaaatataaaaataaaataaattatctaagagccaatttcacgaaagaaaaacaacaaaaagttgatcttaacagagagttaatttcattctctattttagatgagtgttagaatatatatatatatatagcgtcatacatctaggctaagttaaatataggtgttatttggtaggggttaagatatagttgttaacatttagatgaagctaattatataggtttgggtttataaagtaggaattagggtttagtgttataaattgagatgaatttgaataactaatttgggtttataaggtagggttagagtttacggtttagggtttaaagaataactgatggaagcacatacaatcatgtaaacttatatctttagtacatatctaactaaaaatatttgaacaattcgaaacctcattagataatatttaaaatgatttatgacttaaactacattgtaattgtgtttatttggtaggggttatggtataatgttttacatttagaccaagctaaatatcaggttgggtttaaaagtatgatttaggctatagtgtttaacatttagataaagttaaatatagattcgggtttataaggtattagttaggatttaatattatccatgtagacgaattggaataactaatctgggtttataaggtacgtgttagggtttaaggtttagaagtctcatgaatattaaaaaggggtgctaagtaatttggaaggattaggcacttctggggcttggagttattcctcttctcttccgttgggaataaattttttagtgaaacttagaggtccaaaaaacgagagggaagaactcgaatatttctcaatttgaagaagcttccgggggatcctttttttgttcttgagacccttgaagctaatcagtaggggtcctaaacaggctctagaatgtctagattgaaaaagtagcatatataatcttttttatttcaagtgagtaaagtttaccctgttttagtgtactagaagataagagatcatgatcttgtgtgtaagaaatctcaggagacaagctgaagtagtcgaaactttgtgtaaaaccaattaagagagttacaagttctttataagaattttgttgaatttataagctcattgttgctgaattttttaatttgtttaattacttattattttgaagttagattttgatactgtcaaaagtatttatgggtcccccgcataggcagacccaaataagattaaaggaggtcaactggtctctctagaattctatatttgcattgtaaccctttaaaattcatgatattatttatcttttttttgtttttacctttttaaaattacaaatcatatgtaaaccttttaagttttatcgtatgtttcttctactttgtggtttaacagtatttcttacatgttttttacttttttttttattcacccataaacattgaaccatatttttttttattttttttatgaagtttttcttagttttaaatttttttagttacttatttttttgaagttatattttgatactgtataaaatatttatgggtccgccgtataggcagacccaaagaagattaaaggaggtcagctggtctctctagaattctatatttgcattgtagcactttaaaattcatgatattatttatatttctatttttttaccctttaaaatcaataatttttatgtaaatatttaaaaatttatcgtgtttttcttctactgtgtgttttgacactatttcttcgttttcaacttttttgttgattcacccataaacattaaacctggtatttttaaaagatatgaagattttttttagttttttaattacttattatttaagttataaatttgatcctataaaaaagtattttgggtccttgacttgaaatgtgaaattaacgggttcaatgtgatagttatatcctaaacattatacgacacatgtctttgatataggtaaatagatataaatataggtgttgttatatctatataatatatattttttaatttcttaaatgtctctaacttatcactctaaattatgattgattcaagaagatactaattttgaaattttttgttcgaatttaaaaaattcttgtatgcttgatctttgaaatttaaatttaattttgaaaaaaagtttttggccgcgcaaggcgcgggtgactcacctagttcatcttaagaaacgcaaaatgtttaaataaggcaattatctcccctcactccactgaccctaacaagaaacttgagatgatcaaggtgttgtcattgtcgccaaggggtacacgtacttgtcagcgtctatttgattaaagttgtcttctatttgattgtgtttattattttatagggtttttttatatttactatttttgatattttttgtttaaatgtttttgatccaagtctctgcgtaaaaaaagattacaagaaggaaccattttatttccttggtttatcttcagaattgctgaccatttattttcttttttttatgtgggtttgtggttacatcatgaaccacttaccaaaaccagagaccatcgatgatatctacatctacatttttgcagtcattttataaaataaatcttgtagttgagacttatttataatggttgctactggattttaatgtttgttttttataatttgaaataaaatcttcaaattaaatatttgacatttcaaactcttcccaaaatcttttcacattaactacacgaatagttactaaataaaattccataatatttaatatcatttaattattacaaaattatcatttttgatattgtttttctgtatcactataacaattcgattataatcatcaaatcgtaaatatatttgatagcatttaattattataaaattacaaataatttagacaataatttataaacatatcataaataagattcacattaataaaataaatagatttttttacgggacgagttggcgggacgggtttggcaggacgttacttaataacaattgtaaactataaaataaaattattttatagatagatacaatttacaaatttttatatatactaaataaaaaataaaaaattgtccctgcggtgtaccgcgggttaaaatctagtctatattaaacattttacaacagttttatgaaataaatccttgactttaaatttatttacaacccaataccattggcattaaatatttagaaataaaaatatttaattaaagatgaaaatcaaattcgtttggcaaaaatttgctaaaactctggaaaaatctttcctaatgtcgataatgctcatttaaaaatctaatattattaattaatttcaaataaaccattttgaaattgtggcatgaaaaattgtaacaaatagattttgtttatatattctataagaaagatattagaatgaaaacttatcctcattaacggtaaaattaatataaaaaatgcaaagaaaatcaaatcgaattatgatccatttttccttcaagggggtcattggatttatttttcatgaaactttatgaacatttattattcttcaaacggatgactagagatttttctaaaatttgaacttgccaaatcgacatcatatgatttgttaacatgattaaaatcactgactaatctttgtgagaaaatataggaaatatacatatttaaatttttggttttaaaacaaacaattaaatgctctaaatattcatctttttggcaaattaaatatctccaactgcttgacctaaaaaaacttcatgtaaacattatgacactcccactatatatatatatatatagaatagatttgcaatcttcacaaacaaatgatcccgcctctagaaaagaaaaaaaaaacaaatcttaaaagctttataatgtagtaatttgctcatatatgtcgttatcatttgtgttttttaacggccgaataacattttcatagggtagatatcgaccatatatagggagagagtcactactttgattccttttatgcaattatgaactctacagaatttttcaatttctttttggtctaattaggtgaataataaactgtgtgaagttagttttcaaaatctggtattttccccacttatatatcgacttaccaatgattcattattccactcgagattctcgtgcaaggtttgatattatggtcatatttacataagactgtttttatttgtttggtttggtttattttgtattattctcacataaagaaaaataagttaatgtagtcatgtttcattttcatgtatattatctactaggcttcgtgatatcgagtagacgttatcattgtactctaatttcgattttaatgtttctttgtaggcaatatcacttatttttaataatattcaatggattaacccaaaaatttaagttaagtgtctagaaatatatttatattaatttttgtcaatacacacatatctatgattagctcaaatattttaaaggctaaatatttgtacttttaaataatatacagattttaattacacaattagttgtaaaagttatgtttttgtcttaataaaaaatataatatttataagtgacaaaaattatctaaaggaaaagacaaaattttaagagctcctggatcaaatggtgtggcaggtttgaattggtattttccggatgtgtataattagttaagttttttccacctcccaatctatcattataatactaaactactaaattaccatataccacaagttaaatctaataaatatatacattttggagtatattataaaaccattcctggagtttaaaactatttacaatatcatatcactgatatttaatatttcgttataagtaacaaattaattacttagcattcaacaaactttcctctaatctctcttttaattatattgataatatcgattttcttaatatatatgaatagagattcggatcttccatatatgattatcattttcttaggaagttaaacaattattttctgaagctaaacaaaaatttaggaaactaaataaataaataaaatcattttaattatttctaagctaaactatattacattctgatctttagttttaaatcattcatttttagttaataaaaagaataatatcatattttcagttagcaaaatgtacatgtacaagatattgaccctcggtaaaccgcaggttgattatttttgttttgatttaatttattattttgattcaatatcatctatattcaaataatgattttagatttttaatttatcaactcactgtttatatctatttacaccgctgaatattttagtatgtttcgatttagttttgtatagttccggaaacatgtatagtatacgcatctatatagagagtgtttatctactaattttatgtttacactaggttttaacccgcggtttaccgcgggcaatcggtttatttggtttttatactaaatatttgaataaatttgatatcctaaacttataaatataaatttctagtgattagtgaagaatcgtaatatatgatttggatattgttgattattgatttcgtgattgaatatagtgtttttagggatggaatgtgatcatattttgatttcaaaaaggacatagattccttaattttattgaacggtttagattgaatcagatcatataaagtttaggagattgttaataccaaattgcccttaatgattttaaatagcaaagaccaaaatccaaaattgaaatcaaaattgagaccaaattagaaaaaaattcaatttgtacttcccttttaataataaagggatgattataattttgaattgtttttaaataaaaatattagtttataaaaaaagtaaaaacattaatatgattctattggtttaaaaattaatttttgaaaatgtaactgtagttatcgtaaaaaatgaatgttgatatatatgaaataacagtctatgatgtatttaattttgtgtaatttacttcaattttcaaaatatatatttagtatataatatggagattaatataatttaagttgtttgatataattaaaaattcaaaactatatcatatttttaaaatttatggctactaacaataataattgccttaacaatgaaaaattatgaacaataaaaataattaaaatattaatattaatttaaatatagttaagttgttaaactatttgataagtcaattaaatgaatgacatataataaaggaagtcgttatttttatttttggcatagttcttcatccaaataacataacaatcaatcgatttgaataacataacatttcaaataacataacaatccaaataacataacaatcaattccgaattttgttccatgcaaatcacttctcttccgaagtggattgagggcacgtgagcccaatccaatccgttcgaaattgtatcacctctcaccgataattgtcttcttctactctcactcactcgattatgatgcaaccaattcaattcaaccggaaaattcaatcgatttgcatggaacaaaattcttcaacccagaagatacagaggtaatcgattcaattctgtgtttgaattatacaatctctgccatatgatttgtagatcaattaaactctatatgtgatcaattatggttatctttagattttacttttgatttggtttaagaaattgttgtttatttacttgatctctttgatgattagaatgttgattatactgtcagaggttgatcatttagtgtatttgaaagaataacatatggattcgatgtacaaaaaacttgaattgttaaggtaggcaattcattagagatatataaatgcattggtagtgtttgatggttgattagttgtgtgcattaacataatatttcaattactgctaatactggttctcattctacacacactgcaatcatatctgtagtagcggttcatggaactgaaagatctctgtttctactaaaacacaggttagttgcaaaatgtctaaatgaagaacacataaatacaagtttgctatggtgtgaaatgcaaagttgaatatctgtgaacacgattaaacatgtagacaaataaaaacgattttatataaaggttcaattgtaggaataagaaacggaaatgagtggcttgttgaatggttacttctttgtttgcttgaattgaatagtgtaaataagcctgtgacattatagattaaaagtcagatattgctaattataaactgtatggtgggtttaacagccataattgaaattctatgaagtgaacaaagcttaaattaaaatacctttctcaaatgctagaaacatagactggcagctatgtaatcagtctatgttttggaaaactttcttgaaaacaacattggttgtttgcttatgaagtttaccatatttgtcgagtattaggattttcaaaccttttttagcggtaaccctagacaacgcaacataaagctgaccatgagagaacactggtttgtgcaagtaaagtcctacttgttgaagagattgtccctgactcttatttatagtcattgcaaatgcaactgggagtagaaattgtcttctacgcatcttgaaaggaagtttagtgtctgaaggtgtaagattcattgtacgaatcaaaactatttcaccaattgtgtctcctataataactctagcttgaacaatctgattacataggtgcgttatttgaagcctagttccattgcattgaccacctttaggatccaaattctgtagtatgatctttacacgcaaagaatggtttggcaaacctgctatcttgataattttaaaaaaactggggtgatacaagattgttaagcgaatcagaatctgtaggatctatagaatcagcagaaagataatttctttcttcacttgtatatcaaaataaataatgagcatgttagttgtatactcaatcaaactttaattatattgcatataaaactcaggaactttaaaatgtagagtaaaaatgcactgaccatgcaactgctctagcaaatactcattgatggtgttgacatcatcattctttggtgctaatatagctcttccttgaaagaatttgggatcagtgattttgtgtagctttgtaggatcttcataaatttcaaaagtgatcgcttcattggcttgtctgcgttggtaatcaacaaatcttctgcgctatctattatagcctcaccgtcattaggctcatttaggttcagtttcagtcaaattgttttctagtagtctcatgttcttagtcaactttaacacttgcagtgatcccaaagataagaagcattaagcgatgccattacaatttttgctctccctgcaccattaattactagaagcacctgtctgaaatcaccgccaaaaaacaacaacctttccaccaaaaaccttgttgtctgtgttttttataatgtcgcataaagatttatctaaagcttcaaaacaaaacatgttcatcattggtgcctcatcccatataactaaagacgcttcttttaccaaatttgccaagtcagattttagtttaatttacatactgaaaactcatcaggattcaatggtataccaaacctttaatgtgcagtcctaccatcttctaacaacaaagaggcaaggccactcgaggcgacattaagaaatattttttttctacatctaatcgcagcagatagagttttccaaataaaagttttcatgttcccccaaatccgtacacaaaaaggactcctcctaaatttttaaaagctgcctctataatctcattgtatacacctctttgctcaggagttagcatctttatccattcctcatgcttctcttttaggttggattcactgttatatctcaactcatcaacaataagcctatttgaattatcaataccatctctagtttgcttaggaaactcatcaatatcttctagagttgctccattaaacaacagaattttctcaatttcctatagagtgtagttcttaatctcaacttcagtgagtattaggtctgcaaagattaagatgcaaaaattaaacaaatagcatgaaaacagtaaacatcaagcaatagtgatacatgaaaggttaaaaaatatcaaaaccttgatttttgaactcgtctcttttcttattcagaatatcctctgctaacaaatgtcatgtttgtgaccatacgtgtgctggtctagacagagaatccgacagaagcagcatggcaaaaaaaatcctcagataatctccaaaacaacactaacttgcttccaccagaccatcaataaatacctgatcattatcaagaataccacgtgcaaaaacatgcttctttgtaacatttgcagacaacaccattataggttttgatttcatcataactcagtggcctttcacaatgtttagcagaactctaagaaaatactcatcttccattttccttggaacatagtgaatgcgacttaaagaaaaaacccttggatctctttttaaacgccttattttctccatcccatgtgaaataggccggaatttcagcatataaacaatctctagcacacttaccattctttccaataacattttttctattcaaagtgagccaagccataaactgagagtcttcatttgctactcgttctagaacatctttaatgttagactttggatcaaaataagctggttgttttccttctacatgaaaagataatttctagacaggagttgatttatgttgaattggatatttaaatatcctccaaatagcttcagatgcggaaacgtatctgcaaacaattcatcatgattgacatgaattattgattaactatcacaccaaaccaaattattaagtaaaaaacagagtaataagctaacctgcaatcaaaccaatctttgatctcattcttcttcttcccagctgaaccttattcttgcccaggagtttcagattcaccacctgtagtttgcttaacaagctcaacaatgaagacaactttgtctggtccgttgttgatctatttgaataagtatttaactaggggagtcacacgcggcttgcgcggccaagcaattttgtttgaaatcaaaataaaaaaagattaagcataccacattttatgaaattcgaagaaactttttttaaacaaatgttcttaataacacctcctcaaaaggatatgtcatataatatttagatctaggtttactttatttgttaacaaaatcaaacatataaagcaaaatactacttataagataatacgaacattagttatagataattttaggacattagttttacataacaaaccaaaaccaagaggtcgaatgatacgaacattattttgattactaattgattaagtcaaacaacacatgaatttagtacacgacagcataatgcacactttcaatcttttgaatcggtagaaaccgtctcattagcttcttcaacggccaatctaaattgcaatgtaaacaaaaaacacattaaacacttttaaattacattatttgaagttatataaagcagtaaactatgcaaaataatacatacatctctcaaaattctccaacctcaggtatatccggattgatatccaccggctgcatttactagcggtttgaacaatatttcgtcctgccgttatataattatctatgttatcgtgaagatgtcagtacaaagatcatatatttttttgtgaataagagaattacctgaaaatctatgaattctccaccactgtaacacgcatacaattcgttaacccctcgctgttctccattcttcattaaattgttcaccaaaacccctgattgcaacacattccataacattgttactgaaataatttaacatataagtcggcatgacaaatattattataaaatataaacatgcttaaggctttctaactaaaaacttactcatgatcttgaatcttgaatataagtacaacaaaatcatcccctctgtctacttgggtcaagataacggagttcactagtagcaacaacaaaaccaatcaagccttgcaaaaaaaaggttatttgataagatggtgacaaaatttcaacatatttccaaatgaacaaccagataatcttactaattaagtagttcttgtctagactatcattcaagacctcaggaaatgctacatcagaaagagtgtgttcaagagtatcttttggtggaatcgtgtccagaatagtcaattcttcaaaaacgatctagtaatcgtgcttggtggttcttctatcgtctatcacatgtttcagccgaaagtgatgaatagctacccaatcaccatatttgaatttggagtcaaatcgaatgatatctttatatttgatcttgacctctattctatgatcttatacataagatttcataaatagttgattaaaaaagcagtaaacaaaaccacttttacaatatccgtaagaaatttagtaaaccatgcatacccgcacatcagccaaaaccatacaaaccgaacgatgatctctatctaaccactctcgccatgtgtttaagatcttaactaggatagaccaacaaagtttaatagggctcagatcgccgacgtcctcatccatatctcaccgggacttgctaaacaaaaaccgaagaggtgtaaacgtttcctttataaaattatgagtctaagcaaaaggcattctcttacttataatagtcataatatataataaacgaaaaacatttttaccgtacgattataatttccaagactacaatctattcaacctttttactatgcatggtctctttttcctatgcatcgtctctattatcaattcgaaaattgataaaactattatcgatacgttcacgagtctatatacaggaataaaacatcaatcatacgaatggtgggaggtgctattccctttcgattgcaagatttttctctcaaataaaaattatttcaataataaaacatagttataagatttggaaattctccataatattacaaaagatcaagcatactgtctttaaaacaaagtatttaaacattcattgaacatcttgtacttgtatcttccgaaccggagcatattgaattcgtagcagcccaaacataagcggaggagagtgtactacatataaaaatttaagaagagaaggccgccataatcgagagaatggtaaaacgattcacttctcactcaatccaatccactcgatccacttcggaagagaaggccgccataatcgagagaatggtaaaacgattcaaacctacaccattaccctcacgtgcccttccgtggacattcaggaaagcgtggatggcgagatacaagtctgttgcagcgaagcagctaaacgagattgaagcagtgatgccactgatggaagttctcaacctgattcccaatcctcacaaagatgtgagaaatttgatactggaatggatcaagatgtatcacgattcagatgatgaaagtgatgccactccatctcgagctgctgataagaggattgttcaagagaagttagaagatcctggatctttcactctaccatgctccctaggttcattgactttcaataaatgcctttgtgacctaggagcatcagtaagtctaatgccactctcagtagctaagaggttgggtttcaacaaatataaatattgcaatatctctttgatcttggctgatgggtcagttagacaacctcatggggtattagaagatttgcctatcaagattggaaaggtggaggtgcctacagacttcataatattgaacatggatgaagaaccaaaagatcccttgatcttaggaagaccctttttggctacagctggagcaattatagatgttaagcaaggaaagattgatcttaatatggggaaggattttaaaatgaagtttgacatcaatgatgctatgaagaagccgacaatagaaggacaaaccttcttagttgaggaaacggatcgactagttgatgaacttctagtggaacttaaagaagcaaataactcaaaaactgttttgaccaagagtggtaaagctgggtatctccctagtgaaactttgagttctgagaagtcattagactcacacaaggcaacagttggctcaaagatttacaagggcttgatggggtctgacacaaaggttatgaaagctaatgaagtaagttcaacacatgctcgaccaactgattccaccaacaactcgaagaagcctccaacttgccctaaaagctcatgcttgaccaaacaactcattgcaagcactcagacgttagatgattggttagaactcaaggagagatctaaatggcaggacaaagccatacaagagctaacacatattgtgaaagagctgaaggatcaaatcaaggagctcaatggaaaagccaaccaagtaccactcaacatcaagaacgcccctgacgatggagccactattcttgtcagcaaagaaggatgtgaattcacatcggaatggtctagaggagaagactatcttgataaaaaaagaagcttactgtgaggacatggcctctgagtacccaattgcagacctgttaagaaaccctaatgagtatgatgatcactctactcaagaaagagaggagaccacatttcctctctgcaacctaccctgagcctaacgagtatgagaagtcaagcttagagacttaaaacaagctcacttgggaggaaatcccatgtctatctttgtacatatctttatttttccttgttgattttgatgcatttggttagtgtcttcaggagataagtataaagagacgagtgaaatggattctggctctgcgagtaaagcagtatactcgaccacagagaaatgaaaaatactcgaccatgttttagcttatccacgccaagagatcactcgaccgcggtgctggccgcagcagaagaagagaggtcgagtatcctcagagcggtgctggtcgccatagagctaatgaggttgagtacccacctgctggagctgatacagaacaaggtggtttgtctatggcctgggagcaatcacaggcagccattgacgagcaactacgttcattcttcgactgaggtaagcgcctcacttcaccattgtattatatcatctgttgtgatttgtttttatttcattttgtttctgtgattggatttgtcctgagtactctcttccaagtttattcgcacagtggactgtgtgatttaagtttgggggagggctcaggaagtgtgtgttgcattgtatatattcttgagtctgcattcatctaaggcatagaaaaaccaaaaaaatttgaaaaatttcagaaaatgatttcacaaaaaaaaagagtgttcttgtagttgcattacatttaggatcgagtctaaagtgttttatttaggattgttgcatatgcataggggatgatgatgagatagccttgtaagcattttgattcaccggataaactcagtgccctcgttgctagttgtctgttgcgtagtcaatgaatttgaaataaaactgaaccatgccttgatctgataccattccctatcaatttgaacctgaatctgatctttaattatcatgtctgcatcaaatttgaactcatggataccctaaaatacttggattttcttattcattttgatcactcatgttaatccaagtagctgactctccttattagagcggttaacccaaacccaaacctagactttctttcaagccctatatcacttgtgagtgtttgtgaggtcttattccgattaagcttggtagaaagtgttaggttcgtaacgacagagatagtgtctcatgtagttctagttcgcattttttggactagataggactaggtgggcgcttatactttgggttgggatgtgtttaaaagaaaaaaataaagggttcattcattgataagaaaaggtaaaagactctaggtgaagtaagctaaagaagcagaaaaagtctagtaaaggttttgggatttgtaaagaaaagaaagagttcttgttagctattgaagatgggcaaaagcctttggttttagaatgttaaaaacaggaaccttagttgttaaagaaatccaaatccgctagatgtattaaagtgttgagaaagcttctcctagagttaagaggaaagaaaagaatgattagagaaagggcttaaaagattcatgaatgcaaagggtagagttaagttcttatattgggattggagatggggttaccattagagcttcatctgatttactctgggtagatgggatcttatctctgtatgcatagtttgggacttacctttagcattctactaaagcttaatcattttttgagagatcccctgttattgaagcctattctgtaagggaccatctttgtctcttgaccttttaccttagccaaatgagttcattgatgatgcattgcttgattcacgttccagaactaatgaatgttaaagggattggtagatttgaaaacatgtgtaggtcgagcatatgagtcggattgattgataatgaggcatggctaacgtttttaagtagaattcgatcttgcagcttagaactttcaacttggacattgatttcatctggtttatctggtgctttggctctgagtccccgctttcaaacctcacctccagcttgttcttgattgtttgcttgagggcaagcaaagactaagtttgggggagttcataagtgtgtattttgcatgttttgagcatccatttgtcatcactttagcatcatatcatcattgttttataccatttctcatcatttgtcatcactttacatgtttaggatagatttgcatgcatgttgcatatttgtgttgattttaggtgatttaaagctgttgacaagctatctggaagaagcggacctgatcatgtcaaaccactcgaacccgaggtcgagtaggagcttcaagatctcaagagaccactcgacccccaggtcgagtaaaagaaatcaccacttcgcctcaccactcgaccacgaggttgagtgtcctcatctccatcacctgaccatcactcgatcacatcactcgacccctaggtcgagtgtcttcacctccattatcataccaccactcgatctcaccactctgccttgcagtcgagtatcaccatcatcaccactcgactgcgtactcgatgacaagcttcagagccttcttcattccgcactcaaccagacactcgagcacaaggaagaaaagaagactccaactattcactcgatctcccactcgaccacatgggtcgagtacagtttttaatccgtcccagtactgcgtcgttttaagtattagggtttcagaatatttggctataagtagcatgtacttcacattttcgcagacaagttttatttatctagttttattctgcagaccttgtgttctagaccttttgtaatccggatttctctttatctattcagtattcagtattcagcttttgttcttgatttcgtttactgttgttcattctgttatcatcctgctgttacactgttgttatcatgttttcaacttgttcaacgtttatgctttctgttatgatgtctgagtagtgaatagatttctgaggatgggttagagtagtgtagaattctcaatatgctaggtgattgagtattggttgatagataccttctggattagttgttcttaatgcctattgctttctgatcaactggaatttgagcccagacatttccgtgcccaaaaggtgttcgatgaaatgtctgaaccactaattccagatattcgtgaccctgtaccaaggtattggttgcaaggagcgttttggctttaacttgttgattcgtaatgcctgttaggttagctctcgtcaatggtgattgagtctggaaataggttaacttgagagtctctgttgcggtggcactttgatttggttaatgaacttgttgtttatggttaatttattgagcatatcaatcacctgtaaactgaggaaacgaaactactcaattaccccacccttgggaattctttatctgattgaattctttgtttactctactgttgtaaactgcatcttgttatctgtcgcttaatttctgcaattctttcttgttactcgacctcatactcgaccacccagttatttggcaacagactgtgcagtcgagtatctgtgttttattttctgtctgttactcgacctgtcactcgacctcacccagtgctctgcaaagagctgtgttggtcgagtgttttactgtttctgtttgattttctgttttctgcatgttcacttaggactgctagaacacaccaaaacctgttattgcttggcttgacttagtgacttctgatcacatcttgattgttagcatcacacccatttggattgacaaccttcagtactacaacgagatgatagtgctttaggtttaattgattaaaaacctattatcagtcctttcctttgacatttgtaacacctaacatcacaaactctagatgtagaaatttcagcctttcctttgtgatcttgaactgcagcatatgttttactttcagcccttgaactgagaatcggcttatagctgctggttctctcttctctttggtaagtaggcttagcaacggttcctgaaccataactagatcgtgatgaactcttcctcttaacttgttgttcaaacaaaatcgccttgtgcaacatctcttctatttcaacatagtattgagtctccaatctgtcttgaatatctctgtttaaatccccaagaaaccttgacatagttgcttctctatcctcagaaatatcagcccgcaacatcaaagtctccatttccttgtagtactcttcgacataacggttcccttgtgtaagattcctcaacttgaaatacagctcacggtggtagtgactagggacgaaagttcttgattacgtcttcgtgaagtaactagctgatcccaccaactcaaagcatagtcataaaattcagtagcagcaactcttaccctattgatctcgatgtagtgttgaaggttgaaaactaattcaatattcttttcccattccaaataagcatctggatcattctttccatggaatggtggaattttaagcttaagacctccaagattgtcttgcaaaagatctctaccttctctagcacgtctatggtgcctcctttgactattgtgagatgaagtgctcctatgccatagtactgatctgtagcttcatctctttgctcaagcggctcattaactctcatttgttctccaggacgagtctgccccaactctagtttctcatgaaacttttggcgaaaagcattcagtttggtgtccatcattttctcaaaggcttctaccaaaagtttgttgtttcgattgttgctagtctcttcctcctcagattcagccattctttctgcaaaagagacaacaaaacaacaccagtaactagttcttttgaaacaaacacgaaataacccttcagatgccatagaaccctaattacgacagtttcacttgttcagatgctaaaaattatcaaaacgttcccaaaaatttcagaaacaattttacaaaatattagactctttttcgaacccgtgacagttgatttcgaaattttagcacgcaccaaataattatgtaaattaaatcaaggtgacagacggacacatatctaaagatgaaaagacacaaaatgatagagatagagaactcaactttcggagtgtgctctgataccacatgataataggtttttcagtcaattgaacctaaagcactatcatgtcgttgtagtactgaaggttgtcaatccaaatgagtgtgatgcaaacagatgagatgtgatcagaagtcactaagtcaagccaagcaataacagttttggggtttctaacagtcctaagcgaacatgcaaaaaacagaaacaataatagaatcactaaaatcactcgaccacaacaggctgatgccagaagtaggatgtggtcgagtaacaggcaggatgtgaaacagttacactcgactgcacagtctgttgccagacactgggtgtggtcgagtatactggtcgagtaacagataggaaatgagacaactgtacttgactgcacagtctgttgccagacactgggtgtggtcgagtaattgcaaaaactaagaaacaggcaatgagaacgattaagcgataacgataaaacagagaaataatatagacgagaaattcctaaggatggggtaatcgagtagagtggtatcctagcctattcaacaacagatcaattcactcccgtgatagaaatcctcaagcaaagctagcctagactaattcccattaacggaatctaactatgcagacaataagaacagactgataaagtcaataaacgctctaaacagccaatcccttgggatagagacgaatatctcaggaactagtggatcaagcattccatcgaacaccttctgggtgcgagaatgcttgggatcgaattccagttgatcagaaagaaataagcagtaaacgcaactagtcctgaagggattcaatcaattctaaaacttaaccattctacagactacggattccacaactactctatcccatccctaagaattctaagtcactactcaaacaacatgctcaaggacgtaaacgcagataaatgataatattgcataagtaaagagataaggagtagagaaacaagatgacagatgaaatcaaatgcggaatcggaataacttggaaaaatctcgaattaccggttgcagaagcaaaagcagcgcagcagagtaaaacagaaaataaaactgaagcaaaaactcaatgtcgactagatgtctcaggatagaaccctaagacatctatttatacaaaacgaaataaaatgatagtagacgggccaataacctaatcgcccggcccatagagtgataatgggccgagatgggcttcgtgatccgatggaggtccaggccgcttccaaacactttgtcttctcctcttctcttccttgtgctcagcttgtctggttgagtgcggatttgagtagactgtgaagacatgatcgagtgtccggtcgagtgatggtgatggtggtgagtgatgatactcgaccagggggtcgagtaacttggtagagtgaaaccgagtgtggtcaggtggtgtggcgaagtgatactcgacaagggggtcgagtggcgtcatcgagtagcctgagctgaggatactcgaccagggggtcgagtagatgggaagaatggctccaaagtcactcgacttggtggtcgagtatggtgctggatgcacacgacctggtggtcgagtatgtcttctggttctagctcgtttcttccaatttgctcgcaaacagctccaaatcacctgaaaacaactcaaaaatgcaatatgtatgcaaagctatcctaatcatgcaaagtataaaatcaatgtcccagttggtagttctaagatgcgatatgattgaattttactcaaaaacgttagccatgccttgttatcaatcaatccgtctcttatactcgacctacacatgctttcaaatctaccaatccctttaacattcattagttctggaacgtgaatcaagcaatgcatcatcaatgaactcatttggctaaggtgaaggttaagaaacaaagatggtcccttacagaataggcttaagtaacaggggatctctcaagaatgattaagctttagtagaatgctaaagttaagtcccaagttatgcatacagagataagatcccatctactcagagtataacaatgaagctctaatggtaatcccaactctagtcccaacttaactctaccctttgcactcatgaatctttcaaactctttttcatatcattcttttcttttctattaactctaggagaagctttctcaacactctgatacatccgctagatttctttaacaactaaggttcctgtttttaatctttaaaaccaaaggcttttaacccttcttctttagctaacaagaacctcattcttttctttaacattcccaaaatctttactagattttttttttctaacttctttagcttatttcccctagaattgtttccctttccttgtcaacaatgaattcacccttttcttttaaacaaatcccaacccatgatataagcgcccacctagtcctatccagtccgaagaacgagaactagaactacatgagacactatctctgtctttacgaacctaacactttctactaagctcaatcgaaataagacctcacaaacactcacgagtgatatagggcttgaaagaaagtttaggtttgggttcgggttaactgctctaataaagagagtcagctacttggactaacaagagtggttaaaatgagtaagaaaatccaagtattttagggtatccatgagttcaaatacgatgccaagacatgataattctaaatcagattcaagttcaaattgatagggaatggtatcagatcctaacagtgtggtcgagtagagcaatctaggcatggtggagtcttacttcaatctcattgactatgcatcaggcaactaacaacgagggcgctgagtttatctggtgaaccaaaatgcttacaaggctatctcatcattatcccctatgcatatgcaatgatcctaaatgaaacactctagactcgatcctaaatgcaatgcaactacatgaacactgtgtttttgtgaaatcattttctgaaatttttcaattttttggttttttctatgccttagatgaatgcagactcaaaattatatacaatacaacacacacttcctgagccctcccctaaacttaaatcacacagtccactgtgtgaccaaatttggaagagagtactcaggacaaaacacatcacagaaacaaaataaaaaacaggagatggtatattacaatggtggagtgaggtgcttacctcagtggaagaaggagcggagttggtcgtcaatagccgcatgtgattgctcccaagccatcgaagaatctccctgttgtgtctcagcttccccttgggggtactcgacctctgctcattcgtcgcggccagcaccgcggtgatgatactcgacctctcttcttctgctgcggccagcaccgcggtcgagtgatttactgacatggagaagttgtgattgcatcattcgctatactcgatcacatcgtcattcggtctctatagggtgtggtcgagtgatttcccggggtggagaagccagaacaatgtcgagtgtccttgattgctccatggtcgagtgtattgctgtttcctcaaggccagaatctatttccctcagctcttcatacttatctcctgaaaacacttaacaagatgcgtcaaaaacaacaaggaaaattaaagatatgtacaaagataggcatgggacttcctcccaagtgagcttgttttaggtctctagcttgactcctcatactcattaagaagaaaatgggtgatagagaggatctgcatagtcctctctgatctcatcatcatattcagcgtcctctcttgagagatgagtagccgaatactcaattcttctttcctcgaaataggcctctctctcttctggtggataatctatctcctcagaccatcttgaagtaaacgtttttctcgggatagtatcaatcccgcattttgattgagctttctcttgcatctgatccagtttactcttaagttcctcaactgtctgagctagcttctctatggtttcttcttgctcatcagatttctttttgagatctcgcaagtcaggtgtagaggttgtgcttggtctggtgattgaatccgaaggttgaggttgagccctgatcttttcttcttgagctgtcctttgcgaagtttcgttgatgtcaaactgcagcttgatgtgcttcccaaggttgagacttattctcccgtctttgacatctatcatcgctcccacggaggctaaaaaaggtcttcctaggattagaggatccttaggttctgtttccatctcaagcacaacaaaatctgtaggtacttccactccattaatcattattggcagatcttgtagaaggccaaagggttttcttgaagacctatcagcaaggatcaaagtcaggtcgcaaggcctgtactgagtgaattccagcttccttgccacggagagtggcattaagcttactgaagctcccaaatcacaaagacaattgctgaaaaccaattgaccaatggaacatggtagagtgaaagttccaggatcttccagtttttcttgaacacttctcttaacagtggccctagacggattcgcctcacattcgtcttctgaatcttgataaatcttgatcctttccagaattgactttctcacatttttgtgaggatccgggatcaggttgagaacttctattagaggcatcaccgcttccatctcatcaagctgcttctctgcaagagaattgtatctttgtatccatgctttcctgaatttccatggaagagcacgtgaaggtaatggtgctggcttgaatcgttttaccatcctctcaatgatggctggtttctcgcctaggttggactgagtttaaaaacaggatccagctgaatggtcgagtccagcaactgaaatttcaatctaagtagaagcctccccatcctgaacatcactgtcctcggtgattgatgtggagacatgtcgagtaggcagctctcgatcatgacaaatggtgatagcatgagcagtggcgtaatccttcgggttctgtatggactttcctggaagtcctgttactttgggagcggaggtcgacgcagtttgtccttccatgtatctgacctttgaggtgagtacctcaagtttgatattcagatcgttgaaagtgcaatcgaccttgttatgaatttctgccatctttttggcgagatccattgctcttgcaccttgtccttggagaattgctgtaacatgttcttcaagtctgaatctggagttgttgaagctggttgttgttgctgctgtgtgaaaccaggtggtggaagttgctgctgatagttgccctggtactgctgcttaagaacatacccctgaccttggttgtatggaacaaagggcttgggttgattctgctgctgtgaagggtagacttggtcctgcgggtttgcaacgtttgtacttctgtaagacagattgggatggttctgcttgaagttgttgaaacccttgttgtaacctccttggttctgcacatagttgacctcttctgattgcaaagtctccccatcctgaacttggaacttctcatcatcacccagaaaatgaatgtgcttctgttgcacaaggagtagcttatccagtttgtcattcatggctttcatttccctgcggtgcttctcatcagaatcagagctggtgcggatgcttttgtcataatcttcattatagttgccatccgactgagctaagttctctaccagctcccatccttcttcaacgtctttgttgaggaagttcttgttagaagcggtatcaagaagcatcctcatcttgggaaggacacctctgtagagagtgctgagaagtgaagctttggagaaaccatgatgaggacattgcgtctgataacctttgaagcgctcccatgcttcacaaaaactctcattatttgtttgtgtgaaaccggagatatcattccttagtctcgcagtcctggagtttgagaaaaacttagccaagaaggctttcttgcagtcattcgaggaggtgatagagccttgaggaagcgacttttcccactgatgggctttgtctccaagagagaatggaaacaatctgagcttgaagccatcctcactaactccattgatctttgttaggctgtagagcctatcaaactcgtccaggtgatcgagtggatcctccatagggaggccgtggaacttgttgctctgaatcatggcaatgagaccgctcttgatctcaaagttgttgttctgcacaggtggaggcacgatgccattacgctgattgtggttgcgtggtgcatcgcctgcacctatgttgtttggttgcacttgctcatctacaactgcagccattgtgtctgtttctgtctgtgttctgagttggcgtgcaatacggtagatgttattgttgaacaagagattctgatttcctcgtgaccgtgtttgcatacaacgagtaccaactggtgaagctggtgattcgtagtacctgaatcaaaacagacaaacagaaaaaacacaaagttagtaactttaagaaaaattgaaaaagaacttgatcttaagtattttgaaatctcaaatatagcaaacaaacacccaattggcaacggcgccaaattgataatatgtttttaagtcaattgaacctaaagcactatcatgtcgttgtagtactgaaggttgtcaatccaaatgagtgtgatgcaaacagatgagatgtgatcagaagtcactaagtcaagccaagcaataacagttttggggtttctaacagtcctaagcgaacatgcagaaaacagaaacaataacagaatcactaaaatcactcgaccacaacaggctgatgccagaagtaggatgtggtcgagtaacaggcaggatgtgaaacagatatactcgactgcacagtctgttgccagacactgggtgtggtcgagtatactggtcgagtaacagacaggaaatgagacaactgtacttgactgcacagtctgttgccagacactgggtgtggttgagtaagttggtcgagtaattgcaaaaactaagaaacaggcaatgagaacgattaagcgataacgataaaacagagaaataatatagacgagaaattcttaaggatggggtaatcaagtagagtggtatcctagcatattcaaatggttaacaagcgcaatcaagctatccctagacaacaggttcaacaacagatcaattcactcccgtgatagaaatcctcaagcaaagctagcctagactaattcccattaacgaaatctaactatgcaggcaataagaacagactgataaagtcaataaacgctctaaacggccaatcccttgggatagagacgaatatctcaggaactagtggatcaagcattccatcgaacaccttctgggtgcgagaatgcttgggatcgaattccagttgatcagaaagaaataagcagtaaacgcaactagtcctgaagggattcaatcaattctaaaacttaaccattctacagactacggattccacaactactctatcccatccctaagaattctaagtcactacccaaacaacatgctcaaggacgtaaacgcagataaatgataatattgcataagtaaagagataaggagtagagaaacaagatgacagatgaaatcaaatgcggaatcggaataacttggaaaaatctcgaattaccggttgcagaagcaaaagcagcgcagtagagtaaaacagaaaataaaactgaagcaaaaactcaatgtcgactagatgtctcaggacagaaccctaagacatctatttatacaaaacgaaataaaatgatagtagacgggccaataacctaatcgcccggcccatagagtgataatgggccgagatgggcttcgtgatccgatggaggtccaggccgcttccaaacactttgtcttctcctcttctcttccttgtgctcagcttatctggttgagtgcggatttgagtaaactgtgaagacgtgatcgagtgtccggtcgagtgatggtgatggtggtgagtgatgatactcgaccagggggtcgagtaacttggtagagtgaatggccgagtgtggtcaggtggtatggcaaagtgatactcgaccagggggtcgagtggcatcatcgagtaacctgagctgaggatactcggccagggggtcaagtagatgggaagaatggctccaaagtcactcgacttggtggtcgagtatggtgctggatgcacatgacctggtggtcgagtatgtcttctggttctggctcgtttcttccaatttgctcgcaaacagctccaaatcacctgaaaacaactcagaaatgcaatatgtatgcaaagctatcctaatcatgcaaagtatgcaagagcgatgagaaatgatataaaacagtgatgaatgatacgaagctggactcaaaacaatgatgaatggacattgaaaccatgcaaattatagacatatcaccacaagatgagatcctcccaaggactcgacactcttaggttaagcaaaggatagaggtagctgtaaagccgtgatgatggatagatttgaatgaatcgatggatatcacagaagcttgcggaagggtttcaagatatcgagacttagatcctttggatatgcgcaccaaaagagactaaggattttgctggatatacacaccaacaagatgatcttcttagaaaaggtttttgattaaaagaaaaataagtcctcaaaagagaatacaagagaatataaagaaaaggagaagagaagatgaagaggcaagtcttggaacatactccaaggctgcctagaacacaacagaaattaaaaacaaagtttaaaatttaaaatacactcctcaactttaaaggccacgaaagtttctctttattttagtgggtttgggccttgaatcattaaaatggattatatgaagtgaaaacataagcctcattaaaaaccttcctttggaaaacccagtaggacaaaaccaaaggcagggaaaaagagcactcataaatcacttatccatcttgatgaggtccttgagcttgaatcaaaaccaaagaggtagtgacttggctcaagtcatttggtcggtcccaaatgtggttaagcatcccggcaatggcttggtcgaatagcttagctctagaacgagtcattgggacggccggtgtgacaagaacatcctccgctacaagcttctcctcagctacaagctcatcctcagctacaagctcacgttcaagctccggttcatgctccatatcgttaatgctatccatgatcatatcagcaccatccggttcatcgaggcgacagcctggagagcagattagagacaaattacgagatcagaacttagaaataacgcgcagacgagaaggaaaagggttacacgtacccgcaagaagtgagacgccgtctcggcatacttccgcgactctaagagagtatccggtggagggagcagaggacccgcacagccctcgagaaggtttgccgaggtaatccgatccttaaagatcgggagctccttctccgcctcgtcgctcgagggcttcttccttttgtacttcttcttcttggacgaagagtcatccgttcgaacacgcttccccgctaccttatcagtcgccggcagcgcaacgaccgctgatataacccgattttcaccgattttatctatgttttaggtataggattttgggtctttatgttatttttcgagtctttttagtgtcttttcaggtattctatgcagtgggacaacaatggagataaggagacattttgaagcaaaagctaaggaaaaggaagctaaggataattttggttcaggaatcagcgaagagtgtcgaccgacacactgttggtgttgatcgacaccagtttcggcccagcaaaaaccctagacgctttcgagttttcaaaagctcaagtttgccccagaagatttccctatttgcattattagtccctggacgtttttagggtttatatatattgtttttagacctaagtttcatatatcaagtcttttataaagttctttgcaaaactctattgtgagagacataagctattcatcgattattcttcagagtttcatttagatctatatacagtgaagagatcccttctttccccttctctatttactatgtttatgctttttatctcaaatatgttgtttgtttcatccgatatgtcttgagtaatctgcttgttaggaatagggtttctcatttgggattcatatggtttagtagattgccccctttgctaggttatctatagaattcttcatctttaattatacctaatgctagatctagagtaattaactagatcttgaatccagacaatagatatgcccgccataggtatctccagctgggaaaccacgtcgtaatcttggggatttcaacaggccagacctgttctatgctaatcgatcagcgattgtacccccaccattctagaagaacgactatgagctgaagcctggctactttgctttagttggcaagcatcctttccatggcttatctcatgagcagccaatggatcatatcgaacgatttgaggaccttgttctgagcatcaaggctaatagagtctcagaggactacctactatgcaagctcttcccttattcacttgctggggaagcaacttcttcgctgaagcaacttaaagcaggttccctcaagacttggagaagcatcaagatagccttcttgaacaatttctacagtgatgcttagtctgaggagttgagaaacaagctgtctaccttcacacaaggtccagctgaagctttcaaggctgcttgggtttgtttcaaggagtaccaacgagattgtccacatcatggtttcagtgaggtacaacttctaggtaccttcttcagaggagttgattggagataccagatggctctagatgcagcaagcaatgataacttcaatacacgttacccagctgatgctacagccctgatagagaaccttgcttgcagcaacagtaccaagaatgctgattttgagaggaagaagattgctggaactatttcagaaaatcagatggcagaggtgaatgctaagctggattcggttcataacttgctcacagggaagaagcatgtccactttgcagctgaggagaagactattgagcctgagcgtgagtcagaggaaggagtcttctattaggcagccacatggcaacttcagtggcaacaaatttacagggaccagggttcctccaacttcactccaaagcatgctttccaaaagacttttcctcaaagcagctttcagaggaactatggtaattcaacttaccaaacccccctccaccctcggaagagataagaatggaatcgatgcttgagcagattctagagagccaaacaaagcttgttgtggagtttaatggcaagtttgatgctgtctacatagatcttaatgggaagatcgacaatctgagctcttacttgaagaagctagatgtacaggtagctgaaactgcacaatctatcaagagacaagaaggttttcttcctggtaatcctgatgctaacccaaggaagagctgcaatgccatcttgattagagaaggagatgatgtgtgggaagaatttgatactgaagacgagttggagctcgtagttgcagagatggtgtcgaccgacaccctcctgtgtcgatcgacaccatatgggacacttttctcagagacgactcaatacgacggtgtcgatcgatacccgtctagtgtcgatcgacactggatccggattgcaccttgtgaggtacaaatacctatgcagcccgaatctgtctacactcctcctgtcccctatccgaggaggcgtcgttctaagcaggagattcacgctgttaagtgcacagccataattgagaagatcctccatactcttcctaaggatgcttgagagacatcttccgcctcactcaacaggtatgtcaaacaacttgttgacaatggaattagttcagatgaagctaagctgctcaccagagacatcagtgcaatcatgctgcctaaagccaaagaggagaaggcacagagagtagacatagctgaatacatctgcaccattactcctggtcagaccactgagaagcttccagatccaggtagctttgttcttgattgctctatctccacaagcagattcagccgctctttgtgtcatctgggatcaagcatcaacctcatgcccaagtctgttgctcagagactcggcatgaatcactacagacctactcgcattactcttctcttcgcggatcgttccaagcgaatccctgaaggaatccttgaagatgttcctgttaaggttggtaactctgttatccctgctggttttgtagtcctggactatgagaaggaacccaatgatccccttatccttggaagagcattcctagctacagctggtgctaagtttgatgtgaagagagggagaatctttctcaaggtttgtgattcagagatggagtttggcatggatggttcagagcttactaagcctatcagttgcattgcctccagcacaaacacacctcctcagactgatcagaatcccaccacagagccacacacaacgctccaacacgttcagctcgccaatgacagttgcagaggaacggttttgatcgacaccactatccctgtcgatcgacaccctcgggtttcacagacagatgattctgcacattctcttcaacccacaccacttaaggacctatgtgataagttctcttctctctcttctcctgttttatctttgattaattctttagattattcgaagactgcttcactagataacaagcctagagttcctcgaaagcttgtttctcctgttgttcttgcaggtgacgagatgagtattgatcgacacaccactgagtgtcgatcgacaccagaagctgctccaaccagatccgtttacacaccgccttggaaggcgaggaggcagcagaaatcttccaccaccactccacccatatcctaaactccgccaagtcaagctattgactcaaaacaagcgcttagtgggaggcaacccactggtttgatttatcttttccctttcttttcttttcttttatttttgttttatttttcctgctttctctggatttgaatgccactggggacagtgtcgtttaagtctgggggaggttgttactaatgatgcttttatttttgtttcttattttgcaattcatttggttatttctttcccttcatgatcatgttttctttagtttagttaggaatcatgatctatatttctcttgtttattgcctgattgatgagtgctgcaggttcgagtcaatccgactattggaaaatctagatggcaaaccaacagacttgaggatatcctagtttccaactcaaccactaaggctggagctaatctcactgctcttccttttacctcttcaaacggtaaatcacgagagattgagacgactttcggatagtgtataggggtatgaatgtttcctatgacctcattattatacattatttggaatgatcaattacaaaggttggaaaaatgccgagggtgtcgatccagtatgcgagttcccatttgtttattctctaaaaataataagtctgggggagagaaagaacaccgaaaaagaaaaaaaaaatataaagaatggtcaatttatcatggtattgtacaggaatgagtctacaaggatcttgaatgttggcttgtttgatgagacccagcgatgaaagcctggtggatatagttgtggaacttaggtatggaatctagaatgttgtgtaagcttgtagagaagtacatgttggttaggatttgattacacttgttaggcatatggacttagtttgaataatcatggcaataggctagagaatgttgggagttcctttgttttcaaaacctcttccacgggttcaccgattttatctatgttttaggtataggattttgagtctttatgttatttctcgagtctttttagtgtctttttaggtattctatgcagtgagataacaatggagataaggagacattttggagcaaaagctaaggaaaaggaagctacgggcgattttggttcaggaatcagcgaggagtgtcgactgacacactcttggtgtcgatcgacaccagtttcggcccagcaaaaaccctagacgcttttgagtttccagaagctcaagtttgccccagaagattttcctatttgcattatagtccctggacgtttttagggtctatagggtctatatatatatatattgtttttagacctaagtttcatatatcaagtcttttataaagttttgcaaaaccctattgtgagagacataagctattcatcgattattcttcagagtttcattcagatctatatacagtgaagagatcccttctttccccttctctatttattgtgtttatgctttttatctcaaatatgttgtttgtttcatcaaatatgtctgagtaatctgcttgttaggaatagggtttctcattagagattcatatggtttagtagattgccccctttgctaggttatctatagaattcttcatctttaattatgcctaatgctagatctagagtaattaactagatcttgaattcagacaatagatatgcccgccataggtatctgtagttggatctattatttgatgagtctggtttataggtgtgtaataaaaatcggcctatctactaagatgaacaattgaactcgttaagaatgcatatttaggttgatagtttctcggcttctccggttattattagctatagatatagggagtttcacttcacgcccactggttattccataattagagtttgagtttaagaatggttcgataacaacctagttttcagtagatctactaaccaatagtttcctgagaataccctgtttctagctctttattaaaacgtttacaacacaatcaatctgatgtctttttactttgttctattttattttcactcataccctgctagcttgatctcgatatttaactcattgtttgaacaaaaaaactacgtgaattcgatcctaaaatactgcaattaatctcttatttgagagagtaattctaggtaattttaaccatattaaccgcctcgggtgcagtcgcatcagcgggcagatcggccatccgagcctcagtagacgccgactcaatcggcattgtcgcctcgggtgcaagcgcatcagcgggcagagtcgcctcgggggaagcccgcggtgagatcaaccccgcctcggcaagacgcttctcctccatcagacgcctctctcgtcctcttttttctttgcgtaaacctccctctgagtaagcttggtcgactgcatgtctacgaagaactgggtccatgatccaaggactccgagctagaagggcaagaaacaccgtgaagtagacgaagcgctcgctcgatttgatcccgagagaaatgcttcaaccaatcgcatttcatagccgataattggtgaaaagtcgaaaggaaatcgtctggaattggctcgaggaatttgagagtgcgttctgcaaccaaggaaaagaacagttagaaaaaatcataagatcgcgtcggacacaaacagaatgttagctacaactacccaaagttccccatcttgtcagaaccgtcctgaggaggtcgtcgtgaacagcatcttcaagggccacaaagaagaagtgatcggtatacggctcgtctttgctcaggaacccgtcaataaccttcctacctttggcaggagagatataatatcgatcaaggagatttctcaaatgagcgagcgtgatgtcggtcttaaattcataacttcgcaccaaaatcccgagcaaatgtctcaaagatcgcgtcgtaatctaggagagggcgaactggtacgatgtcacgtactgcaaaaccagcctcgggaccggaagccacaggaagcaataatagaaaaatccctcatacagagtgtagaaacccgcatggggattgtcagctcgctcatcagggatcgacacacgcacggtgacctcaccaagattgaatcaggccctcagatccgaaagcgaccgctcggtgcacaaagtcaagccagggggatccggcactatcgccctgttgcctttcttcttcctcttcttctaggctttctcgaaagccctctgctcgttaagacgcataatatcctccatctcgttcgggccgaaataaagaaagtcctcgatctttatttacggcattaagggctcgggcgcgccttgccagttggatgtcccggcttcatcaaccatcggggcaagagtcctccagacgagaggcggctcggggtcatcaggcaaatccagttcccgagcaaatatcggcagtagtgtcttcccgagccgtgaaagaggttgtctgctcgggggcgcttgaagaagacacggcgtcttcctccgaagacgtccaaaccgccctccgtttgtatatagggggaaggtcgtctggatggtttgaatcattgaagtcgaagagagaggcgctcggggttgaaggagatttaaaatccattctcggctcggagacgtctaacgagatgaggaatgacgaggaaacaacaaaatgttctaatcggcaaaatcaaaataacaaataaacgatggagcttcaccggaaaaagaaaaaacaataagaatatcaagatcagagagaaggagacaaaccttgattttttcttcttcgaaaacttcaaatgagaaattctcaaagggatggctcgctatatataagatttttaaaggcgcgttgggtccgcaataaatgatgaaacgcgttagaagcgcgtgggcttggcagaaagagaaacgtctgcgtgaccctcgggaataagccaaaaatgtttccacttctcaagaaagagtcggctacatgcaacgaaagtttgaccgtccaggaagattaagcgacaaggtcacgacttgggaagatgaatagtcagctcggatatccactcatgaagctcatcgcctttcccgccaaagttaaaaagctggggggcaaactgttggggtcagattttacccaagtaacctagccgaccagaggaaatgcctaaggccaagatcgttggctcgggcatcatttcaaaggaccacactgagccggccccaagacgtctctggcatcacttcaaagagccatcccgagccgaccctgaaacgcctcggacgttgttatggagttatcccgatctgaccttgaaacagttcgagcgtcatttcagagaaccatcctgaagcggatctcgaaatgcctcaggtaaacgtcatccggctcaggcgtatctccaggagacgagccgcccgaccgcgacccaaggaccaacttaacccggctcgggagaaactttgtatccaaggagaagactaagaaccgatgcaagatcaaaaaaccatttccggaaaacccggaaatgctattagaaaatctaaggatatgatcgagtatagaatcaacaagttaaagccaaaacgctccctgcaaccaataccttggtacagggtcacgaatctctggaattagtggttcagacatttcatcgaacaccttttgggcgcggaaatgtctgggctcaaattccagttcatcagaaagcaataggcattaagaacaactaatccagaagggatctatcaaccaatactcaatcacctagcatactgagaattctacactactctaacccatcctcagaaatctattcactactcagacatcataacagaaagcatagacgttgaacaagttgaaaacatgataacaacagtgtaaaagcaggatgataacagaatgaacaacagtaaacgaaatcaagaacaaaagctgaatactgaatagataaagagaaatccggattataaaaggtctagaacacaaggtctgcagaataaaactagataaaaacttttctacgaaaatgtgaagtacatgctacttatagccaaatgtgcgaaaatgtgaagtacatgaaacccttatactcaaaacgatgaagtatagggacggattaagaactgtactcgacccatgtggtcgagtgggaggtcgagtgaatagctggagtcttcttttcttccttgtgctcgagtgtctggttgagtgcagaatgaagaagactctgaagcttgcaatcgagtatgtagtcgagtggtggtgatggtgatactcgacttcaaggtagagtggtgtggtcgagtagtggtgtggtcgagtagtggtctggtaatggaggtgaagacactcaaccttggggtcgagtgatgtgatcgagtgatgatcaggtgatggagatgaggacactcgacctcgtggtcgagtggtgaggtgaagtggtgatttcttctactcgatcttggggtcgagtggtctcttgagatcttgaagctcctactcgatctctgggtcgagtgatttgtcatgatcaggtccgcttcttccagttagctcgtcaatagctccaaatcacctgaaatcaacacaaatatgcaacatgcatgcaaatctatcctaaacatataaagtgatgacaaatgttgagaaatggtataaaacagtgacgatatgatgctaaagtgatgacaaatggatactcaaaacatgcaaaatacacacttatcaactcccccaaacttagtctttgcttgccctcaagcaaacaatcaagaacaagctggaggtgaggtttgaaaacggggactcagagccaaagcaccagataaaccagatgaaatcaatgtccaagttgaaagttctaagctgcaagatctaattctacttaaaaacgttagccatgcctcattatcaatcaatccgactcatatgctcgacctacacatgttttcaaatctaccaatccctttaacattcattagttctggaacgtgaatcaagcaatgcatcatcaatgaactcatttggctaaggtaaaaggtcaagagacaaagatggtcccttacagaataggcttcagtaacaggggatctctcaaaaaatgattaagctttagtagaatgctaaaggtaagtctcaagctatgcatacaaagatacgatcccatctacccagagtatctcaaatgaagctctaatggtaatcccatctccaatcccaatataagaacttaactctaccatttgcattcatgaatcttttaagccctttttctaatcattcttttcttttctcttaactctaggagaagctttctcagcactttgatacatctagcggatttggatttctttaacaactaaggttcctgtttttaacattttaaaaccaagggcttttcccatcttcaatagataacaagaactctttcttttctttacaaatcccgaaacctttactagactttttctgcttctttagcttacttcacctagagtcttttaccttttcttatcaatgaatcaacctttttttttattttaaacacatcccaacccaaagtataagcgcccacctagtcttatctagtccgaaaaatgcaaactagaactacatgagacactatctttgtggttacgaacctaacactttctaccaagcttaatcggaataagacctcacaaacactcacaagtgatatagggcttgaaagaaagtctaggtttgagtttgggttaactgctctaataaggagagtcaactacttggattaacaagagtgatcaaaatgaataagaaaatccaagtattttagggtatccatgagttcaaatttgatgcagacatgataattaaagatcagattcaggttcaaattgatagggaatggtatcagatcatgacagtgtggtcgaatagagcaatctaggcatggttcagttttatttcaaattcattgactacgcaacagacaactagcaacgagggcactgagtttatccagtgaatcaaaatgcttacaaggctatctcatcatcatcccctatgcatatgcaacaatcctaaatgaaacactatatactcgatcctaaatgtaatgcaacaacatgaacactcttttttttgtgaaatcattttctgaaatttttcaaatttttttggtttttctatgccttagatgaatgcagactcaaaaatatacacaatgcaacacacacttcctgagccctcccccaaacttggaagagagtacttaggacaaatccaatcacagaaacaaaaaatgaagaaacaaatcacaatagatgatataatacaatggtgaagtgaggcgcttacctcagtcgaagaatgaacgtagttgctcgtcaatggctgcctgtgattgctcccaggccatagacgaaccaccttgttctctatcagctccagcaggtgggtactcgacctcatcagctctgctgcggccagcaccgcggtcgcgtaaactacgagactgcagaagttgtctgctcctactgctagatcgagtgagtgtggtcctcctcttccttcagattcacgaggctcgaatgatgaatgcctcgcagggacatgcggaatctcctgctctctaggctcgggcctgcgccgacttggctcgggcgcgtcatatctcctcgaaggcatgtcccgagggagatgtccctgcggaatagctgtagtggaagaggagcagctgatcttgtccttcagaaacttgatagccctgaggcacttggcgagtaagttgtcctgtttcttgcaccacttctgcagcttgctgttgttcctgtgagcttcgctcaaactcttgctttccctcgcaggagatatatgctcactgaaatgatacatgctcgtgtcaaactccgcctcatctatatcatccgtctcatcaacatcttctgttgtagctccttcggtatgactgatctcctcagttggtggactgccctcgaaataaagatctttaagcgcaggcttgaagtcaatgttcctgccctcgagaatcctagtagcgtcaatgcaggggagaagaatgttggcgaaagtcgcgagccatgtcaaactccaagaactcacatctacgcaaatgatccaagtccatcatcctcggtgctaaccctggttccttgagcggtactccacaagcttccagaattggcgtcacaacgccacccacgcatagtgctcctctcaccttcttctttccgttcttcaacgcccatttcctgtatccacacagatggatcaacagagacattactggtggtgcgttgttgagatcgcctctcaagacattcttttcgttcgtctgacggagaatccctgtaagcgcataatctatcatctccatgtccgtgttagacacggtgcctgtagattccctggagtaaaagacgttggcaacccatctctgaaagtagcggatcacaggactccggatttggttgctcttggaccgcgccgagtttagcggtagattgttccctatagtggcccataaatccttaagctcttctatgtcaaatctgggtttagttcgctttccactagggaaaccaaacagtttttccaacttcttgatcgaaagctgataccgctgttcattcactgagaacgtcaagaagcctaaccccatggtattcagctcaaagtctgtgagtgcctcatacatctccacttgcagcgtggaaagaaactggattgtctcctccttataggcagggtaagggtaagacatgagtgtctccagatgacacttctcgaacagatgctgcacgtcctctagtaaccccagctgggctaaagtctcatagcacggatacctcgttccccagaagtcattcatctcaaagaatctgatatactcctccactgtaacctcgtcgggtttgttcagcagcttcgtctccttgcgccatgactctggctcatactcagtttcgatatcctaatcaatcagctcatatttacttgacatcgccctctttcctctggcaatttcagctcttctctgattacgtcgggctgcagagcgttcgaattcatccctgaagctctggtaaatatgtcgctctctcggtctagcggaccaggactcagcttcatccacattgtaatcagggtccatagaggattcttcattgtagttactcatgatgaaacctgaaaacagacgaaactcaaaaataagcgttaatacgttagtaacagcaaaccaaaaacacaaaccaatcaagtgaaccggtcgagtataccaaaaaaaaaatttcttcttttttttcggtttggtgaactcgcggtcgagtgatgttgttttggtggtgaatctaatgagcttgaggaagtcgagtgataaatgtgagcttgaaaggcggatgtgctcttgccgtgaagtcgagtgaatggagtaaagcggtgaagttgatgatgatttgaaatcgagtacttggtgataattggagtgagctatgatgagagagatgcagtgaatcgagtgaagtggctatgaaggagaggtggtgaagtgggactgtggtcgagtgaagtatgggctagagagatgaagcggccaagtggtgcggcttggacggaggagaaggtggtgcagcggtcgagtgcgtttgttgaatcgagtgactcggttatgaagatggtggtgaagagatcgagtaaagcttgtgagaatgacaatcgtgatgagaactcgagtgatgttgaactcgcggaagaagagaagtcggtggtggctttggagaagaagtgagctgcggcggtcgagtgatggtcttggggtagacgtcgagtgattgtgacgaacacttgaggacttgaattgcaatgagcgacgatgggagatgagagagttgtgaaaagtttggtgtttggagaaagatgaggtcgagtatatgaagagggtggtgaggaggtcgagtggttgggagtatgagagttgttttgttggtgatgatgaatgaggatgggtcgagtttgataggtgaggtggagataacaaagtcgagtaagtgataagtgaggagggtgatgtcgccgaggtcgagtggagtgtagagatgggataaggtgagggggtcgagtgggtgtgagaagaaggagttggatttcttgtctgttggttaggagcgtgggagacatagggtgcagcagtgggtccctcgcttgtctctttgttctgaatcattactctttcttcactaggaaagtttcaggaaatcctaaaatttgctgtaaacttgatgaactctctgtaagactctgtagctcctgttggtcgagtaaaatgatgatttaaaagtttttaagttttaaacatcatccatactcgaccaatgtgctcgatctctaggccctcagtagagtaaaagttttgaatttttactctaccttcacgtactccttttttttttttttttttttcctgagaacgacaaacacaactacaacaaatcaaaaataatgagaaagtaaaaattatttacaaggataatcatgggacttcctcccaagtgagcttgttttaagtctctagcttgactcctcacacttatcaagaagaaaatgaactgtagagagggtctgcataatcctctctgataccatcatcatactcagcgtcctccttggagaggtctgcagcagaatactcaattcccctctcttcaaaatatgcttctttctcttctggagggtaatctatctcttcagaccatcttgaagtgaacttctttctcgggatagtgtcgatcccgcctttaggttgagcttccttctgcaactgattcagcttacttataagttcctcaacagtgtgggctagcttctctatagtttcatcttgcttatcagacctctttttaaattctttcactctttcagtctcatattcttctcttgagatcactctatcatttccagaggttcttccattttctgttgacccttgtggagttctgttgatgttaaactgcaacttgatgtgctttcaaaggttgagacctattttcccttccctgacatctatcactactcccaccgaagctaagaagggtcttcccagtattaagagatccttatgctctacttccatatccatcaccacgaagtctgtaggcacttctactccattaatcatgactggtagatctttcagcatgccgaagggttttctagaagacctatccggtcacaaggtttatactgaatgaactctaaccttgttgccacaaagagtggcatcaagctgacagaggctccgagatcgcacagacaatcgctgaaagcaaattccccaatggaacatggtagagtgaaagatccaggatcttctaacttctcttgaacaatcctcttattagcagctcgagatggagtggcatcactttcatcatctgaatcgtgatacatcttgatcctttccagtatcaaatttctcacatctttgtgaggatcaggaatcaggttgagaacttccatcagtggcatcactgcttcaatctcgtccagctgcttcgctgcaacagacttgtatctctccatccacgctttcgtgaatgtccacggaagagcacgtgagggtagtggagtaggtttgaatcgttttaccattctctcaattatggcggccttctcttccgaggtggactgaatgagatggcgagaatcagccgagtggttgaattcaacaacagagacttcaacctgagtagaagcctccccttcttgaacatcactgtccctagtgatgaaatcagggacaggtcgagttggcagctctcgatcatggcagatggtgatggcgggagcggttgcatactcttttggattctgtattgacttcccaggaagtcctgtgactttaggtgcagaggtagatgttgattggccttccaagtatctgactttggtattcaatgcctccacttttgcattcaggtcattgtagctgcagtccagcttatggtgcaatttagataatttcttagcaatttccattgagctagatgcttgtccttatagcagctgttggaccatctgtttcatttcagcatcaggagcagcaggaccttggttttgctgatgtgcaaacccaggtggtggtggttgctggtagttcccctggaattgctgcttaggaacgaaaccttggttgtagtgaacaaaaggtttgttctgaccttgttgttgctgtggaggatacacctgatcctgaggattagcaacgttggtgctgcggtaggagaggttggggttgttggttttgaagttgttgtatcctttgtagccaccctggttgttgatgtagctgacttcttccaactggttaccctcctcatcttggacttgaaactgctcgtcatcaacaaggaagtgcacattcttctgctggctaagaagaatcatgtccagcttgtcattcagcactttgatctccttcatgtgtttgtcatcagagtcaacggttcctctaacggtcctatcacagtcttcgttgtaattgccatttgattgagcaaggttctcaaccaattcccagccttcttcaacatccttgttctggaaattcccattgctggcggtatatagaagcattctgatgcgtaggactcctctgtaaagagtgctgagcagagaggctttagtaaagccatgatgagggcattggttggtgtaacccttgaaacgctcccatgcttcacagaagttttcaccagtcttctgtgagaaaccagaaatctcatttctgagtcttgcagttctggcattgaagaagaagtttgatagaaaagccttcttgcaatcatcccaggtggtgattgagtcatggggcatatttttctcccagatgtgtgctttgtcgcccaaggagaatgggaacaaacggagcttgaatccgtcttcactgacaccattgatctttgttaggttgaagagcctatcgaattcatcaaggtggtcgagtggatcctccattggtagaccatggaatttgttcccctgaatcatcgagatgagaccactcttaatctcgaagttgttgttatggatagcaggaggtgcaattcctttcctctgacgttgatcacgtggtgcatctccagcaccaatgttggaagggccattttgttgattctgttcgtcagccatatcgagtggttgctgaggtacaaggttgactgtgtttctcctttctctgagttcgcgagctatgcggtcgatgttgtcattcaaaaggaggttctgattgcctgttgatcgagttcccatacagcagagatgtacctggatcaagaaaacaacaagaaaaacacacagtttgtaactgaaaagaaaattgaaaaagatcttgaaatcttccgagaatatcgcgagaggcggtttgccaaacccctatataaagcgccgcaaaggacaaacaaaggggacacacaaaaaaacgctctcaacctcaggctatcaaaaacgctctgactttgaaaacaaaacacttattttctatatttctaaacacttgtacgatcaaatcatctttatctcaataataaaatcaagaacaccgtccgtagtaatcaacaattctgttgttctttgagaatctcacaaagatccgttctttgaagaaaccctaaatacaatttcgattgtgtgagtttcgactctcacatcattgtttagtcatacaacatgatttctggaggatgtttagtcaaacaatataatttttggagatgtctataaaagatcataatattacaaaatatcaagcataatgtctataaaagaaactatctaaacattcgattcacaagtctgcatttgttgtgaattataacattttccaatttcttttttttttttataaaaaaagagtattcttaaatcgtaatttaaagtgataagttagagtcattcaagaactatattttatatggatataacaacacctatatttagatgtattgaccggtctcaaaggcatgtgtgatataatgtttagattcaaaatggataattaaaaatatcaaaatcaaaccattattagcaaacaaataccatcattagaattaaatatttttataattcgtaataacccaaaataaaaacgctgaaattatcgcccagcaaagaatatcctcatgttccaaacctcgcgacaatcatgattgaataagaactgcgtacaactttgagttgctgtaacatggatggttcctataaatataaaattttagaatcgttaaaatatcagttgaattattaaaatctaataatatatgataacattttatgtaccttcaaagagctccaatttagcaaatctgattctgatgattttgacatcatcaacacaagtggcaatacgggttataaatctattaatatggaagtttggcaatcgacatgatatacgtaccccactgcattaacgccaagcgaatcaaacgctctttaatcgatcgtacgcaccaacctcccaatcagatctataaatttgaatttgatatggtttaataaacaatttttaaaataatctataacaaaggtataacatatcacttacccacataataattaggatctaggagaccttggttgacgtcacgaaacttgacaaaagcgaaacaatcagtttctaagaaagaccttagtaaagtaatcgaagtaagggcattcaaacgtatgacaaaatcgtgcctagctggtcaaaaacatcctcgtacaatatagacattaaactctgataagagaatgcaatttccttctatgaggatagatgagaatcgtcgagccacgtctacatgaattagggcatgtatctttcgatgctgtttaagatttttgaattaggttgaatccttatagcataacaaatttatgataattaataattgttaccttagaatctgaaaatataaattccaccactctatggcgtaacgccgggcatacgaactttcgaacaattttgactttaattttctttgtaatcatgtccggcttaagatcctcaagatcttcacaaccatccactgcgtacgactctttagacaaatcgtcatcatcttccgactctgaatcagtgataactaagcacacgaaatcatcgttaacagcacgcaaaaacatattattttcgacatttaagaataaaattagtattatccaactatcagttattaataacgaacacttcacctcttttgcgcttattttctcttatagtttttaaaatctgcatcctcttaagcctcgccaaaccgcttgcagttgttggcaccatcaaaatcttgcaataatacacaacacataattcagtttgtataaacaaatatatatacatgtacatgcttagtggtgattgataacttttcaatattgtatattacagtaagaaatatattgaatcgaattaaaaacacggaccagttagcaaacttttgtctaacaaatataattaaacaatcaatttaccttagacccgaatcacgttccgattgaatgttctttgttaagagtcaggaaacatatatatatatatatataagatttttatgatatattcgaatatgacataataattaatcatgattataccaaatttttgctaggttttatcctaacactttaatatgtaaaattacaataaaaaggagtattacatttaatcgtactaaacgaaaatagaaactaaccaattatttaaaataattttgtatggggtgaatatgtgaatatatcgatattatttcctaaaaatactataattttctatactgatatataggtttttataagattcttttagtgtgaataacagtgaagaaacatagataatgttatccgtataattgtttgttttcttagtactaaagatattttgtaaaatatattgttttaatgtttatgattcacaacaaacatcaatatatatttgtttgaagaaaaatacagacttaattaaagaaaataataataagcgcatattgtcatgaatgagatacagacagacgattagcaatcatacatgaagaataaaatatgatgataaacagaaacatctagaataacgatgaaaataggtttataactatgtagcaagaaacagtaacgattaacaaaaaacctagacatattatagtgagcacataatgttatgacaaaagaaacattctccagtattgataattccatgcattatccggaattctcagagacatccattgcaatcctatgagacagacaaaagaaccagtaattagaatttagcaacctatatgtaacagggacaaatacttatcagattgaaaacgtacatctcacgtagctcatcggcctgagggatattaggatcggggaaaacaattgagagaggaccgaacgtgcaaatctgaacattttttttaccatcaaaataacgatctaccttccaccatccatgcacggccacaataacaccaccaccacgactgcgataattttgattgaaatcaagagcctgctttccagtagccaagcattccaacacacggttgtacataaaaaaaatatatatatattagaccttttatactaaccaacaacaaattcataatattcataaataatctcactctttgttcttgagttttgaaacaaatccttaaatcattgacatcgttttgtgtaggcctattattctccacctctcctacatcatgaatcgctccaaccaagtctagtatacaacaaaaaatagaacatcattaaatatcactgaaatttattcaaatagattagatgattttcaagaacataagaaattaacagtaaattaaacgggactttaccgattagaacagacgtatcgacctcatcatcgataattgaagagatatgcgaaagcgtaatgaggaatcgcaaccacagaagttgtcttcctaacaacattgtctttgaagaaacaaatcttgaacttatgagatgttaccctaacgggattcgaattcggaaaaactccaaaacgcatgatggttatccaatcgtcaacatcaataaattcattatagtagtcggcaaattattttccgatcatagcctcaaccgtcacaccctactaagtattcatgcaacaattgttcaataagcttcttaaaatctaagatctagacaaagaatacacgataattcaattaacttacatgcttgtctgccaaaactaagctgactgtcttagacgaagcattgagaggaaccacaaatgatctcacaaccctgagacggacataacatccggttatggagggacttatcaactcaagattgtgaaaggacttcattgttttcgggcgttaaagttgctctgagaactttattttctcttaggtaaccttttttttccttcttattttctttgacgatgacgattataaagttacgttggttcccgaagcaaaagtcatgatggttcacgtccaatcgtaatatacgaaaactgacgatatctataatcagaataaactaatatttataatcagtaatcttatcataaagtaacttaaagtgctaatgaccgtctgcatataataatgaccgtccgcatataaaagtaatgacttaaagcagacatgcatataagaattctcccgtttctgtaaatttgtatatacattataataatcgagtactttgttattccgtaatgtattctagaatttaaatcagaataataatagagtataaaacgataaatattataaaagtcgaaatagttttaaaaagacaaagcaaaatatttttaaaaaaggaaaactaagcaagattttttttaaaataaataaaaggagaactgaacgtgaggattaagtaagtttctcgactttggccttctttcttgtaaccatcttctttcctgttaccggtttcgatttcacgtcatcaaagatccttttatccgtagaaggactgtcatccacaaccgaggactcaatcatctcaattttcggattgatgatatcacatgcagaatcactcacaacagtcaactcctacgaatccaatgaacataaaatattatcacaagacagaagtcataacattaattaataatacttttaaagattcataaagtaaaagataacctttgcgaatttttcaaccatatccgttttttcccaaaatttctcgacaacatacgcagccttcgtactcttcaaattatcggtaccaatggataacttgaataacatggttttccccattaaatcagcaagaacctcgggtaaaatagaagggtccgactcctcaaacaaatagaataacattaaactcatcaagttttcttatacttattgtgggcaaatattgaaattcttagaaagtttaaatattaaaaattcaaactttactacgtacctttggaacttctgcaaaaaactcagcagccgttttaccaataagacattgagccaatccatcaaagaagagtaatttaacctcaggcgaagcaccataagaagcacgtagaatgagcttatatcgatacagatcaagagacatcattattaacaaataaacaacgctaaaatttacgaatgaacaaaccatttaattattataacatctaaaacgcatatacaaacctatagctaacatcagtagcgtcagcatcacatacaccacaactacagataggaccagcatcgccatgagccttcttaccacatactttgtggatacggctgaaccttcttaccacatactttacatgcaatatagtaccatttaggcatagtctcgatgaaacagactctggctatagtgacacacgtggacacctaattcagacaaaatataaatacaggttagattacgctaagtatcatttaaaatagagcgtaaacgtaaagacgtaataagacacatacatcacatgcatacacaatatcttcgacagttttcttttcattcagttgaaagaactcctcgtatagagtaaccgcagagtggcttgttttattttcactgtctacatggatcaaatcctcacttccagccgataacctataaaacagaacaaataaccaaatttatgatttgtaacatgtacctaagccatgtaactaatatattagagaataagaaaagaacatatacatctgtcgaaatttttagacttcaggaataggaggattgaatagaatatccgttgaattgaatgaattagatatactgataacacctacgaaaaaaaaaagagatgtcaatatttccaacttaactctacatacattataatatcgaagatgttacctttccactctttgatgcacgcaaatctaacgacacacacaataaccggctcattgttattcttaaaatatgaagagaaatttatagcaagatcacccatatagtacacgcgaaacgatggccactttttactcaaatacaaacaaactaacattaaaagaataatatttaataaaataataaagcgaacatgaatgcacaaaaaagaaaattaccccaaatcctatatttcgaaactcaacttaacggtatctttgcctttcgctttaatgctatcgagacttcccacatcaacgatttgtccaaggacatctaccaacataaaaaaagaaaacattagaaaataacctttactttactaatcatagtaaaaatatggaattctaatacaaaccaatcaatatctgcctgtctaatctcccagacaaaatttcattaaattccttaaaatatttatctggagcttgagagggaaaattgtcacatggtttcaccgtagtagttctatagaagactattttgaaacttaaaggactcgtcctatagtcaccgtcataataaacaaaactgaaagtatcgataattctgctttcaccactaacaaactggtgctgaaacctcttacccaatccctcttcgatggacgcatgaactctcgttccctaatgatgcaaatattgaaaaattgacaatcaaaagacaacatgaacattataaagacaaatagtttaaaaggaaaaatacaacaatacctctccatccaccagaaccatctctatagatttaaacaatctccaaagcctaaccacacgtactttaatcttgtattgatctagagccggattaatctccctcagataaacaaaagaattcgaaagaatagacgccatgatcaatataataatctaccaataagtatggaagattttaagaatgcgtgagtatatcgataatgaatgaaactatctctatatatagtattgaactaaccgattatataatattatattaagatttgcatttattaaaattgtataatatctatatctcaatatttatatattttaaaaatcaaacgataaaaggaaaactatatcgacaattaacattttttttttgctaatataattcatgtaaatatagataatttcccaaaaaaaaacaaaaaaagttctaaatttttgaaaagatatggaagataataacgtaaaatatatggtagataataacgtaattaactgtatcacattcgtttgagagatttaatattatcatagcgcaaatcatcatggaattttaacttcttttttttttggtcaaaaggaattttaacttattactttgaattttcggcattttaattggagagaagaagctatcgaaagaaatttagaaaacttctaaatccaacaatgtaataaaaatataattacgaatattatgttgccataaattcacaaaccttgctatctgataggattacttctaaactcatcccaaatccacgttcattatgttgccatagatttagtacacatactcggatgagccaatcagtcttggatgaattcaatcgcgaacgtcgtcgaaaatcttgtaccccatcgcctgacaaagtaattgaaatgtaaactaagaaacacgttccgatcgaatgttttttgctaggttttagttgtgcagatcaaaaaaggtcagagagcgtatctatatattaggctgatatactcgaatatgtcataatatctatatctatttaggaacattcggaatatttgtcagagattatctttactttttttttatataacaatacgcattattccatataatcatgcgagctaaaataaaatttacccaaattatttgataaatattaccaaataactttatgagaatattcagtataatattatttaatatttctaaagattgaaattaccattaccatgatactcgattccatacaaaataggaaaagttaaataaataataactccaaaatggttatgcctttaaaatgttaatatcaatatattcaaatattcgtttaagtttaaaatttttaaaatagaaactcccatttttgtttggtttactatattaacatttttaataatgattaaaaagtaattccaacaaaaattctatattaatttatttaagatatgttaatactctttatataagatataagattatataagataacattaaataatatagaaattaatataaaattataaaaggggttaaaagtatctatctatatatcttattttattggaaaagtaattattagataataccgaatacttgcaaaatataaagttatattatagattgttaccgtgttggtgagtttgttaaattattatatatttaaattcatcattatcacttatcagcaggcgtcatgtttcagagacatatcatcccgagaagtaatatactcaatattaaatattttaaaattttcaatattcaattaagcataacaaactcacaatataagaagtgtcaaaaataagtaatattcccaagatagcacagattaacttagatgatcaatataatccaaaatattaaattcgattcttcaaatcataaacatatgtgttaatgatattcaatataatccaaaatattaacctcgattaataatcaatataatccaaaatattaactacaattcttcgaataataatcatgtgtgttaacgatgttcaaggtgtgctaatgatgttcaatataatccaaaatattaacctcgattaataaagttgatatattcccaaaaatcaagatatttaaagattacatcgtaaatcaatatatttagggttacatcgagatatcgattatacgataagggtaattataactccggaaacacgtctttgggttcataacgatttgtgcactctctatcatacgatccggacaatgttgcaatcggtgcataatcttcatagactccataatattgtacacattattctgaacaaaattaaaatttaggataaaaaatataaccaaatatgaaatattaacaaaagcaacaccgctgagaaacgctgatttggcaaaataatttaaacacgtaaaagaatacaatacatatcaaagaaaatatggccgcatgtctaatccttttataacttcgaaaacacatctttgggttaataacgacttgtgcactctccctcatacgatccgaacaattttgcaatcggtgtataatcttcatagactccataatatagtacacatcattctgaacaaaattaaaatttaggtataagaaaattgagccaaatatgaaatatttgcaacagcaacactgatgggaaacactgttttggcaaaaataattacaacacgtaaaagaatacagaacataccaaagaaaatacggctgcatggctaatccttttatgatgatcgtaactatatgatcacgtaaaagtaaaccaaacaaatattgttattttttactttaaaaacacaaaaatcaagaaagattagagagatacctcggtttgattcgaagttcgtttgcaattccaacacccccaaaatttattattgtacctgagaaacaaaaaagaagtgctaatcaaaatcaagtaaattctcacaaatataaaaaccaaacagctacaaaaaccaaaacatgtaatcgaagaaactataaagcttgggtaaacaactcatcaccaattggcaaagatctataagatcttactttccaagtgaccataacataaaaaagagttgaaaaaatcgatgaagatgcatcatagaaaggacctagattgaaatacaaaaaagaactataaaccatattgctattgctatgcactaaaatcaagctacgatgtttgtgtttgagaggagggatcatatatttataggtattttcagcataaggttttagggttttacatatgacggcgtaaattagggttttagggccaaatccgtcagttcatattctgagagcgaacgtgaggcctttcgacatctgctttaatatataagatggagccattctggttacaccattccacattgatatgtataagaagagaaagcttcttattataaggcacaacatacctattgtcacatttaattccacccttcttaacatagtcatcagtttttcttcttctataaatagcataaccatcactaccaacctttgttatatattgatgttttctgggataaagtttagaacattctccatcaaccatacatggataattgacatttggtgaaccacatggaccgtgaatcatcgagtttttgataacttcatatagctttggttctttctctttgtcaggaatctaagcaaaaataagtttatcaatgacgtatgatgttagtaatttactcttagcatccataaataagagaatgtgtgcatgaggcaagcctcttttctgaaactcaacaatatacatcgctgcaagcaccaaaatatcagaatgagtacaaaaaaaattgatggtttagaaaactcctaagtatagtatactaaaccatacttacacgcaacagtcttcccaagcatcttcttcatagttaaatctttcattagagaatctaacttgattttcaaaatcctagctataatgtcaggtctgtcatcagcatttaaacctcttttctcgcagtatcttgttatctctagccactttgggttacatgtaaaggtgatgaaaagattgacaaaaccataatgtttacagatagccatcgcatcataatagctttgaaccatatatctaggaccaccagtgaatgaagctggaatcagaagttggttaccttcttccttcatagtggttgctcgagctgcagctgcttcttttacagatgtgtagttttcacaacgtatcttagactgattaaacttgatatagtttaatctattagattcaatagtagtataagcatcatagagaaactgctggaacaacctctttgtacgtagtagagtttggcactcatcttctctctcttgaatgcggaatgcaaaccattgtctcatgctaatacacctcttcttcttgttcttggctgatttataacacttctcaatgccaggtctgaaaccatcttcaccataacaaaaaattagtggatattgtagagccaaataggaaatgtgaatctggttaatcctctttaggtgcctatattattaattttctagaacaatgtctctattaggcatgcaatggcgaaaatctccagggatcaaggtttcaacctctgatgtggtaggcatactatatgtcctgccatcaacacccttacgatctgcgataatacgcatgtgaaacggctcttcataatttgtttgaatcctctctctggctgtcctgaattttccaacataaggagtgcaacaattaagcatttttataatgtctacaataaatttcgatgaggtcataaaatgaaatagtagaagtagaagttgtttgatgctaaagcaagttttctttgaaaacgatgtaagtcctgatctttcaaatgaacctgagataaatttgagttttagtaaataactttgtgagactttaatgtcttgtagaagctgataaaatataaaagatagatcacttaaggttgaaaatgatattaccatgtgaatatggtatagattttgcagaccctctaggctgagtagaagtagttgtttgattattatcatcacaattgactggcaaattagtgatatctctgaatactctgttgaaagttgatctaagaggaatagaaccattagtaaaagcaccaatagcattagatccattaaactgtgtaatttttctttgagaaattgttctgttaactaaacgtggtctcttctctgatggtggaggtaaatttagatctaaaagagggctgtttttctttttcccatttcgtaactttagactgatatgagtagtaagtgatttaagatgatgcatcaagattttatagaactgttaaaattaaatggaatagagaccataccaagttttagaagatctgtttgttagttaatataatattttctaggtgagcaaaatatctaaacttgctatgtttttggattttttcatttaatttacttgaatgaaaatataaaaaattagactcaaactatgtaaccaattagccctatatcatcgtgaatgataatattcaatttccttttgtagagtaccatttattttggactctatgattcaaagtcagcaattatgttattatttctcaactactaaaggtatcagatcactacttaacttagctaccatatcaaataaattaaaacgcaaatgcatttgagaagttcagatttctcaaatgacagagaaacacaaataaatagttatagcatagagatagatatgtttgaatcctaaaaacatagcataaataaaaaacactactcaattcaaaaggtcacaaacatgaaaatagaaataagtatttgggacgatagaataattcaatgtaagtcttcaaactccattctcctaagcttctcaaacttgttccattgtcacgtcctcatcatcatcatctttgaaactccggctggtattaacaaaatatgagggcaacagaaacttagtcattgttgttacttgtaaactacataaatgttaaaatctttaaagacttacatgtaacttgcaagatcaaagtaagggaatcttggatctatgtctagacgtgaacaaccaaattcactcatcaagacattttcacctaacatacaaataacaatataaattctaaagatcacagaacacaagtgaaggtaaactacaattctctagagatgttagaaaactaaccttcaagctcagagattctccagaagcgcacaacacatacaattggctcatagttgtatgttggtctacagatacgtctagaccatttgttaacaaaccattcacagcatttcccaacagcaatgcacttaaattttttgttccctataccatttcttaacaaaccattcacagcatttcccaacagcacggcacttgtctttttgttccctataccattcgacattacttatgctacataatcaattcatctatgaaaaatataaagactgcaacttaacttattctaaatctataaacttaaaaacttaccaattatacataagttcaaattcaacatatctggactcataatcgatctcatcctggcgacaaacatagggaaacctctgaatagaagacacacttgacaccacaccaatagcatctatgcatcatagaaaattgcaatctattaatacagtgtagacaatcaaatacataaaacagaaaattttacttactagtaacgtccgagacattctctagagaagaatactctaggtcaatggagaaaatccagtctgtgaaagaacatttcttcaattctgacataggccaaacggatgtatcccacttaaacttgatgtgtagagggttcgcggtatacttgaatttgttggtggaggaaatgacacgaaaatgagagatatgataccaaaaaccttccttgagaaaatgcctgaatttgtaaacttgccttttggaacggtagcagtgattctgtgatgctcctaattagcccaagaaaaaacaaaaattagagcactttaaaactatttgacagaatcgataagcacatttaaaaaaaaaaacagatgttaaagaactctaatacatatgataaaaactttttcatcaaaccaaatcatggttgaaacatcaccataaatgtttgaaggatgatctcatctccacaggactttcacgtttatagtccactgcgtcgagttcacattcaaatttatgattttttttaataggctccataagttctaggcaggttttttttatgtttcttcattttgctaagtttttagggttaacagaaaaatgaaacctaatttgcttatatatataaggtgaattatatctcaaaagatgcaacgaatgtccgatttattaataaaagaaaatacgaatcgtttgagggtttaaacagatcgtttaaattgtatcttttaggaaaaaaatgatgatggtgtaccgattgaactatatctctataatgattacaaatcaggcagttacctaatatctagcaagttctagattcggcttcattattttatatatatagttcaatttatagaaatataaatatctatatcgaaataagattttattagttggaggtatgaatgtatacaggttatatattcatgaagtctatatctatctataagattgtaatatacaataacaaaactttatttacactgttacaggaatacattcaagtgatgcattcaaggtttgaaggaagtcgaagacatctagttgcagagtaattggtaagtttcatttggactctttagatatttcattagaacagagataggaattatatattatggttataaattagtaagagtcgaatatgagagcttaatagaatctttaaaagagaataataattattaaaaagctgaaacataatatacaataacaaatctttatttactctgttacaggaatgattcaaatgatgcattcaaggtataaaggaggtcgaagacatctagttgaagagtaattggtaagcttcatttggactctttagatatttcattagaacagatataggaattatatataatgcatataaattaataagagtcgaatatgaaagcttaatagaatctttaaaagagaaatttaatgattaaaaacctgaagcataatccaaaacatgaaatccaagaacttagaaaaacaaaaagattcctaaacttcaaaacattgaaaccaactaaaaaacagagcttatgtgacactaagtgttcaataagccgcagtttttaagagacagagataagtagaactacttcttctcaactttgaccctaaccccgaccatgttctttgacttctccttcttgaattcttgcttcaccatgccaacatcttcgaacttaggtttttcattatctttttcaactgccactattggtgtcttgatatcaattgggacaatggcttctttggaatcagccacctctgcatccacgacaacactttgttctgcattctctgatatagacttttccaaatctaatggtacaatacacacctttttcgaacttgaaaaaccttcagagccattcaattctctagcgtaaacacgctttgaagatggagtagtagagtctggcgaaccattacaattctccaacatgagtggcacctccaatccacaaaaagttagacaccattataacggaaatttatattttgaaatagaaatgtacatatagatgtgtacattacctgatcaccagatacaattgatgcagggttcacatgtttagcagaattctctaataaatgttcttctatcagtccattttcttcaaaagcacctttgaaaccttatagattccttttccatccaaaatattatctttctcgacccacaccagaaacataaatgtcttaccaatcagattctttacagaatcaggaaggtgttctggatcctccatctgcaagacagtattatagtatttaaaatctagattaatatatatcaatttacataaagtagataactaatattctaaacagaccttatcaacagatcaattaaagtacagaggttgcagactcgccaatgatcttagagaaaattgaatcaaacagtagcaatttggctccaccattgttatccataacctttgcataaacatgtaccttacatataattttttttgcaaaaccacttagattataaatgaaaaacatattctcaagaaagagatgaatgtattaaatactctgcaaatttagtgttaaaatcatatttacctagaggccacatttgtaacaacagacttgcatgtggcacatcataatctaggcttcttccccttgttgttaacaccattaacaccaacatgtatatgattaaccttcttattacatgactacagctgatgtaagaccaagcctaatccgtatctattacatagattgtgcacagaactctaactttgccaacaaatataaagttgataccatattagattatagtcttaatgtctttatctttacaaagtatctgattaaaaacaatcctcagtcgagttgagcagatctgagatggtattccttgcaaactcactgtaatcaatcattttcactgcaaccatctcaaacgtcgggactcttgcacaaaaaatgcaaatattaccatcagctggtagtctgcaaatgccaaaccgtaggtcaataacacataataaaaatcaaaacaaaagtatcatgtgttgagagtagatgcatttacgattgactgaaagccacaacttcgaggaagttaggattgacatgtacttgagatgcatcaaaagagttggataaacttttcacaccagcaattttataaacggttaagttaccatagatcacatattataaaagtaagcactttaatgtaccattgatagaatttacccttgcatgccttaattttggcaaaacgaatgagaaaaatcacattctttccttcagattcctgacataccctgaaaacctgttgagcgtatgatccccacaatgtaacttgcattctctcatccctagtacgtagaacaaatgaatagatataagcaaattatatttgaacaaaaatacataaactaataagataaagacattacatttcatcactgatttcaaaatcaatctttgtagtcggcttattgttagcctctcattcctccaactcgccagtagtaatgatttgtccaatagcatctggtcaaaaacattaataagttcatactttgatgaaaccacttagaagaaaatagatcaatcatttaatatagaaatagaacactcaccaacaaacatatgagggttaagctcaccactctggattttggaaaatggcgccaatgaaaaaaagttggaatttgagatagactcacaacccatcacctcagttcaagcctgaaaccccatcttgtaaagatggttagttggacgaaactggccatacgcataggtaagaccaaaaatctcaatgaatatccattctccaacaataagcttgtgaacaaacttagaaaccaatttcgtcttcacagtagcatgcattttttttcccttatgacaaagatagtaacaatatatgttagttgttatgcaatattgaaatgtaaatagctactaataataaatcttacatattcatcaaagatgaccatctcaatggtttcaccggtgttgcttgtgtactgcttccaggagtggaggatcttaacctggaccctccatgtgttcatgtaaggcctcacgtctttcaagtaagcgaaagtagtagccatttcttaaaaaacagagatgtagaagtagtgaaatgtgtagatagtttgctgtgtaggtgatgatgaaatggaatgatattacaaccttatttataataggcgactcaagctagtaaacctagattttcaaagattctaagcgtaacttctttagaaacagaatgatttggaatggttcagaaagaggaatatgcttgaggatcataagtgataataaattaataagttgctgtatttagattttgctttgattctcatgcaaaatttgaaagatattctagctaatgtgatcttattttggcgacattttaatggcatgccataacccttttaagaatttaattgtgatatatgtgaaacaggaaactgcattgctataaatgaggaatggagggaattgatgatgcgattcaaatcggaaaatatctttggaatgcaagattactttacattttaaattagatggagaatatagtacttggtaaagattgataacacaataccgatattaggaagaattttgagtatgaatgaagtatatttcaaaatatatttactataccaaatgtaagatcatatgatatattaagtgtttgtttgaggtaaacggaattaaagcaactttaataactgatatgttttctagaaaattgataagagtagattaaagtttggtaagatttcattaaagctataatgattttggaatcaagtaattatagatatggttagttaagattgtgtatcaaattttggtaagtaataaataatgattaacgaatttcgtagagttttaagggagtcaatatgcaatatatttaagtagtacttagcaatatccatttttaagcaagtaattagtgcaatatcttaattgttcataaacaatttggtcattgtcctaaagaaaatatcttgtttgattgaatttgtaggaactaaacatttaattaggaaattgataaatgatttttcaactcaaaatctttactaaaaatgtatatatagattaaattgatgttattgtttcaaataatgtgaacaaaactacccaatttatgctattaaatgaagtccaaaaacccaagtaatatcaatcacaaattttgattaaacaaaatatttatttataacattatctatattaaaaaaagttgaactaaattttgtagagttattttgttttactaagaattacacaaaatgtcattacataaaaggcaaaaaagtattaatttttgaaatatttaaactttgtaaaacattattaatatttaaacttataaaaaaataatatttcaaaagagttatatggtggaacgggtttggatcgatattaatacaaatttataatatcatcaacccaaaataatgacacagtttaaatcttattttaatatgttatcagcatcagttttttttacagcactaatataaaattacaaattttaatactaaataaaaaaatcataaatctaacattataatgtatactaataaaattttgcccatcgtatgaaagattaaatcctaaaatagagtacttatacaataaatatatatatatgtaaaaggtttgtacattcacaaaatacaaaacaataggttatataataatgttaagtaactaagcaaattacactttcacttattataaaaaaatataccatgcgggttaaaatctagttatcgtatataatcacaaatcaaaattcgaagaattctatattattatgtaaactgtaaaggttgatcattctcacaagaaatcaacacctatgaaagaatatttatgtgtagtaaattaaatataaatatttgtatgaatattaatccatgtgtatatcattatcactctatttctataaattacatgtttgggtaattataaactcaacctaattataaatatttgggtactgtactgtccaaaatttatagtttgtttaaaagccgaacagtccaaatgataaagaaactaaataatggcaaaatactttaaggagtgattgcctgattcgttgggtagctcaatttttaaaacttctattatttaccaatccggattaaatatataaagtaggtctcattcataactacatgttttttttcatgttttacttgtttccctaaaacaattacaggctgtaatttctttttatcatatcaaaagaatgagaccctattaactgtaatctacagatcaaatcttataataaattttttgatctaatcacgtatttgttttttccctattaattcatggatatttttcttaatcatgtacgagtttttttcttgcactacttttataaaccagttcctgcccttcgccacataaatcctccactttctccagttgtctctacttttacataccaccaaaaaaatacgtataatatatagactttgttcccatggctttcatttttgtctttagcttcatttcccaaaacaacacttggctgttttcattatttcgtgaatatatgttgatcatattaattaactcccactctccgccgcataacctctgcattttctccacctatattaaaatattagatatccaactttatttttgtatataatatattacgccaatgatcgggttaaacaggtcgaattattcggtttacaaaaaaattagtcgatttaaatcgaaattaatttcggttcgagtcggtcaattttagtttaaacgtgttggttatcagatttttatcaaattccgaaaaaaaacaaacaaaaaaacgaattagacatgttgaaagaagaaaacacataaacaaaatgtgtttttttagtagtttacaaataccaactattatagaagctgctaagctattgttcatcaagttacatcaattacttatcatagaaccatacaaaagctcatgtaatctcttatgagaacctatctttcttttaatcaaaaatattttctaagaagatcatcttgttggtgtgtatattcagcaaaacccttaatctattttcttgcgtatatccaaaggatctaagtttcggtatcttgaagcccttccgcaagcttctgtgatatgcatcgattcattcaaatctatccaacatcacggcttcacagccacctctatcatttgctcaacttaaaagtgtcgagtccttgggatgatctcatcagaagccaacccgattcaaatcctatctggcgacgaggggaacgatgttcttcagcccaaatcaaagcggaagaagagaaaatggaagaacaaagtttaaatgtgtttcaacagacaaaataacgtcgttttgtctctacaataaacgatgtcgttttgttctaatagagcaaataaatgagacattaatgccgtaaaaattatgttaacctatttaacgacatgactcaaatagcaagtcaacaataactttgtcatttatttcgagagtcaacaaaaactttaagatttatttgtcttccgtgaaattcaagattaaatcgtcccaaatttaaaaatttgtgattttttggatattttccccaaaaatatataggattaaagtatgatctttacaaaaataaaaatgttagacaagaaaatttacctgaacatagatttcatttttctcctctatggtaaggggattcattgttgaattctctccatcagaaagctgcatttgagccatgcgttcttataaaagttcatcatacttttcagcaattactcttgctttttcatcaacatatgttccatcaacttttttgatgtgttttttcgtcactgcaatgaaagaagaatcttcattgtttgcttcctacatataaaatattaaacaaaaataaacatacctttaaaattatgaaaacaaaacacaacagtatgaaaagtaaagatatatgagcattaccaaagtatcttgaactttgggataagaacgtgatccagatctgtgactgtgtggatttaaaccatcacgattaaacagtccagaagaacgcgctttttcgcttttttctttaatttttggaatcctccaataagctaccataactctccaatgtgcagctagaatccattcaggttgtttacctctcgactttgcaaggctaaccattcctttgagccgagcagcagcaagtacttcaaagtttgttttcactagatgctcaattgaagcatcccactcaaaccatgtctataatacaaagtatgcaatttgtacaaatataacaatcgtttctgaaaatattacagagaactgcaattaaaccaaaccaagcttctttgtaataaattggcactttttccaactataccgtggtcctttaaaacaccctttaatgatctgtcgaacacgtgttaatacttcggtgttgtttttgaacctgttacatgtgtattttcattatttacaattctgtttcatgaaataaagtagtttgagactaagagtatcattaccatttagctccattccttcaagatgggtggagaattcgaacatgattttgtataggtggaatttcttccatctgatcacttgattcatcttttggttcttggggattcccaagattaggagaaggaggtatttcaaaaacagtaggcagagaatttgatactcttccatacgaacgtccgcctatcacgagtggtggacgcacctctagttggcaaaacaaaatttataaaataaaataactcacaaaattcgtaattgatgatatatattctcagcttattgagataaaatagaaacctgtaaaatcaattaatttggatttttagcagtatgatactaatttttttacacaaacgaaatcaaactaagaatttaacaaattacaattttttgaacaggccacaaagtgatcatgaagttttgtttaaacatagttataaaactcaaaagattaacaatagaatttaaaccttgaaatcagttgatgtggaagagacaaaggagagagactatagattccacgtcgagatgaacaacagcggaatcaggaagaaagaaaccggtgtgagagtaatggatcgacctttacgtaagacagtcttagggtaaaacgtaagaggaggaggaggtttgtgtgacacaattatatattaagagatattttagggtattggtgacggtacagtgattttatttagtcacaaccaaaaaatttaatagtttttacattgtatttcaccgcctaaatgtttttctttgtttctctctcctaaaacaaatttcctataattgtgacttgaaatcatcaaaatatattctcacctgtccgtatacgtatcttccgtctccatatacatatttcatttgattttttattagatacaaatgcttagtgatttatggaacaacacaattttgggaataatatttggatatgtttaccatatcttaatttacaaaaaataattaatttattaataattgcacgtattaacaaattaaagtgtaattgcttgttaaataccttaaattaaaatctagattttaagataaatttacaaatattttaaatatattttaatccaggaataattaaaaaggtttgagtcaatttatatttagtgcaaatattagctttttcatcattagtttgttaacttttcatcttatatattcattatcttgctacaattcaattctttcatacatgaaaaatcacaaacaaaacaaaatgcgacaaatagaaagcaaattacaagacgatcaacccattagcaagacaaatcctcacaaatttgatgtaaacataaccctattatagcgaagaagtggttcattttaacaagtattggaactaaaacatattagagcagaaaatttccaatctactgagaagacaatctctagtaccacacgtaattttgatcagaaaaatccgtatttcgaaaaagaagaatctcatcttaacaaaggatggaatgaagttaaactggaaatgctgaagcttttgctgcctcctcgaaatttgaaggatcgatttggctattggttaagaggaaatatttatcttatactctatttattaagataaaaatagtatgtcgtttacataactttcttcattttttactgctttcaaaatctctgctatgtagcctcaatgtcaaaattgttgttgaagtattatttgttaaaatatatgattgggtttgtttttaatatttgctttgattatcgctttgttaattaaaaaacttgtgaagatatgtaattatgattttgacacaagttgttaatcaaacacatgctctgttacgtaattataaaagaatgcagagagaagcattcttcttctctctttgtatagagattataaaagagaatgtgatttttaatggccgtcaaaatatctggtggtctccgccgcatctctttcaagcgtgaggcttgttaaaagtagcataaagtatgaacctcttagtaaagaaaaaaaatccttagaataaaaaaatccttaaaactgtagatgtatcaagaagtctttaaacaaaagaattaaaaatctctaaccaaacgttaaataaaaacaaacctttaaaatttttaatagaaaattagtcagatttttcatctgttgattcgatatttgagccataatctttttcgtctgatccgacttcttcttcgtcttcattatcatcaagatcttctacttgatcacgaagatcagtgagtgtctttacttgtaacgaatcgacgatgacatttggaccagcttttcatgttgcattgctatgaaatctaaattttgattaagcaatatttttcctcttggttgtatcacaactgttgcgttccattgttgatcatttttctttgttttccgtggatacggtacatagcatacatgatctgcctgagagactaaaatgaaagggtcatatttcccataagactttgcaacgttaacatcgattatcccagaacgatttattcgtacaccttctccaatggttgtatcataccgatcacatttgaacactacaatgtgtagatgaaccggtccatgataatgaatttccagaatctctctcaatactccgtaaaaatcatgttctccacttgatttagaagataatgtgtttttcacacacaaaccaaatttagcattctttttgtctttctcatggtcatatatgtgaaatatgtaaccacgaaaaagtacataggccaagaagtaactttggtcattgaaccataggagagagtctgcaaccattttggatatgaattctcacttaaagtattctccaccacatatttatcaacgcataaaataacctctattacaataagaaaattcaaatattaaaatccgctaaattaaaagtaagtttttacatttttttccaaccagtttgcaaaattttcttctttaagggaggttagatcatctccggttattccaagcaacagccatgctatcatcaaaaagccaatatatacaaaaaaaaagtttcactataataagtagcaaaagtagaaatttctttattgatgtattgttccacaatcgagccttctacttttgccttattcttcacttttttctttaaatggtccatgtatcgttcaaaaggatacatccatctaaattgtacaggttccccaagtcgaggttcgtgtggcaaatgtataagcaaatgttccatgacatcaaaagaggatggtggaaatatcttctccaaattacaaagaacaatagaaatattgtgttctaacgttgcaacactatcttttaacacaaatatcctagaaaaataagctcacacctacaaaaataaaatattatatagttaatacatatataaatttttaattatgacacatgtataattaaataaatctagtacacaaaaacaaaaacttaacaaaaaaagtcaagatgaatgcaatgcaatgagacaattttcttcttatgctctgtttttatgttttcttttgttttatgttttatgttctgcaactcttcttttcaattaatgtaatgggatgattaaaaaaaaaaaaaaagtctgaacctttgtttacttaaaatctatgatgttagtttcgtttgtttgttacaacaaaacaaattatattttcacgtacgttactaactaagaataagaatgttttatacgtgattgacatacactacaagaaaacaggtaaacgacgactacaatcagcgacaataaacgtagtcgtaacattatacgactagttggcgacggatttacgactcgcctgcgacaacacgaaaaattgtagtcacatagtcgttgttttacgactaccgtatgcagtcggcaaagtgtcggcaagtgacgactatttgacgattatattattgaagggatatagttgtcgttgcttagtcgctaattaacgactattctaccgtctattttatttagtcgctaatatggcgactacaggccgactaagtcgtctagtcgtcctgtagtcgtagaaacgtcgcaccgtagtcgtataaagtagatggaaaacatgtttcgcattggtaagtaggtacacctaattatttagttgtagtcgtaaattagtcacaaaaattggcctatataataaacgttcacgcaactcttctttcaccaacaaatcaaaacaacaacaacatcaaagagaaaaaaaaaatactagttattttattgtataatggcgggaaactacaattatggcggtactggcggtttctatcgagattggatgtacaagagatttgatgaagtgacggggaatttgtcagccgaatacgttgcaggagttgagcaattcatgacattcgctaatagtcagccaatagtacagagtagtcgaggtaaatttcattgtccttgtagtgtatgcaagaatgaaaaacacatcatctcgggtaaaagagttagtagtcatttgtttagtcatggatttatgcctgattattatgtttggtataagcatggagaagaaatgaatatggatataggaacgagttacacgaataggacgtattttagtgagaatcatgaagaagtgggtaatattgtagaagatccatatgtggatatggtgaacgatgcatttaattttaacgtggggtatgatgataactatcgtcatgatgatagttatcagaatgtggaagaaccggtccgtaaccattcaaataagttctacgacttgttagaagatgcaaataatcctttgtacgatggttgtcgtgaagggcagtcgtaattatccttagcatctcgactcatgcacaacaaggcggagtataatatgagtgaaaagttggtggactccgtttgcgaaatgtttacagattttttaccagaaggaaaccaggcaaccacttcacattaccaaaccgagaagttaatgcgcaatttaggacttccatatcatacgattgatgtttgtcagaacaattgtatgctatcttggaaagaagacgaaaaagaagatcaatgtcgattttgtggcgcgaaaagatggaagcctaaggacgaccgtcgaagaaccaaagtaccatatagtcgtatgtggtatctacctattggggaccggttgaagagaatgtatcagagccataagacagctgcggcaatgcgatggcatgctgagcaccaatcaaaggagggagaaatgaatcatctttcagatgcagcagagtggagatatttccaagggttacatcccgagtttgccgaagaacctcgtaacgtttatctcgggttgtgtactgatgggttcaatccatttggcatgtctcgtaatcattcgttgtggcctgtgatcctaactccttataatttaccccctggtatgtgcatgaataccgagtacttatttcttaccattctgaattctggtccaaatcatcctcgagctagtcttgatgtcttcctccaacctcttattgaggagttaaaagagttctggtctactggagtcgatgcgtacgatgtttcattgagtcagaattttaatctaaaagcagtactactgtggacgattagcgactttccggcgtataacatgttattaggatggactactcatggtaaattgtcttgtcctgtttgcatggaaagtacaaagtctttttatctacccaatggacggaagacatgctggtttgattgtcaccgtagatttcttcctcatggtcatccatcccgtaggaacagaaaagactttctgaaaggaagagatgcttctagcgaatatccacctgagtctttgacaggggagcaagtttattacgagaggttggctagtgtaaatccaccaaaaacgaaggatgttggtgggaacggtcatgaaaagaagatgcgaggctatgggaaggaacataattggcacaaggaaagcatcttgtgggagttgtcttactggaaagacctcaatcttcgacataatattgatgtgatgcatacagagaagaattttcttgacaacatcatgaacactctcatgagagttaagggtaaatcaaaagataatatcatgtcaagattggatattgagaaattttgttcacgcccaggcttacatattgatagtagtggcaaagctccatttccagcgtatacattgacagaagaagccaaacagagtttattacaatgtgtgaaatatgatattagatttccagatggttattcttcagatttggctagttgtgtagatctggataatggaaagttttcaggcatgaaaagtcatgattgtcatgtatttatggagcgactacttccatttatctttgctgaactgcttgaccggaatgtccaccttgcactatcaggtacaatatatactaactatattttattccaacatttttttaatctaatcatttaacttgcacatatattttaggaattggagcatttttccgagatctatgttcgagaactttacagacaagtcgcgttcaaattctcaaacagaacatagttttaatcatctgtaacttcgaaaagatctttccaccatcattttttgatgttatggaacacttacctatccatctcccatacgaagctgaattgggtggcccagtccaatataggtggatgtacccattcgagaggtttttcaaaaagttgaaaggaaaagcaaagaacaaaagatatgctgcaggttcaattgttgagtcatatatcaatgacgagattgcttatttttcagagcactactttgccgatcatattcaaacaaaatcaaggtaaatatatttaattatttaacgattagatattcttcgatattaattcacttacatggatcaggttaacaagattcaatgaaggtgaagttcctgtatatcatgtctctggagtacctaatatatttatgcacgtcggccgtccaagtggtgaaatgcatgtagattggcttttagagaaagactaccaaagcgcacatgcatatgttttaagaaattgtgactattttaaaccgtttgagaggtatttttaatcactcgttgtttgtaaattttcactaagatcactttgataaatttttcctcgtttgtaaatgtagtatgttcgaagattatctttctgccaaatatccatgcttgcccgaaaaagaactctacgcgagaagagcggaagaatatcatctatgggttaaagaatatgtaagtctacatcaattttggttcattcgaaaggtgatcatttaatatatactaattgatattgtttatctattatgtaggtaacatactggaacactacttctccatttcctacttgggttcaagagattgtgcaaggacctttgaacaaggttaaaacttggccaatgtatttcacaagaggatatttgtttcatacgcaaaatcacggcgctggacgaaagacatgtaactatgggatctgtgttaaaggtgaaaattacgctgattcatcagatgaagcggatttctacggtaccttaacagatattatagaactcgagtatgagggtatcgtcaatttgaggatcacactttttaagtgtaagtggtatgacccaaagatcgggagaggcactcgacgaagccatagtggcgttgtagacattctatctacgaggaaatacaataaatacgagccatttattcttggtacgtaattattcttaagtccaaaatacgtttcttttttaattattaataatctatctttgatatatgtatacaggatctcaagcagatcaagtttgttatattccgtatccatatacgaagaaaccaaagaacatttggctcaatgttctaaaagtcaatccgaggggaaacatttctggagaatatgaaaacaatgatccaactcttttgcaaacagaaaatgatgatgatgttttgctcactacaattgaagatcttgttcttgaaactccggtagccaacttaaacccaataatccttgattacgatgtcggggatgctgaaccagaagacgaattccgatgtaatttatcgtccttggacgaagatgaagtagaagatgaagatgtataactgtgttaatatatgtataattatttgaataaatattagaatgaattttgtttcataaaatcattgaacttttttatgatatacaaatatttcttcacatctataattatatcaatttaaaagtgattattatgcgactaatgagcaactaagataagttttattgggcttctaaacgttgaaatccaaacccattaaaatcggcgacaaaacgacgactattatgcgacaactgtttgatatgttaggctttaaaatttcggggcccaaacccattagtataggcgtctatattgcgactaaataccgacaagttttgatttgttgggctttgaaattttgaaacccaaacccagtataattggcgacaaaattacgactactcaacgatacttgtttgattagttgggcttcaaaatttcgaggcccaaacccaaattagtatgcgacaattatgcgactattatgcgacctctattgtgttgaaaaccctaaatcgagtcatttctcttcgagccaaacacttagccagttcttcttcttcttcttcgtcttcttcgtctcgcaaaaccctaatccccaattctctttcttcttcgatcttcttcttcttctttctaagatcgatcgatcttcttcgatctctcaccttaaacctattcgatccaacctcctcttcttcttcttctttgtctcgaaaaccctaatccccaaaactctttctaagatcgatcctttctccttatagatcgatcttcttcttcttcctataagatcgatcgatcttcttcgatctctaaccttcaacctctccgatctgcttcgtcttcttcttcttcttctcttcaatctcttcatttggctcactatcatgcctatcggcggtcgaggtggctcaaggaagcgtaagacgacgccgaacgtcactcagagagccggcgccggcggatcaagacctgcaaatcttcctccccaatacaacttcactccggcgctggcggttcaagttcctgcgacggagccggctcaacaacatggaccttcaacgtctgcaccccacgtccgcaactatccaccgtctctgcaactcttccagaactcaacgactcaaccacaacatcaagctcctccgcctctatctgaagaggtccactacactccgccgccaacagcgccaccttagcaaactcctcctcagtcgcgagattcagacgctccagcaaacagccacccgtcgtctcaagggaacaacttccaagaggaagttcctgggacgttgccggagctacaagaagactcggcgatggctctgcaatcgacactctctgtgccaaacagggagcagtggtgttgtgtcttgtctccaattctcaaacctaaaaccgagtggtatgttttcttcctctattttattctagtgttcttagcctgtgtagtgtaactcgtgttatggtctgtagaatggcttgttagggtttgtgtaacatagtagaatctgcctttgttggagttggatgtttgttagggtttatgtaacatagtagaatctgcctttgttctaaactcgtgtgtgatcttgttaagttcttcactttgtctataatcttgttaggttatttattgtgttctgtggtgaatcatgaacataattgtggaacatttgttgattgttgaacttagcatgttttcggctttgacattgaggatctgtctttgttctatacttgtctataatcttgttaagttctttattgtgttctgttgtgaatcatgaacttaattgtggaacatttgttgattgttgaacttagcatgttttcggcagactaccaatgaggatctgtctttgttctatacttgtttatacttgttctttactgtctatgatcttgttatgttgattattgtgttctgtgtgtgatcttgtcggcttatacttgtctagaatcttgtagaatctgcctttgttcaattatatagtctgttgtagttgtagtgttttggattttaaacatgtttactttctgtctgtgttgcatgtgtttggaggtttactcgcgacagaggatctaaattggttagaaagatcacacggatttttactcaaaagttcaatgctccctactataattggtcctgtgtgccattggataaaagagaaagattgtttttagagtttgcggtaagcttcttgtatttcttcaactttcattagactgtactatttaatctgtcatttgttcactaacttcacactttttttgtagaaaactcaccactgggatcccttaataacagggacagtccaatactacttcaatgagatcgttaagaggcgcttgaaggacatggttagcaccgcaaggagaactcgagagcagcctccatggattggagaaactctgtggggaaccatgtgcgactactgggacactgaagaggcacagaaaaggagtaagacatattccaaagctcgtctctctgaccgtaacggtctcggtcctcacgtccactactctgggccaaagtctttccaagaaatccaagatgaattggtaagtgtttctgcaatcttcccatgtgttttagtgatgttcgtttaactgtgtgtgatgtttagtctgttgatagtaatgaagcttgtgatctgtgtttgcaggaagaaaaaatgggaagacctgtccctcttggtgaggtgttcatccagacacacactaagtcgaatgggacttatgttgatcagaaggcagagaagattgctctggcgtatgagcagaatgtgagagagaagctgtctgaactagaggcagctgcttctgctgtgtctgatggctcttcacgtcctcgggatctcacactagatgagtatgcagccatatttctcgaggtaagatgttctttgtctttttcagagtcttagagacatttaggatctgtcactaattatcttcctctttatttcttgtagtccacagaaaaggatgcaagaggcaatccttatggacttggctgtcttaaagaaactctaggcagtgccaaccgccaactccccggagactcaacctttaaagccttagaagaacggctgcaggaagctcagcggcaaattgaagaacaggctgcatataacgagaagcgagatgctgagattgctgcccgagaagccgagacagcccgagtcacagctgagcaaaaggacaagctcgagcacttgtccttagttgagaagtatctccgccaaaccgatccgcagttcttggacttcattgccacacactcttccacatccacagagcgtatcccaattactcccccatctaatgatccatagaatttaggtttccaaacactaattgtatctttcaataagttgtatgtttgaacaagataattttatgttttgaacttgattttcaatatataagcaatgttttcatattgtatagcatatcaataacaaacaagaacaatcgatgaacaaacaagaacaaacaagaaacccatcacctaatgaccaaatctttattcggaccaaactattagtcgcaaaaaagtagtaaataagtagcactatagtcgctgaatcgtcatcaagtagtcacataactttacgacaatcataagactaaacaaattagtcataaaagaatcgtaaaactgacgtccaatagtcgtatatacttatacgactatgttatgacaaaaagtttcaaatccttggcaaagtacttttaatcgtcaaagagtcgtcgaatagtcgtaaacatatttacgactactttacgacaactggaaacatacccagggtttataataattaatcgcaacatagtcgtaaagtcgtcgtacacaattaacgactacgaaacgactacatgttctcacacgctctgtacagtacaaataatcgtaggatagtcgtcaataagtcgccgacataatacgactacgtaacgacgatttttcactgtttagtcagttgtcgtattatggtcgttgaccaacgactaataaacgactactgtttttagcgactatggattaatgactacagttattagtcgcaaattagtcgtattagctttagttacgactactaaacgactgacttgtaggtcgtcaatcacctgttttcttgtagtgatagtcctatagctaaaaagaaaggaaaaatagaatttttgttcctacggaggatttggaatcatgtggtatgagtggataatattactgtatttattctaatatatggttttaaaaaattctaaaacatctaacatagattttagtattcatctttctttcacacatattgatttaaaaagtataactcaaccaaaatataacctttagtaggaaataatataaattcgatcaactaaaaattatagacttaccagataatgtttcgtgtacagatttatccataagctcagtagatgtaattggaagtaatcgtcgcattaacacagggcagtcatgaattttcattcctgataattttcctttaagtagatcaatacatttggatagactagataaatacacatcagaaaatttaacatatttttcgagtcactgtagaaaaattgtttttgcatcaacttgtaatctgaaaattgaaactggtgcctttccatcatctgttaaatgtagttgtgaacagttgcaaagctctttcacaatcaagtcgttgtctgatgttatctttactattctcttgcacattaagcagtgtattgatgaaattatccaaaaagtatttttttagtgggcatcaagattgtgtcggaaattattatttttccaataaggtagctcccaaaaaatgttttgcttgtgcgagttatgagtgtaaccatatccttgtagtttcccatggtttactccacaatcaattgtgtttggcaaactctttactatattccacaactcttcacatgttagcagttgaagtggaatatcgctcacaactcttcctttttaaaagttttccttgtcttgtcgatagctgtgattcattggcaaaaagcaccgatgacaatcaaaccaacttattttcctaccattcttcaattgaaatgcatatgtctcatcccaacaataaggacatgccaaccgaccatatgttgtccaccccgaaagctttctgtaagctagaaaatcacttattgtccacataagcacatctcataagaaacagttttgccttgtataaatatcatatgcattacgctgttaacccacaaatctttcaactcttctatcaatggttgaataaaaatatccagacttctcttcggatgatttggaccaggaaagagaactgataaaaacataaattattgtttcatccacatgtcaggtggtagattatatggagtcaagattacaagccacaaagaataattatgtccagacatgccaaatggatttaaaccatccgtgcataatccaaggtaaacatttcttggctcagatgcaaaattagggtatacctttagaaaatgtttacatgcttctccattagatggatgacacgtttctccgttattcactgagtgctctacatgctatctcatatcttttgtcgtgttattcgattgatataatctcttcaatctatctgatatcggtaaataaaacatatgacgttatgcaactcccaggcttgtgagtttgacgaaatctttgtttattacagaattgacaattctcttctagtgcagtatatttccaaaatatcatgcaattatcttcataaacgtcaatttgtggtaaggtaagcccaaagaccgcataaacttctttatatcataaaacgaattaattgaattgttaccttctagcaaatagtcttgtagtaattgagttgttaacccattgtaattacatggacaaatataatatctttgtaatttttacaaatatattgtcgtagtctgatggctactcatagataggttattcctcttaattcgagttcgatacataaaaataagtaaggtggatatcgaactcgaattaagaggaataacctatctatgagtaggcatcagactacaacaatatattcgtaaaaattacaaagagattatatttgtccatgtaaaattaccataggttaatttttaaccgcagtcagcgattctgttagtaaagttaacgatcgttaactcggaggtacgattttaccaatatataaaaaaggaggtttttaaagaacacggaaattaaatgatgtacttttcttccaactttaataatacgcgtattaaatgacaaaaaaaaatggaggttttttcggggttttccccaattaatatatgcatgcttatatattaaatgtatattatagactaaaaattatatgtatatatacatgcttatatataacgcttccaacacatatccgctttctatatgttttacaaaacccgcttccgcgattccaaacgcttccgcttccgcgtacccgcttatgattccatgcagcttaggttttgttgcaaaaagaagggtggtaaaaatctcattttgatgctttgtaagaaaatttgatgggtgaaatcttaacaacttttacaatttcaaaaatgtagcttatgaacgataaccatgtgtttaagtgggtagatgaagcttttacaaatgagattgaacagttggaatttgaaatcggcgttcttgaagtagaatttagagtgatagatggaaaggaaccaagagaggatggtaagcgatctgatggaaagggaaaaaaaaggaaggaaattaagatggtaattgtttttagttgtggctgtttaatcaccatggcaattagaatgttgtgtttgtagtagaaaaaacctaactgatgtaattaatatttaattatgaatagtaagtgttgaatttgatgtgatgaatctaattatgaagactaagtgttgtatttgtagtagacaaaacctatttatttggattcatattcttgtcttatcaattacgaagacatatagttgtaactacaaaacaaaaaaacatctccaatggttgtttctattttttttctttaaaatagagaaactctataatagagatgagttttcctccaatggttgtctctattttttcctcgataaaaaaatattctaaaatagattcttttctgttttagtattaatacctttaatttacaaagttgcaaattaacccatttacttgaactcttataaaactttcataaaaaaattataattgttttaattaaactttattaaggaaaaacaacattacatcgtttaaaaataagaaaatattatagatttttgtaaccatcggtattagtatattttccccacaaatgatcaattagtgcatttcgaagtgaaaaatgagcttctttatctctgatttttctaaatcgaccaagcaactcttggaactagatatcatcatcttctgctatttggactgttggaggtggaacagtcccttaaacttcaatcggtgcatcgagatcacgctcatcctcgattatcatattatgtaaaattatacatgtgatcattatgtcatgtaacacacttttcccaaaaatgtactagtcctttcaaaatagcaaaacgcgattgtagaactctgaatgcacgttcaacatcttttctgcatgattcttgttgtgttgcaaaatatttgttctttggacctcttgactcatgaatagtttgtactatggtggaccatttaggatatgtaccatcagccaagtaataacccatattatattcttttccttgaatgatataatgaagaggaggagtaataccttaagcgagtctggagaaaagatgggaaaactcgagcacattgatatcattattagttcctggcaatccaaaatatgcatgtcatatccaaagatcataatctgctaacgcttcaagtattatagtaggtgatccactacggcctgcatattgtcccgcccaagcagttgggcaatttttccacttccaatgcatataatccaggctaccaagcattccgggaaaacctcgtttttcaccaatgtaaagctagaaacatcattaggtgttggtgatcgtaggtactcttctgaaaatatatccactacggctcgacaaaatcttttcatgttttcgattgtcgttgattcgcctatcttcatgtactcgtccatggcatctgcaggaagatcatatgctagcatccaaaacactggcgttattttttgaagagatgataatccaagtctacccattgaatctcttcgttgtgtgaagtaggcgtcatgattttcaacttcatgaacaatacaaagaaataggggacgagagacaaacgatatcttctgcgaaatatagcttcattgtactttggagtctctgaaaagtaatcattaaacaatttgtcatgagcactttctcgatcgcggtagatgaaagaatgtccgggaactgaaccaccatgagtggcctggttttcttgttgattgagaaggaattgaataaccgaattgttattagtaatagcaagttgtattgcttcttcttcatgatcgcaattattgatcataatttcatcatccgaagaagaaaatgatgaaagatgaaaatttggtaaattattactcattttgacagatatacttataaggataagtactttatttgttgtcactaaaacctaaaagctttagtcgtatatataaaataaatttgattacattttttaattcaaaaacattttttctatttgagttataccgtatgtccggtcaaacacaacattcacaattacctattatggtcaaacaaaacattctcaaacaaagtatttttcaatgttgcatcatctctaaacattcttctgtttgtctagtcaaacaaaacattgacaaatcccaaatcaagactttgaccattataaatagcgtacacatgcattgaaaaaattagacatgcattatttaattagttgactatctaatgtacacatgcattggttacgtagatttgcatgtgatgtagagacatgcattggttaattagttgagtatgactggacaaaataatgcatggtcatagatatatgtagacaaacattaaagtaagttcgtaccattacatctataaatatgaccatagttaaactctttgcattcacaactctatagttaagttctttgtatttacaactcaaatgtctcgttatttcggatattctgttgaagaagataaattactatgtgaaatttttatgcaaatttctcaagatccaattataggtgtatatcaatcatccgagaagttttgggatcgtgtggtcgaagctttcgagaaagagagaaatgcaacttggagtgaacgttccaaaaactccatccaatctcggttgcgaacaattcagaaggagaccaaaaattacatagacacgtaagacaatgtgaaaacagacatcaaagtggtgcttcaaatgaggatactgtaagtattaatataaaattcataaatctatttttttttaattaattaatgctatgaatgatttttttttttttaaattttgttttggtttacttgattttaatgtttgaatatttacatttataactaaatctaaaaatgaggtttttgtatttcatggtacatagtttaatcaagccaaaataatgttcagagatgatccaagtatcgatggaggttggaaatttgaccatgtttgggatattgttaagaactttgaaaagtttaaagatggtgttccccgtccttaaggtatatctatcccagttcgttttgagcatacaactttagaatcagaaaatcatacctttcattctcctacccaagcatctccacatttatctgcttcttcactaaatttaaatgatgatgatgagactattgttggatctccctctccacgaccactaggggtaaaaaaatcaaaaatgaaaagaaaaattaatgatcaaacaacatcgattatcaataccttggaaggaggaaacaagaattttatggagcaattgaagaggagcaaagacaacaacagttggatattcaaagtaaaaattatgctttaaaagagctgaaagaagaaaacaaaaatttattttgtgatttaaataccattgatccaaatgtccgtaaatattttcgggccaagcaagcacgtattttacaaaaacggagtgatcaacaacaaaaccaacaagctcctcctccatctacttcatttggtttgtttggacaatatttcaacgatattggtggatccagagataatttaccagagtatttattaatttagtctttgttgtattaaaaataattattgtggaataatttatttttctttatttataagattttatataatttctcttttttaaaatagtaatctcaaattgtaaaatagatatttaaaccaaatcctctaaaatcaattcaaactattagttttattcattttaatcagaaataaagaaaaataaaaattaagggaccactctgcaaataaaaaagtttgtctctatttataaaggaaaaaatacagcacctctatatatagagaaaaaatagagatctctttaatagagatgagaatagagatgggttggagtgaaatagagacaaaaatagagtttagagacaaaaatagggatgggttggagatgccctaaggacataaacaaaaataaaacaataaacatgcaacaataaacatgttcaacagttgtaccaagttttcaactaccaacacatttatacctaaaaaaaacaaaacactaattcatgacacataaaacaaacaattaaaagtgcttaaacattctttgtctttgtctttgcatttctcgagagtataggactccgatacaccggcttcgcattcgtcctcgactttgtcatcttctttaccaccttcagctttttaacgcccccttcactaggatcatctccatcatcatgagactttcttctcttattacttggatcatctccatcatcatgagacatttctctcttcttactaggctcagcagccttacctccatccatcttatcatcttgaagcacccttttgtccttctccatctccctattactaccacccacatcactcttattttgaaccatctctttgtccttctccatctccttattcccaccacccacatcaatctaattttcagcaatctctttgtctttctctatctccctattaccaccacccacatcaatctcattttcagccacctctttgtccatctccatctccttattaccaccacccacatcactctcatcttcagccagctctttgtccatctccatctcgttgttaccaccacccacatcactctcatcttcagaaccatctttttctatcttagtctctttttctccaacctcactccccttctcaccaccatttgcatcactcccttcctccgcctcgttttctccatctttcgtccccatctctttttctctaacatcattctcctttgaactataaatatcattagttctagtattagattggattgatttgattgccgcttccatcagtttgaaacttttatcttgttcttcatacgtcttactgcaatctttcatcttcttacttatatccttaaatccattctccatcaaagtcttcaatccgcttacaacctcagtcaaaccatcattacttgcaatagtcggagtctgagccacttttaccttgctttttttccacaccggcttttctgagagccttgaccacagtagtcggagctatattagccacaaatgtcttgttgactacatcttcattgaacaacggttcaaaatatagtcttctgctcatcaactagacgcttcttccagccatcaactattacatcatcaacatcattcactccacactccacatccatagttctttccaaaagtagtttctcatcagcagttggagtcaagatactctgaatgttttgtgcatgataagaaaatccaattaatacaacatccatggtatttgataggtaattaataaacatgttatcactaaccttcgttttaccaagtttgtcatacacatctgacattgaaaaccctttcatagtacttaatttaaacatcattttacacatccagggacactgaggatctacggattcaatatcttcgcagaaattgttcctgagaattggaatcgactcaaatgctaaatactaccaaaaaataaaaaacaggatcattcaaacaaagttgtataactgctaataaaaaccaagttgtacacagtttcactttcttacaaaattaagagatgaataatgaaatcacatacctccaaggcagaacaatactaggaaacaccttttgtgaactaacttttccattgcatttggccatcaaatagaaaatatttttcagattttcagcaaatgcatattttccccacggaaatgttttgcacaactgtagatcggccacggccctaaggaaaaacttctccaccttggtgccctttctcatgtcttacactttccaatgattacactacttaagaaatagagcacaactattctcaggcaagcctcagttggttttttcattaacagtaactttgcctccactattggatattgaattgttgctccaagtccaaaatgcttgccaacaagtggtaatgcccaaggtgtccaagggtttcgtataattatgatagtataatcctgacatgaatgcaaattcttagaatcggaatgccattaacgataaaccatacttccttcttcttctctaaacatgttgtgcaaagaaataacagccacatacccatcaccttatgatttgggtccttatgcatgtgaaagaagtgtttgaactgtgtgatccaaaaaccacttcaattaggagtctttaagatgagtctccaataatcccactgccttatgaagataacactttgttgtaatcttgtatgactttgtatactcactcggactgaagtacatttgtaacgcccgtctccctcaaccttgagacggcaccctttttctttatgattaaattttattgataaccatcttaaatataatatcaaaatatttgaaaacatcttaggtaaaacttaattgaaaacaagttgataataataaaataccgttgaaatttaataaaaccaagtttcctgaaatacaccgtacaaaagacagctactcaacattctcatcctcacctggggaaaaggagaaaagggggatgagtaattaattactcagtgaggcggtcaaaactgcccattgaagcacaatatcacatttatactttcacacaacttccattcataagcatagaatcaaacaacaagcatatagcttacgttttcgtagcaagctataacagtcaagcagttttaacaaaagaggtgattcttgctcaacaagcaatcgacgtggcagatagggtatacctttccttgtgacgacgaagggtcctgtggcttcccgaacactttctctatcggtatccaccgtcgaattgttcttaaataattagagttaaccagaatacgttccccaaaatgccaacttgaatctgaaatctgatacttagttatttctgggttcagaaactatgatccttgtccaactttcaactagaatttcgggtggagtttacctcgtaacgaagattcgtttgtttctgtgtattcctcagtgtgagatctatccaacaataccaaattcgtatctgttccttcagattggacgggaaaatgttcaccaatagctctacctaaactaatatctttcttcctcttcttcactaaaaatccaaaaagattgaatggtaaaccattaatcctcaagaaactacactgataaagaaaaactgtatctcactcaaattcaatcgaacaagttacagcaattgaatcgtcgttcataaaacgagaatccaaatctcatgtgataaagcttagaagtagaaacagctctatcaacaatgaaatatcaaaccttaagagtttacacagagaattgaagaagaaaaagaagaagattacacaaattgatattttttggttaattttctatatagctccaactctctatctccacgtcagctgccaacgcatcattttttacgtcttcaccaatcatcttcctctattcttccacgtcagctactctttcattttcctgtatcaaatctccctcgttcgagaaaccttgacctcaaggttttgtaaagaagtcaaaccaatgtgcaagtaaaatgccattctacactccatttgaaggttagagagcatctggcttctcatagttgtaaacagcccctactcataagaattattagtcatgaagagaaacaaagaggactcctatgtcgcttttctccatagttcccgagtccagttgattaaaaccattgaagcaactctacttggaatatgagtttttagatcgcttgtgattccagggtcaaaggtttggctctgtgtgacttcaagccttcgttttactttggcaaatccaatggtaacatctcgaaccacacattgatacctcacgaccaccaactcacaccagaacttggtggatatcaatttgcagtcttgtgagctggttttaaatttgaacttcgaggatttggtagacttaccaggcttcttctggacatggacagtagcacttccacaactagagtgtaattcatcaacaacaaatccaattgatgacagcatttgattcattcttgcatcgactttatcaaagtccttaaggtttgaactaaccttctgaggttgtgagacaccttctatgtctgtggagtgaaacgcgacttgatcttgaatcaacggattatgttccatccatgaatctgtttcacactcttctatgttggattcaagcacttccccagcaaccgagatttgattatcatcactagactctgcaccattaacttttagcaagtcttttttaatctcattctctaccaaattgctccaagaagtctctgcagctttttctgaaacatgtaaaggttgaactctatattgataatcatcaatcccttctcggctaatcattctcatcttattaagctttaatgccttcacgtctctgacggaaccttgcctaataccttgaagaagaacctttttatgtcctatatggaactgcatctctaacttcttaaaatcacaagttactagccccaaacatcctaacattcacttgagtatcagttctcaaaccttccaagtaaaaactaaccaagtaatcttcaccgaagttcactctagtgctaatcaactcaaatcgagcatgatactcctctattccttcagtctcctgcaattgtgtcaattttgcaattgaatcatcaacatgctcattatatctcacttgcaacaatagtttgtaactccaccaatcatgcctaacatgctcccacataactgaatgtgaaattgattggtgccaagcattagcgagcccatcaaaatggatagatactaaacatactttgaactcatctggtgtttgatatatctcaaagaattgctcaactagcaataaccactcttgaatcttatcaccgttaaaccgaggaaagtctaacttctcaggctgtgtagcatcagcataagtattagaaataacctgattgattctcaaaaaaatttggatctgaagagaaactagcagatgcttgtgaggatcgaaattgattatgcacatcgatgttatgagatggaccaaaccttaataacataggcatcgttgcaaatcgcttatgtatcttcaaattttgattctcaattttaacttccaatttctcaacacacgaagacagatcctcatccaccatccccgtgatctgatgctgctgcgcttgagctttagtcgccatacgtgagcttcgaggtttgtcttggctctgaatcgctggaaaagcagcaacatgtagattctccacctccgagttctctaattgttgatgttgatggccacgcagtcgaatcgcttccaacagtttagcaatcatcttgtccatctcttgattttgttcggcaatcatttgttcaaatcgtgatctagttcctgccattgattccgaggaaacgaatggctctgatacctttgctaaagaaaaattgtatctcactcaaattcaatcgaacaagttacatcaattgaatcgtcgttcataaaacgagaatccaaatctcatgtgataaagcttagaagtagaaacagctctatcaacaatgaaatatcaaaccttaagagttaacagagagaattgaagaagaagaaaaagattagacaaattaatattttctggttaattttctgcaaatgatcgataattctctatatagctccaactctctatctccacgttagctgccaacgcatcattcacgtctccaacaattatcttcctctattcttccacgtcacctactcttccattttcctgtatcatacacagactatcatgaaaagagatcaacataaggtaaggtttcctttccttacccaaaaacaatgagaacgaatcacgactccggtgaacgtagagatcgatggtgatgagtgatggctcacaacatgacaacaacaatgaacgagtgctgctgactcacaagtgatccacaacaaggaacgattgttgttgcttctctcaggttttgatatggatacaaggatgtgatggcataacgaagaagaggatataagcacctatatatatacatacgtatgcacacacactttcacgattaggtttttgatattagagaaattgggctgttattgggcctcattagagagatgggtctcacaattctcccccactgaaagtgaaatcgtccccgaattcaatacttcttattcgactatattctccactcatgcatttagaaaaactttgttaattcccaacacaaatttaaaacaattcaattgaccattaaaaaaatgaataaaaatgtttaagcataagccaacaactgaaactctaatataaaaaaaatagaatgaattcctaaaagaaattgtcacttaaaacgattagaccgcctactccaacatgaacttgtacgaccttggaatttgaatttcaaactttatctttctcaacatcaatcctttggtctcctatagcgtacacacgagatcttaaagcttgtatcttagggagtggttggtccccctcattttcgttctactgattcccttcaactagaaacgtagtgcactcccttgcataatggccaggcttttcacatctcttgcaattattgtctctccctggacaattcgaccatgtatgaccattttgtctacaattgtagcatatcccagtattactccaacaagccccgctgtgcctcttaccacatgtggcacactgctgaccattctgccctggtcccgcaccacgattatcccaagtgcgcttctgagattcaacagcttttgttacctttgctggagccctcttgagatccatagcttcctccacaagtcatctctccaacctagcagcctcctcaactaactcaaccaggctagtgcaccctcgaatggaggtacgagtacgaatatcatccctgagccctctcatgaatctctgaatcatatcctgctctccaaaattcttcatagagaacctccttaaacgattgaactcctcatcatactctcgaacaatcttcgtgccctgacaaagctccatagacacatatccaacaggcaagcccctctcaaaaaatttccaccaatgatctgcttcccccctcaagtaatgcactgcaagatccttcttaaactcctccggacacctcgttgtcctaaaatttttctccaacatctgtctccaatcatcagcgcaaattcgaccaaatccaccactgaagtactatgttcccatggtacccacaagcttcattgtcccaaatagttggttcgtgcaagcggtgttggtggctgatagtaatgaggtaatttaaccctaggtgccagtggtggtggttaatggtgctaaggtgcagcaactccagatgtcggtggcagtggtgggggtgcatacgcaggtcgagtcaaaatctcacgcatcatgttttagagttcttgcatctcggtacgattcgctgcaatctctgctgcatgagctgcattagctgtctgatctgcctgagctggcagagctaccacaggtggctgatcttggtcaacaactggtgcattcgttactcggtttccgtgagggttcgcaggacgttttgatcttcttgacaacattttctgtttatagaagactgaacattagaacccctacgacaactgacactttactcaacaacttttaaacacaagtctcgctcatttggtgctttttgtatcctttagaaaaatccccttcccgtttatcaagtactaaaaagttattattattttctaaaacatttttctaaaaaattgattataaaaatcttttctttaaaaagaaaaaattagtcttccgggtcagcaccgtcttaactataacctccgttctgatactatttgtaacgctcgtttccctcaaccttgagacggcgcgctttttctttattattaaatcttattgataatcatcttaaatataatatcaaaatacttgagaaacctctggtaaaacttaattgaaaacaagttgataataataaaataacgctgaaatttaataaaaccgagtttctgaaatacactataaacgagacagctactcaacattctcatcctcacccgggaaaatggagaaaaaggggtgagtaattaattacttagtgaggcggtcaaaactgccccccgaagcacaatatcacatttatactttcacacaacttccattcataagcatataatcaaacaacaagcatatagcttatgttttcgtagcaagctataacagtcaaacattcgtcttgcacaccgcaagatattttactttcatttttcagtttaggtagtttacttatggctactcaagcctcatttaactcatcatggctactcaagcctcttatggaagaccacgcccttagtttgatccttcctcttattgcatatcacgctaacaacctatcgcataatatcacacaacacgtattataatattttaaatataattcctaacattttaacaatctgcacccaatgtctaatcctatacaaatgaacttcagaagtacaaaagtagaaaggtgatgctatgtttccacaggtcctgccctcaccttggcaactcgaaatagaacgcaaacttgaagaaagatgttgaagatgcctagacaaaatctgaaacttgcagcagaagaaaacatcacaaagacaaattagggtttctgcagttttaacaaaagaggtgattcttcctcaataagcaatcaacgtggcaggtagggtatacctttccttgtgacgatgaagggtcctgtggctttcctaacactttctctatcggtatccaccgtcgacttgtcattaagtaattagagttaaccggaatctgttcccgaaaatgccaacttgaatctaaaatctgatactttgttattttgggttaagaaactgtgacttttgtccaactttcaactagaatttgcgggtggagtttacctcgtaacgacgtaacgaagattcgtttgtttctgtgtattcatcactgtgaaatctatccaacaacattaaattcgtgatctggttccttcatattggacaggaaaatgctcacgaataggtctacctgaactgatatctttcttcctcttcttcactaaaaatccaaatagattgaatagtaaatcattaatcctcaaggaactacacagactatcatgaaaagagatcaacataaggttaggtttcctttcctaacccaaaaacaatgagaacaaatcatgactccggtgaacgtagagatcgatggtgatgagcgatggctcacaacgtgacaacaacaatgaacgagtgctgctgacttacaagtgacacaacaaggaacgattgttgttgcttctctcaggttttgatatggatacatggaggtgacggcataacgaagaaggagatataagcacatatatatatacatacgtatgcacacacactttcacgattaggtttttgatattagagaagttgggctgttattggacctcattagagagccgggtctcacaacattttaagaggttgaaggcaacatagatatacctaatttatacatagatatacctaatttatacatagatataccttttagtttctaaaatttctaagttatattcaaacatagatatacctagtttatacatatataccttttagttgtgaaaatttttaagttacattccaaaatagatatacctagtttatacatagatatacattttattttcaaaaatagatatacttttagtttcatataaattttaaggtaaaaatcaacatagatatatctaattaatacatagatataccgtttagtctctaaaaattctaagttatattcgaacatagatatacctagttattacatagatataccttttagtttagaatttttttaagttagattccaaaatagatatacctagtttatacatagatatacattttagtttcgaaatttttttaagttagattcaaacatagataaacctaatttatacatagatatactttttagaatcatataattttaaggtagaaatcagtatagacatacctagttaatacatagttatacttcttagtttcagaattttctaagttacaatatcaacaaagatatacctaattcatacgtagttatacttctttagtttcagaattttgtaagttacaaaatcaacaaatttctaccataatctgctagttgtgtaaagtttaaagttcataacgttgaatcatcgttagaaattgaatttgttgcttcagaataacctccagccgacagtactactacttcatcattcattttgtctgaaaccacctccgccgccgctggcacacatgcgttctttgttcgagccattactccagacctacaaacaaaatcatttggattagcacttcgagttactctactttaattaatttcaatcacaaaacccaaaatgaaataactcgaattttaacttacccaatatcttagttttcgacaaatattaccaagatcgactttgaagaaatataagagaaatgaatatagatctgtttttgtcaaatggcattgacgaagattgacgatatgttttacctaggttttctctaaaagaagaaggaagaaagggaaaaaaaaaagtcgtcgatctgttttaccatagagaaaaagtgagaaagtgttttatttaggttttattagatatgacccgaataaaatgggcttgtgtaattttgcgatccgtttaggttggttgggtcataattattcgatatgtttaaagctttttgagtcatttacttcttttaccgataaaaaaatcataaagaaatttcttttttagaccatctccaatggtgctttaaatttcacatttttcttcattttgaagtaaaagatagagaaatcttctccaatggtgcttcatttttatcttcaaaatgaagaattc

SEQ ID NO: 76 - DNA, 134499 bp, Arabidopsis thaliana
gaattctctttcagatttttattacacaagggactgtataatttaagtttggtggagggttcaagacatgttgaacattgtgttctcttttcttatttcaaattttgcatcatctaaggcatagaaaaaccatacaaatttgaaaatttttcagaaaatgatttcatcaaaatcagagtgtcatgtagattgcatttcattttaggattgtatatagagtgtttgcgtttaggattgctcatttgcataggggataatgatgatttcaaaccgataagcatgttttgattcaatgaagtaagttcaatgccaaggttgttagttctctattgcataaccgattgtatctctgaagtaagaccgcaccctgctttgaatttgtaacttgactatactactttgatcgaaactcgcttatctgatgccattccctatctattagaacctgaaatgaatttgaaattatcatgtttatgcattgtttatgaactcatggctaccatatacatacttggatcatcttattcacttcatcaccctctgttaatccaagtagttgtctctcatttttaaagcagtttcccatacccttagtctagccttatttcaagtcaaagatcatttgtgtgtgattgtgaggtctttttcgattgagcttggtataacgtgttaggatgagccgacaagagtagtctttcatgtagacctagcccacaccttttgggtggagacttgtatttgggattgggaatgtgtatggaatgaatgggaatgagagtgagaatgagaaggaaaagaaaagaaaaaaaaaaaagagtaagagtttagagttctaagggggatacaaaagtgttaagtctagtaaagggtttggaatgtaaagaagttaggctttgtgattcaaagaaaagggtaaaacgccctatgtgctaagattagaagaaaagccttaagtttatcaaagtataaaaccaaacccgctagactcttaaatcgtttcaaagagaaccccttagaacttgaaccaaatagagagaaagaatgacaaaaagggtagagttaggacatctatgggactgggatcatcttctgagctatcatactatatcattgggtagatgggagtctgttcttgtacgtgtccgttggcttttacctttagcattctactgaaactcaatcttttctctgagagtcccctgttactcgaccaaaccgttagagggaccatttttatctcttagcttaagcccgaaatcaagtgagttcatacccattgcattgcttgattcactattcgtgcttaatgaatgttaaagggaattggttgatgtgaatgcttgaatagattaaggcaagttgttaggttgcattgtgacgagtatggctaacgtttttaagtaagggtctatcatcttgcaacttagaattagctacctggacattgagcttacctattctatatgcatttcttcggtttttgaatccccaccttcaaacctctccttcaacttaagtgtttttgtttgcttgagggcaagcaagagataagtttgggggagttgataacactgtattttactcattttaggtgtatgtttatcatgatttagctttgcatttgctcattgtatcatatcattttgcaccattttagcttgttttgcatacttaggcatctaggatcatcttgcattcgcattgcatgttttggtatgttttcaggtgcaaaaagagcttaaaaggactctactcaattcattcactcaatccgggcagctacagaagaggcatcattctactcgacctctttactcgatccaggatgctacaaaggaggctccagtttacttgaccctcttactcgatcaaggcaacctcagaagaaagcagcagactaatctactcgcccctcctactcgatccactactcgatccatttactcaaccaagggtgaccatctctacaagacttgttgagctatcaaagcgtcttcgaatcctcctcattccccactcaaccagacatctgagcatacggataggagaggataaaccatctactcgaccaattgatcactcagagcatatacacaaaggcgcaaactttgcagcaccctctttactcgatccccaagatcgagtattcgcccaaaccgcctcaagtctcttgtcttctagggaatctagggtttccaacattttagtataaatagatcatttggggtttgtccaaaagatctatgtttatctttcagtttttctttgtatttatgaatcttgaaactttaattactcttaatctattttgttttggcatttgattgtttaagtaaagttgtttagcttgtttagatctacattttggtatgattatagtaatttataggtttgtgttcttgagaatgttgcatgagtagtgattagggttcttgaggatggattagattagggtaatctctaggttagttaggtggttagtgtttagatttatacccttctggattcgcttggcccctatgcggttttcgccggctaatgtggagattcgatcataaacgtccagcgtccaaaagacgttcaaatggatgtctgacctacgaattccagagatttgtagactcgaccaagggattggcttgtctgcctattggctttggtagattatttcttaaaccctgctttgcaatgttttatcaacgagagttgagattaggaagtggtagagttatgggggtctctatcacggcagtggattgacccggtttttgaatctatcgtcatgggtatctatctttcgcctattagccatttgatgaaccctagagttgcccttatcaatggatccatccttagaaattctattagatttatttgtatcccctgatgattgcacttttatttacctgttatttgtatcccctatttttatcccctgttgattgcatttaagtttcttaattttgtcactagttggttctactcgacccagtgattgagtagggctctaaagttctcatttttacttgtttgaatcctgacctaggattattagtagaaacccaccatcgttataatctggcttgacttagttgtttctgtacacatcttgattgctagcaatacagtggactggattgacaccctctataactgcatcgacatgtttgtgttttaggggaattgaagtgaaatcacactcttcagcacataagcagacctgaaaaacctgcttatcatcttttctcttgtcgattcttagcaactaaaactcttctcttttctcttgtcttttctctaatccatgagcaacaaaactcttcagagatcatagatgcatcacgttccaacaagaggccatgtgtggatgacgcttccaacaaaaggccgtgtgtggatggctgttccagcagaaagctgcttgaaacggagaaacgtttcaaaggcatcatctctttcatcagatgcaacataaggtagacggaggaagcacacatcttggatctcaaactgcatgagaaagaagcgaaacttaatctcctaaggaaaatgaaaaggatgaaggacggatttaacgtggaggaggagttccagaaagtggaggagtaggtaagcaaggcttataaggagaagaatgaattcaaggtgattagtattgattgggataaactggggtatggatcgacccagagttcaagttttgaatcagatgaagatggagatggatgtgattgtatggtcataacaaaattacatctccatgttattgaattgcaatacttctatgttatttaatccctttaagttatatcttcactttttattttctattagcgtgtgtgattcataatctgtctctctttcacgcgtgtgtgatggcagacttatcttagatgaacttgatgtttggttgagttatacgtgtgtgatggctgagttattctaacgttaaggcggacttatcgtagattaacttgatgtttggttgagttatttgtgtgagatgcctgagttattctaacgttacggctgagttatcgtagattaatttgatgccttgttgagttgttagaacgtgatggctgagttattatcgcacaaatcggaagactggctgacttaattaaaattgacagtacaaggaagatggttgtaaaagcaccaaatttagctaagctcataaatacttgttcaagctctcatactttttctctagcgtttcaaatttttttccataagatcaatcttttccgccttagctaagttcacaaatattggcggcttccagatccttcttcatctcaatcatctcctcttttatcatatcaaactcgtcacacaatgcaacagtccaccatctcttgaaaccgctgcctcgaccggaacccttaaaaataagaggttgattaatagggatacaaaaataaaagaaataaaataaagaatcataactcaaaagatgcttacatctgatattttatacggacaactgaaataaagtttttcgcttgtaacaggatcatgagaagtggcaacgacaaccttagcattgcaatctaactcgatcagaacgcctttatcgcgcctcctgttttcgccgtacctcattctcatccttatttccatacgatcgagctcctacattaacacaaacacaatatacaccacgttaaatggctaacgatttttacttttcagatggtcgagataaatacctcatttccttctgaaaccgttttctcatcaacactagagtcgccgtggaaaagagatctctgtgccatcatcttgtcttcaattagtagggcactaaagcactaaatctatatagtcgtgtatgctaaaaagcactaatcaaacgacggcgtcgtgtattggtgaataaatttagaagtggctgagttataagagctttgcggctgggttatagacatattaatattctttattatatcattatcgagattacaaaaactatttttatggggaaccgccaataatgactggatccataatcacacgaacacgccaatagttaatattcaaaataattcaaacgagttcgaattgattcgaataactaaaccctcaaatattcaaattttcagtttggcggtggaataccaatacgtcacggctgagttatgcctgaagatttcgtggtttgaccgagatatgagaaaccaaatgttattatgagatttaaaactagctaccaaattgttggctcaattagtgtcaacatctataatatcaaaacagaaaataaagtgggttttcactaagtttttgctctgaatctggaactgaaaaatcgtccttagcttccttttccttagtttttgctccaaaatgtctttttatctccattgttgtcccactgcataaaatacctgaaaagacactaaaaatactcgagaaataacataacgactcaaaaacctaaccctaaatcatagataaattagtaaaaatagggatatatcaactcccccagacttagcttttgcttgccctcaagcaaaacacaaaagcaaaacacaaaagccaaacccgtggaagaggttttgaaaacaaaggaactcccaacattctctagcctattgccatgatcatctaaactaaatccacatgcctaacaagtctaatcaaatcctaagcaacatgtacttctctgcaagcttacacaacattctagattccatacctaagttccacaattatatccactggaatttcatcgctgggtctcatcaaacaagctaacactcaagatccttctagactcattcatctactataccatgacaaatcgaccatttttttttctttctttggtgttctttctctttcccagacgtattctttttagagagtaaacaaaggagaactcgcatactggatcgacaccctcggtatttttccaacatttgtaattgatcattccaaataatgtataataatagggtcataggaaatatttctacccctatacactatctgaaaatcctctcaatctctcattattttttattttattttataagaggagatgaacactttttctttatcacattggtctcaatatcaggtatgaaccaggagtcaagatctatgaatactaaccgtttgaagaggtaaacggaagagcagtgagattggctcgagccttagtagttgtattggaaactaggatatcctcaagtctgttggtttgccatctagatattccaatagtcggattgagttgaacctgcagcactcatcaatcatgcaataatcaagagaaatatagatcatgattcctaactaaactaaaaaaaaacattttttttttaattagaaataataagagaaaatgactcaataaactcaaaaactaaaactaataagaatcaaaaataaaagcaatattagtaaaaaccttccccagacttaaacgacactatccccagtggcattcaaatctgaagaaggtgggaaaaagaaataaaaataaaagaaaataaaagaaaaggaaagaaaaaatcaaaccagtggattgcctcccactaagcgcttgttttgagtcaatagcttgactttgcggagttcaagatgtgggtaggatggtggaatatttctgctgcctcctcgccttccaaggcagtgtgaaaactgatctggtcgggcagctgcaggtgtcgatcgacactcattgtggtgtcgatcgacactctcctcgttttctgcaagaacaacaggggaaacaagctttcgagaaactttaggcttgttaacatgtgaagcagacttcgaagaatctaaggaattatcgaaggtaaagcaggagaagagatagaagagaacttatcacagagggccgcaagaggtgtgggctaaaggcaatgtgcagaatcctttgttttgtgaatcccgagggtgtcgatcgacatgagggatggtatggatcgacatcgttgctctgcaactctcattggcgagctgagctggtgggagcgttatgtgtggctctgtctggggattctaaggggtctgaggatgtgtgtctatgctagaggcaatactactaatagtctaagtaaactctgaaccatccatgccaaactctgtctccaaatcacaaactttaagagagatcctacctcccttcacatcaatcctaccaccagctgtagctatgaatgctcttccaagaataagaggatccttgggttccttcttatagtccaggaccacaaaattagcagggattagggagttatcaaccttaacatgaatatcctcaagaattccttcagggattcgtttggaacgatccgcgaagagaagagtgattctagtcagttgtgcacttagcagcatgaatctcctccttaaaacgacgtgtcctcggataagggacaagaagagtgtaagaagactcgggcttcatcgagattcgcgcctcatatggtgcagtccggacccagtgtcgatcgacactagaggtgtatcgatcgacaccctcgtgaggaagtgtttttgaaaataatgttcgatacggtgtcgatcgacactggttggtgtcggtcgaaaccaactctgcagcagcgagctccaacttgtcttcagtgtccaattcttcccaaacatcatctccttctctgatcaagatggcattacagctcttccttgggttagcatcaggattaccaggaagaaagccctcttgtctcgtaatggattgtgcagttgagctacctgtacatctagcttcttcaagtgagagatccaattgttgatcttcccattaagatctatgtagacaacatcaaacttgccattaaactccgtaacgagctttgtttggctctcaagaatctgctcaagcatggattctattctggtctctgatgagggtggatggggggcttggtaaactgaattaccataggttctctggaagttgctctaaggaaatgtcttctagaaagcaggctttggagtgtagtttgaggaactctagttccttgtaaacctgttgccactcaagttgccctatggctgtccaaacttcttgtagccctgagcatctatgtagaagactcccttttctaactcagtctcaggctcaatggtctcatcctcagctgcaaggtggacatgcttcttccctgtaagcaggttgtgaaccgaatacagcttagcatgtacctctgccatttgattacctgaaacagttccaacaatctttttcctctcaaagtcagcattcttggtgctcttactacaagctaggttctctatcagagcagtagcatcaactggatatctcgtgttgaagttaccattgctcgctgcatctagagccatttggtatctctaatcaactccattgaaaaaggtaccaagaagttgtacctcattgaagccatgatgtgggcagtcccgttgatactccttgaatctaacccatgcggctttgaagtcctcaactggaccttgtgtgaaggtagacaacttgtttctcagcttctcagacttagcatcatcatagaaattgttcaaaaaggctatcttgatgcttctcaaactcttgagggaacctattttgagttgtttcagccacgaagcagaatctccagcaagtgaataagggaagagcttgcacagtaggtagtcctctgagactccattaactttgatgctcagaacaaagtcttcaaaatgctcgatatggtccattggctgctcatgagacaagccatggaaaggatgctggcttactaaagtaaagtagccaggcttcagctcgtaattgttcctctcgaagggtggggatacgatcgctgatcgattagcatataacaggtgaggcctgttgaaacccccaagaatacgacgtggttccacagctggaggaatagctgcagaaatctgtggttggtgttgatcgacccctctgttgtgtcgatctacaccgatcacgtctgcattctgctcctgaaggtgtcgatcgacacctagttggtgtcgctcgacaccgagccctgctgcgtctctagcagctaattgcgcattgaggcgcgccagatcctcattggcgtcctcaggtaggatgagtgtatgatcatccaatttctgaccagcctcattgtaggcttgcccatcctcatctctcaaaactcgttctgcatcagctcggatgactctttcagccattgctaaccaaatatcactagtatatatataattttaatataatttttaaataggtatttaaagtaataaactttttaatataatactaattaaagatctaaattttataacattttcaacaagcaatctccattcttcatataactaatatattttatatattaacaaataaaattaaaattttctatttcatgactcaattacacacatgtatatatatgaggtctattagctgacaaaaaattattaatatatgatgaaattgaattaataataagtattattattatttatatatggacttttatgttttgtacgtatggattaagataaacaaaatttataatgtatgagaatataaaatatataatataacatatagtttttctttataatatttctattaaccaaattgtaagagctatatatatatatataatacggttcaaattatcctaagaactactccctcaaataagagatcaattgtagtatttaaggatcgatttccacaaagttcttttgttcacacaatgaattcaatgtcgagattaagctagcaggataaaattgaaagtaaaagaatacaaagtaaaaagacagcagattgattggttgtaaacgatgaaataaagagataggaacagggtattcttaggaaactattggttagtagatctaatgaaagctaggttgttatcgaacaattcttaaactcaaactctaattatgcaataaccgatggtgttccgcgaaactccctatgcctatagctaagaataactggagaagccgagagatctttaacctaaacatgcattctaaacgagttcagttgttcaccttagtagataggccaatttttattacacacctataaaccaggctcatcaaataatagatccaactacaaatacctatggtgggcatatctatttttctgtattcaagatctagttaattagatctagcattaagaataatcaaagatgaagaattatacagataacctaacaggggggcgatctacgaaaccatatgaatccctaatgagaaacctattcctaataagtaaactacccagacatattgaatgaaacaaacaacatatttgatatagaaagcataaacacagcaaataagataaaggaaaaaagagatctcttcactgtctttaaaactgaatgaatctctgaagaacaagggatgaatagcttatgtctctaaaaaaaaagggttttgcaaagaacttgataaaagaaaatttaggtctaaaaataatataatacccctataaaacgtccacggactaataatgaaaatggggaagtcttcaggggcaaatttcctcttctgtaaacttggaagcgtcatggactttgctgggtcaaaactggtgtcgatcgacaccaggagtgtgtcgatcgacactcctctgaatctggaactgaaaatcgtccttagcttcatttcccttagcttttgctccaaaatttcttcttatctccattgttgtctcactgcatagaatacctgaaataacactaaaaagactcgagaaataacataaagactcaaaatcctaatcctaaatcatagataaaatcagtaaaaatagggatatatcaatatatatttatttttttgatagaaagactttttaattaattattttaaattcaattttattatatatatataaataatttaccttgattgtggtattgacatatctcccgttgagacaatatctctaatataactagtttgaaaatttcattccggttcaactgcttgaaatgtattatctttggcttgatcttagtattggtgtctgttggagctggatttccctccaggaatccacctgcgaaaatagcaagccagcccacaaaagcccaccaagcccaccaagtagaggacctacgcaactaatgagcccacatacgcgaatgggtacttgggccagataaacccaatcacctgatgaagggagataagcgaataacaacctaggaactgatgaggagatattcgcggagcggacctgatatctcggaactgacctgccgaatatccaggacgatctccgcagatcccggacggagctaccacgtgcgtagacctatataagggagcaaggacaacttggaagacacattcaattctgcttatattcacacacatacttttacacttgtaatctcctttcacattatcaatacaaaaagtccattcgttcttagcaatataactctcaaggtttctgtgaagatctagccctcctttctcataatctcaattacaaatctctagtgtggatttcagaacccacatttggcgccgtctgtggggacagaaatagatcattccaacaccgtaactaacacatcaattgtgaccaacgatcatggatcccaattcatccaattcatcgggatctggcttaccagttcagatcccaaacgatgacgttacggacgggcacctcccaacggatctccctctccgaaccagggttgatgctgtccataacgctgatgcggaggacatctcccaaaactcgaattcttctggatctgaccaaatcactccccctccgcaaacaaggggcggagaacaaaacgtcacgatacaacctccaaatggagataacccggtcaacccgtctaatcaggtccctccgcgacctgccagcgaattggctgagctccgcgcaatgatcatgaacttgatcaacttaaccaaaaaccaagaaattgcgcatcgcaacctcgccgcaattgtgggtcagcaaagatgcgactccactcgcttgggacatgaggtagagcgcgataccgcgggtaaggaagttcccaccccgcgaaactaggattcctgcccagttcccatagatttgacaggtaccgtctccccgaccgatcctactccaaagactcgtctagacttcgcctcgatagacgtcacacctcctaacaactggcaggtcgctttcttaaaacaggattctgtacttatcgaacaaaggacgtctgaagccgatctctggagtctcactctacttcaaaacgaatcccatcgatcttacgttgaaaaattcaaagcaattaaatcgaagattgcgaacctaaacgaggaggtagccatagcagcccttcgtaacggtctgtggttttcctctagattccgtgaggaactcactgttaggcaaccaatctctttagacgatgcccttcacaaagctctccacttcgccaaaggcgaagaggagctcgctgtgctggccttaaagttcaaagaatctaaaacgcaaaatgctcctcttgcaattaaaacccccttcaaaaaggaaaaccaaacgcaagggcagcataccttattcgcaatagaagaggcagctgaggacgagagtccagaacttgacctcggaaaatattgcaagtaccacaacaaaagaggacattccaccgaggagtgtcgcgccgtaaaaaaattaatcgcagctgggggcaaaactaaaaaaggttcaaaccctaaagttgaaacccctcctcccgacgaacaggaggaggagcaaactcccaaacaaaagaaacgggaacgaacactggagggaggtgactctcccccacccgctaggagagaacgcatagacctagtctttacggaactcgatctaggtggcaagacaggaaggtcagtcaccacacctccctccgccccgcataagaaaaacatgaggtttccattacgcctctcaaaattctgcagaagcgcaactgagcacctctccccgaaacgcatcgatttcatcatgggagggtctcagctctgcaacgactcaatcaattcgatcaaaactcatcagaggaaggcagattcctacacaaaaggcaagagcctgatgatgggacctgaccacaagatcacattatgggaaagcgaaaccaccgacctcgataaacctcacgatgacgctattgttattcgaatcgatgtaggcaactacaaactctctcgtataatgatcgacacaggcagctcagttgacgtactcttttacgacgccttcaaaaaaatggggcacctcgattccgagctgcaaggcagaaaaacgccacttaccgggttttcttgtagtcgacaagaaagctcctttcaacgcaatactgggaagaccatggctacacgccatgaaagccgtcccatcaacctaccaccaatgcattaaattcccctcggaaaaggggatagcagtcatatacggcagccaacgcagctcccgaagatgctatatgggcagctacgagcttatcaaaaaagctgaactcgtagtactaatgatagaagacaaactcgcggaaatgaaaacagtcagatcctctgatccttctcaatgcggacctcaaaaatcatcgataacgcaggtctacatagacgaatcagatcccaaacaatgtgttggggtaggtcaagacctcgacccagcgatacgagaggatttcataacctttctcaaagaaaacaaagacagcttcgcctggtcaagtgcgaacctccaaggaataagcctcgaggtaacctcacacgaactcaacgtcgatccgacctaccgacctataaagcagaaacgtcgcaagctaggtcccgaaagggctaaagctgtgcaggatgaggtcgatcgtttgctcaagatcggatcgataagagaagtaaaataccctgactggctcgccaacccggtcgtcgttaaaaacaaaaacgggaagtggagagtatgcatcgactttatggacctgaataaggcatgtcctaaagacagtttcccactaccacatattgaccgactggtcaaagccaccgcgggacacgaactattgtccttcatggatgcattctccgggtacaaccaaatacttatgcgcccagatgaccaagaaaaaacagcttttattactgactgttataaagtaatgccctttggtttaaaaaacactggagctacttaccaaagattggtgaacagaatgttcgctgaccaactaggtaaaacgatggagctctatatcgacgacatgctggtcaagtcagctcacgaaaaagaccacctcccgcaattaagagaatgcttcaaaatcctaaacaaattcgagatgaagctaaacccagagaaatgctctttcggagttccctcaggagaattcctcggatacctagtaacccaaagaggcatcgaggccaatcctaagcagattgcagccttcatcgacatgccatcgccaaaaatggcacgggaccggccgtatcgccgccctcaacaggttatttatcgcgcacctccaggtctaccgataaatgcgtctttttctatcagctcctccgaaaggataaaaagttcgattggaatgaggactgcgagcaagccttcaaacaattgaaagcatacctgtctgaaccacccattctcgcaaaacccgaagaaggagaaccgttgtacctgtacacggcagtctcctgaaccgcgataagcggtatcctggtgagagaagatcacgaaggacagaaaccgatctattacgttagtaaaacgttgatagacgctgaaacccattatcgagcaatggaaaaactagcactggccgtagtcatgtcagctcgaaaactgagacaatatcttcaatcacatcccatcgtagtgatgacgtctcaaccaatcagaactattctgcacagtacaactcaatcaagtcgactagcaaaatgggccatagaactaagtgagtacgatatagaatatcgcaccagaactagctttaaagcacaagtcctagccgactttgtaattgagctcccgttagcggacctggatggaaccaactccaataagaaatggctcctccacgtcgatggctcctccaaccgacagggatctggagaaggaatacaactcacctcccccactggggaagtcatcgaacaatcgttccgactcggattcaacgcatcaaacaacgagtctgagtatgaagccctcattgatggcattaagctagctcaaggaatgcggatccgcgatatacacgcccatagcgactcccaactcgtcaccagccagttccacggggaatatgaagctaaagacgagcgcatggaagcgtacctcgaactagtcaaaaccttgacccaacagttcgaatcattcgaactgaccaggatccccagaggagaaaacacctctacagacgccttggcagctctcgcctccacgttagatcctttcgtcaaaagaattatcccggtcgaaggaatagaacacccgagcatcgacctaacagtcaaacacgctgggatggaaacctcggcaacttgcaactttacgcgagtaacccgaagcaccaccgccgcggctagagccctcgcagcagccgcagaggcaggtgcagcggaggaagaggccaagctcagaacccctgaacaacttgcctcgtacgaacctgaaccgtacaacgactggagaatcccaatcatcgattacatcgaacgagggatcacacctcccgacaagtgggagaccagaaaactcaaagcccagagcgcaaggtactgcatcatggaagggagacttatgaaacgcagcgtcgcaggtccctatatggtgtgtacctacgggcaacaaacaaaggacctcatgaaaagcatgcacgaggggcaatgtggtagccactatagtggacgtaccctccgctgcataatgctagccgattgcatagctcattcactcaggtgcgataaatgccaacgacatgcacctactcttcatcaacctcccgaggaaatgtcctcgatatcttctccttacccatttatgaagtggtccatggatgtcgtacgtcccatggaagcctccggtgggaagaagagactaaaaaacctgctggtcctcaccgactactctaccaaatggattgagggtaaagccttccaacaggtaaccgagaaacaagtcgaggtcttcctattggaaaatatcgtataccgacatggcataccttatgagatcgtcaccgataacggactaacctcacctcgggaaaaatcaaagcattttgcgacaagtggaagatccgccttaccacatccaccccccctgttacccacaaggtaacggacaggcagaagccgccaacaaagctatacttagcaacatcaagaaaagacttgattccaaaaaatcaatgtcatccgacatgctccacagagttctctgggcctaccgaactacaccttgcaaatcaacgcaagaaacaccgttctctctcgcctatggtttagaagcagtaatccttgtcgaaaccatagtaccaagcgtgagaaggacgccagtcctgctaacaccggaacacgcaaatgttagaggacaacagagacttcatcgatgaacgcagagatcacgcaatgatccaagttcaaaactatcaacaacctgccgtccgctactataactccaatatcaaaattcggagattcgaagtaggagagctcgttttacgaaaagtgttcagcaacacgagagagctaaacgctggaaaactgggaactaactgggaaggtccctatcgaatcaccgaggtggtacgtgacggcatctataagctcgtaaaagttttcaacggagtacctgagttacggccttggaatgccatgcatctcaagaaataccatggataggtactcaaaaacaatcaaactacgataaggcttgatcccttggcagggtacgtaggcagctcccccaagagcgcagccatcacttcaatcgaattacaaaagggcttaatcccctaaccaggtatgcaggcagttccctccgcaaacgcaattaccatctcaacctttccatttgaaagacgaaacttcaataagaaaaacatacatcacatcttccatcaacgaagatcagctgctcacctgacagttcaatcacccttcggtatcgagcagggacctgctcgatgatcaaacgccagatcgtcgcttgctttacctctttttgtacttaacaatttcgagagaagaataaaagaaaattttgatactcattatcatgtttcgcaaaacaatcatttacactatgatttaaaactcattcgtaatcttacgatacccaaagcccaacacccgaatgttggcggatccattttgtgatctcgcttctaaaacgtcgatagtgaactagacttataaaaacacatcactttggcttcatcggagctcacctactacaaccatatctaactctttcgctatcaacacataacatagtaaacaaggaagaaacgaaggtttcattcgcgacttggcgataccaaaagcccagctcccaaaatctggcaggtcccttgtgtgacctcacttcaacaggttcccgagacaaaacaactcaaacttactcaaagctttaaccttcgaagaacatatcatatcacatccgaaataacttggactcgaaacaagtccaattattatctggaacatggacaaagcaaggtgatcatacaccaaaattaacgaagtgtcaacactcgaatggaaaaccaaaaaatacttgctaaaaaggataaaagccttggcatccaagtacttaaacgaacaaaggataaaagccttcccaggcaccaagttcaaaaagcaaaaaacgaaaggataaaagccttccaggcattaattctgaaacaaaacacaaaatcctaaaacaaacaaggagcgaaagtgatcactccctcgattctccggctgacgtagcgaagacagtaccagaaccctccgcgagacctcccggaaaagcgtctttgttgctcccgaactcatccaagccaattggcgtcccttgctcgtcgacgtccatcggacgtaccaccgaaatctctaaaacctgcgggagatccaacttgcttagagtaaagtctgatacctccttcgatttgtaccgcgcctctaggtcatccagctctgcttgcagccgaggtttctccacggtcagatcgatagcagcctttgtgatctggtcgatcaaagccaggttcgactccacctcggccgcttgcccctccagcaccgtgtactcctttttggcgacccacttctccttgatcccagccagcagcttcgaatacgcagtagccagctcaaccttagcatcgtgaaccgccttcttcgcaccttgtgcagtcgaagtcaggtccatcacctttttggagagctcctccctcctctgctccaagcgatgaatctgcctccggaatagcagccgcaggttccatcttctcctctctgagggaggcgaccccctggtcgctcacgacaaactcagccgccagatgcacctccggctgggtccgagctctcttcggagaggacggtgcaccatcaaaatgaacaactgcagatggcccagacacatgagcgacctgattgttatctgactgacctgctgcagtagaggtcccggtattgatcttaagaaacgagggatgagacactgaggcagatgcgttggagacggctagagtgtttcagccgcggacaccatggctgacagatcaccagtacgagcaggagccccgacgttggctcgttgaacacgaagacttggacgcctcattcttctaatgagcgggagttctgaagtggagctggagtcaggaggaattgaacagacaaagcacaacatgtgttagttagcagctcgaattgcgcagctgtctcgataactcgtacattttaaaaaaaataacagaactcgtacctatgggcagattagcctcggggctcggttcaatccgcgggacctctttgatcggatctagctgtgctgcaggaaggacgattgcatgaactgctagagctacgggagctgctggaactacggcaagagcagctacgatgcgatctctgctaaaagtggcccagttagtctaatcacgtcggagaagggttaacagctcgagttccgtcttagagagagtaacttccttggtccttgctgcaaaccattaaaaaaaacattagtttcagtactaactttcagcaaaagcaatcaaggattcgacacaaacaacaacaaaaaaactcaagaggctcaggtctccatctgacccaggttggtagaccaggtcctcgttattctcgcaggatcaaagctgtcgattgaatgacgatctactctgaagaagaagtacttggatcgccaattggtgtctcgacaagccttcaaactacctaggaccaggaatccgggacgaccactgatgtagtacgtcccctggtcgctcctagcattggtcttgacctggcagagctgaagaaggtcatggcagctgaattatcccgagcccaggtgaataacgccagtacatggcggacgaagttcgggcacatctggggaaaggcgaggccgagacagtagagcatctcgaagatacacgccggaatcgggaaaaataggccacatttatcgaagaaattagcataagcgcagcaccacccgaccgacacgttctcaggatgcagcggcggccttgggagtatcatagttagcccccccggaacctggcatctcctccggaggtcgaccaggtcgctgttcgtcatcggcgtgcctcctccttgcttggcagcctttttcttcttcggctaatcggctctggttgatggcggacgaattggacccatttcgcctagggttatgacacgtctttgtactgtggttgcttttattctgggaatcttcgaagtcgctcatcgttgggtttcgacagaaaaggacgagagagatgaaagaaaagagcaaaagagggcagatcgagaaagaggggagtactagtagagaaacgaaggagatagcaaaagaaaaaagacgagatttttctatctttacaaaacgaaacacagtaaataataaaggaggagagaagttaccttgacagtcgtgtgagttgttgtgacgtcaagtggagagatgggaagttatttaaagccgtcatcaccatgattttcgagattgcagagatctcttctccgcgcctgatctagaccgtcaaatgcggtgcgctgaagagacgctccatctcagtcgttcacatcagcaacgacttatctcgcgtatctcctcgaaatctttcggttaaggaatctgaaatcaaatcgttttgttgagtttatcctcaaaaccgactgatcttatcacatctatcatctcatcaagaatattttcgcaatcttacctgacctatatgtccgctcatcgagttcgcctactcactcaatgggctggggggcaaatgttggagctggatttccctccaggaatccacctgcaaaaataccaagccaacccacaaaagcccaccaagcccaccaagtagaggacctacgcagctaatgagctcacatacgcgaatgggtacttgggccagataagcccagtcacctgatgaagggagataagcgaataacaacctaggaactgatgaggagatattcacggagcggacctgatatctcggaactgacctgccgaatatccaggacgatctccgcagatcccggacggaggtaccacgtgcgtagacctatataagggaacaaggacgacttggaagattcattcaattctgtttatattcacacacatactcttacacttgtaatctcctttcacattgtaaaatctttgtcattatcaatacaaaaagtccattcgttcttagcaatataactctcaaggtttctgtgaagaactagcgctcctttctcgtaatctctattacaaatctctagtgtgaatttcagaacccatagtgtcaatgctcaaactcctcattgtgagctgtccaaacataaaagttgggttgaaaccctctattatacgaatgtttagatacggtagctatagaaataagttctctatttgtacattttcgacatggacaccatattcgacccccatcatataatcgatagtttgcaaattccatgaattgacttaacccggcttcatattcgtcggatacacgtctagtgcgtggattaatacgattatatatccactttcttacgatttatatattattgcttgaagacattttttgttacaaagaagaagataatagaatagaattaaaggaaaaaaagagatggtttactcaaatgcaaaattttagaatgaatatgaaagaattttttattttttgctagatatgaagaagagagaaaacgaagccaaagattcgaatgaatatataacaaagaaagaatgaggcagcgtaacgatctgggcactgtctcggagagaggctcggtgaaatagacatgtctgtgaagatgcggactaccagcacctggacagaaagaccctctgaagcttcactgtccctgggattggctttgggattggctttgggcttttcctgcgcagcttaggtggaaggcaaagaaggaagccaaaaattaagcaacaacttggtggaagatcgacaagacacctatcaatttgctagaataagactgccacaaaagatgtggccttgtaatcaacttgctacaattacactgtcacaacagtagtggttttggtgaccaatttgctaccgcagaaagagtggcctttggtcagagatagggtcagtcacaagttgtcataattgctacgaaagaaattgtgagtctccacttcgtttctagttgcgaccgacacaattgttacaaagtttaaacaatagtaataatcttattttgtcacaaaagcttgtggcgaaacctatttttgtgaaaaattacaacaacaattttgatactaatcaactttgttgatatcctttattgtcatcaatcgtcgctaatagctacaaattgactagttgataatagtcgtaaaacgttaattgatattctattcaactatttttacaaaatcggcgacgaattttgttttgtggaactttgcaacaaaattttaaacacatttggtaacaaatttgttacagaaaaatttgtctcgcaatatgtagctaatttgctacgggttgtaacacattagctacattgtttattaaatcgcattctgttcttagtcgttaaaaatgtagctatatggtctaggaagaaaactcgtttgtttattcatgtatatatgtaaatttattatcgattttaatccttctgcattcaatctatttcatggtggaagaagataagcgtgatgtttttggttcacatgatattagtattcaatcgtgattaaatatatattcatctaatctaaaatagttgaaagtatatttgtgatccaaatcaaacaatagcgaagaagaaatttgtagaagcccaaacagaaaatttcattaaaactaatcatgaagaaatcaatattcattcgaaagaaatctaatctaaaatgtttgaaaagctatttgaaagtcgcaattttttttaaaaaagttcgccctagctatttctctctctagcacaaccttcgaggagtcatgttccgacggggtcagctcttgccggcgttgctagatctagatttttgttttgtttttgtcacccatatctaatgatcttgctcgtctcgtattatgtgctcatcggagattcacccctgagatctttctccttcgtatccatcattttgtttgctcctcatagtgtcgtcaatgttgctttctcttcttccgtcaagtttcagaccttgccgacgaagaccctttggatttggatcttgtcagagacttcttctgtgaagaccatctgctaccttgctctcggcgtgaactctttgggtacgttaggcttggttccgcctttcttgtccccaagtgacacgtacgtagccttccgtactacggtatgcagctcctgttctagtcttgtcttggtttacacttgtacaaggtaccacgataagactgaccaacaacagcttgccgtgacgtccctctccgacaagttcgtgtccttccaagagcaatgcaacggccagctcgcagggttggcggcgaaccattctaaaatcagatcagccaacaacgcgtacgcggagcgagtcaattcactttctgcaggaaccacgcggactactggagctcgaacgcgactcaattttcagggcaccatcagcccgagtgtccaaaattcaaaggaagcctctgaccagcagactccgccgccctcggttgaagtcgggacgacatcgactcagaatccaaccacctcgtcttcaccagcaggatttgccgcagtttcaaatgagacaatagctcggacgctagttccacttgatcctgccatcagactaccaatctccgatcctcgacaagagccaagcgcagtcaattcggagcttcaaagccttcaagatcaaatctgggccatgaacgcaaaagtccatcaggccactacttcggctcccgaagtggaaaaggttattgaggcaacgaggagaacaccttttaccccaaggatctctaagttgcgtatccgtgagttccgagatttcaagcttcccgtttataatggaaaaggagatccgaatgagcatttgacttccttccaagtcatcgttcgacgggtccccctagagccatacgaagaagatgctgggctttgcaagttgttctcggaaaatttgtcaggacccgctctcacctggtttacccaactggaagaaggctcgattgacaatttcaagcaactctctactgcgttcattaagcagtacggatacttcattaagagtgacatcactgaagcccatctttggaatctttctcaatccgcagatgacccacttcggacgtatattattgtgttcaaagagatcatggttcaaatacctagcttatctgactcaactgctcaattcgcgctaaaaaatggtctttggcatgagtcacgcttccgcgagtctttgacagtaaaccggcctgagacgattcaagatgcacttcattgagcaacgaactggataaacgcagaagaagaacgagcttttctagccaaaaagttcagtgcttcaaatgttgcaccaaaggcgcctcaacccgtaaccaccaaaaaacccgccgagccctgaaaacctacagcaggaactttttccgttgagaaagaatcatcgaagtcctctcctaaagcttcaccgtccaaaccacctttctctcctaagggcaaaaacggcgcttttccgagtaacaaatgggtccaagatctgaatgcgtactgtgatattcataagatgaatggtcatgcaaccaaggactgcaaagctttgggcagattgttagcggcgaagtacgcgtcaggagaaatttccgaatttgacatcacaccgatcgaattggctcagaccgcgaacgaaacattagaatcagaggaagcttcacctccgagcaagaaacagaaacgtgacccagcccttgtaattcctaaagggccgaagaaaatggtcaaagtgattatgggaggttcaaaactttttcgtgattctattagcgcgataaagcagcatgagagaagaactgtcactccgatcgcaaagaaaccaaaaacgggtcaaactgattgtcccgagatatcctttactgaggaggaaaccagcagacgattactatcacctccaaatttgaatgcgtttggatcaattccctgtgctcgccaaatcgtttgtcgatgcaaaagcactgctcgtgaactacaacatcccaacccttgtctacgtgataattatcatcttgaccactcatcggacatttgagaaatgtcttcttttgatcgccaataagacgttctacaagctcaagctgtttaccacaaaaacagatttggggaacaccaaaatcaccatcgtacttggaaggatcatcggatcgttcctctgatgaagaaggtgacaataactaagccgcattatttgctacatagccaaacacatgaaaatcaaaaggggataaattccaaaatataaaccctaacatccaaaccctagatctttaagaaaatccaaaatccaacccctagatatcaaattatcataaacggcaactctaattcctttgcaacccataattcaatggaattgggggaaaatcaaaaccctaatttattttctatccaacccaaaacttaccaatgaacttggacaaggcggctgatgcgaaagattcggcgtcggcggaggttcgtcgtgttgttcgtcggcggaggttcgttgtgttgttcgtcggcggaggttcgtcgtcagagaagagagaaggagagaagaaaacttttcgagagaagaaaggagaagaaagaaataaagaaagagagagaaaagtttgtaatttaatgagatgagaaagattttttgaattgaaattgaaatacatagtgtgaacacatagtgtgaacgcatagtgtgaacacacaatagttattatgataataaaagtggaatgcgggcccagacaaaatactgcgcattagccatagttatgtcataagttattcagttgtcccgtactcaatttatttgtactttgtgaaagttttagtatttagagttggacttcattaagggaattaacttttagttggacagatgatataatatgtttaataataagatatcatgttttagttatataattttccaaatatatgcgttttgccatgtttatatcaagatggtccaacatgatacaatgcataccatataatgtaagaagtgttttttgaattgatgagtataatatgttcaattgttttttagattgtatgataattagtataagtgattaataaatgttctagaataatgtataaaaaaaatttccaagtatgaaactttttctttataattatgagaaaaattaaaaaattacctcctttttaataatatcatattttagtagataaaataaataaactgtatttgtctcataaatagtaaaaatatatataaaaaatacagcttcttaaaaattttcatttaatatattagaaataattatagttttaattaaaagtagagagaggtgtatttttcatacaaaaaccataagtttttcatacaaaaactcatatttttgatataataaaaatatttaaattaaattaaattgaagcaaatttaagtaaaaaaaaacaatactaaaattatatttctttcttatatatataggaggggttttattgtaagagataaacatgaaagaactagtacaacggtacaagtacaaggtacatacataataacacttaacaaaattccaaagtacttaaaaatgaagcaatagttcagacgacacaattacacgatacagacataacaacacaatacttaagaaaattccaaagtacttaaaaatgaagacataatacatgaagcaatagtacagacagcacaagtacacggtacagacataacaacacaacacaaaatacacatttaattatgcgtcggactcctcgggctgcaactacgcgttgatattaatcccaggctgaaacttgttgttagtcctctttctacgatgttcccctgttgatggaaaccaggtttcttgatttctccccggtttagttgtggtatctggcggtaagactatcaattgtcttatctcatcaggaataatccaaactgatgaatgcgggactggataaatggttctgtagtatgccaatatctacgtattcatatggtaataatgcgaagttaggtcttccatttcgagaccatctaatatctattcggtccccacaaagtgtcgggcagcggcaatcgcatgtacacacgggtacttatcaacatcaaaacgtcggcaagaacaagttttccttagcaagtcaacagaataagacataccaccttcgccaatgacgctgtattgacgttcgaagctgttaagctcggtcaccggcatcgttttcgcaattgggcataaggagtgtatttcgttctccacaaccggcacaagaccccttgtttcagaatatttaacagactccttcctatgtttgttaaaccattctgaaattttctcaattatcgcatcaaacaaaggtaaaaggaagtatttccttgcacgctcaaacgtactgttcaatgattcacacgcattgctcgtgtctatgttatacctatccccttcaaaatagcacctagcccaattttccacaggagcccatcgatccaaatacgtaccgacattaggaaatcttctcctaaatcgagcatactctcttgtgaactcaaactgagtataaacatgtgtgcatgcaatgaagttagccgccgcttcttccttctcagttttcactcgtactttaacgttttgagactaatgtcaaacacaatggccatgtctcgcgtttggaaacacttgcatagttgatttgatgatgttctgatgtctatcactcacaaaaaccaaacctggttcatcttgtataactgttttcagcttgttaaagaaccacgaccaagtagcatcgttctccctatcaattacagcagacgcaatgatataattgtgatgattaggatcttgggctgttgcgaaaactagcttaccgccgtatacggtcttaagaaaagtggcatccacaataacaactttcctcataactttaaacccttcaatgcaagcacccaaagcaacgaataagtacttgaacttttgttgtgcatccacttccacatatgatattgtcccgggattcacctcctttaatacgtgcagataagagtacaagtcggtgtagcttttttcaggactaccacgcacatcactaacgtgttgtcttttccctctccatgcggtagcatacgagcaatgcaaacccattctttcccgaacaatactcattatgcttttagatggtggagtttgaaactcacctggataatcctcatgcaaaatagacgcgattaatcgtggtgtgtcggtatgtttacaattgcctgagttcttattagaccgcttgcatgtgtgcatcttcttgtgaactctaacactaaaacaatctgaactctttacttttgcacatcgtaaataccatcgacaacctgttgttttagattgccgacatcgtaacatgagtcgctgtggatctgacgctatagttgcggtcgcaaaacaatacttatttgcagctctgttaaccaaatcttgcacggcctccttagaaacaaattcttggtgcaattcaatccccgttccatcttcccattccgtaacactctgacttttctcactactctgacttctttcaccaacacatggaagctcataatactcaattctaccatcaacaccattatcttcagcaacatccatccggctatccacatgctccctatcttcaataactacattctccatagcctcttcaaaaacccggctatccgcattctcaatagcctcttctacactattagcctcttcaataatcggttcatcattcacacaattacctcctgcagtttctcctctaaaaatcgtcactactccaccattctccacatcaaatgcattcaactcctcataattaacaccaactgaacttcttctctctacccttgaaatttgttccacccactcagattctttatttactacctccacgttcaaagctggtctaattcccttagcattcactaccgttagataacctaaaaagtcatcatcatctacaatagatgtctctctctgagatgtgcatagaatataactcaatttcaccttccttgaggtttcatctattccaatcttcttgcatatcttttctactaacatagagtatgttacctttgacgtcctcaacaatacaccgcttaaagaattgtttgaaatccactcatgctcttctgagtaatacccattgtcaaattgtatgaatgtgtgcttgttcttcatcgtctcctgtaattacaaataaattataaaaacacaattacgtaatcattcagatttagacataattgtacctatattataactcactaataccatttgtaccacctgtcctattgtatctcaataaaacacttgtaccgcttatactattatatctcagttttaccatttgtcccagttcgtcaattctggctttcacaaatcgtaaatttcgattgaacactcactaaactctctaattcaaaacgatacaacagcccagaatgaacaatacaacaattttatgttattaacaactaactccaacaagaaattcacattaatctacaaatcaaaacgaaatcggatttacttttgtcgttgaagaggaagctcactttgggagcagattatcggcttggaagctacggcgatctcggaagctaactcgtcggtgaaattagagttcaaatcgccggcaaaatcggagctcaagtcgccggcggcgaagtcggagaaaatcacgtcggaagtcggagaaaatcgcgattttggtaacggccgtttttctttttttttactcaatgatttattctttattttgaaattctccttcagttattcattaaggagagagatgtaattgcacatggtcgagtggtactcagaataaaagatggtacgccaaaatagtttttccaaaatggtggcagaatagaacgtggctcgtatttactcaacatgtggaccccactaaaaagtattttgtctttttgcggcagaagatactcatagttgtaccattgtaccatcgtattcatagttgaactttccacagttttcataatttacagttgaactagacggtaaataattaattataagttgaacacacactttttctctattattttgcatttccaaagttttcataatattacatcggtaaaaacttggttttcacctattttacttcatataaggtgatcatatactaaatgttccttatattagaaggggtgttttatatgaaaataacattgttttttagaaaatattaaattttattgcatttatctaaaattatttatttatagcttgggatattcgtatataattttacatgtataataaattatcaatttaaatttttttaacattttagcgttacttagttgaactagttgaattaattatattaaatgttactacgaaaacaaaaaaaaaagacatttgaactagttcaactaattaaattaaaaattaccacggaaacaaatacatacatgtttttaatctaatccaataagttgaaccaagttaaactagttgaattgttcatacaaatccaagaaatacatattcaaaacacacaaattatttttttcatgtgcaacaaattctacaagtgatatcccagacatagccttattcttcctctggcgacgcttttttctggttgatggaaaccatgtttcttttttttaccattttttggtgtataaattcaattggctctgtcgactctggaaaaaccatctctggccgggtcatccatttcggcagacatcgattctccggtgatgcgtcttcctccgtcgatattgttggatcaaaatctaaatcgatatctcgatatttacttcgtcctctctggaaacgttccttttttagagataccatctccggtctactcatatatttcaccggtcgccttttcctccgtcgcagcgtcttcttttttttacaagtgccttgtttgttacactctatctttaggtctcgattgaagaaagtaagtgaacgaaacgaaaatagttgtttagatatttgcaatggtagtcagtacaatgtagtaattgaatcgtgttgctccccaaatcaatccatagttgcagaataaatggtacaactgaaattggttcaattgatctagttcaaatggttcaactgatctagtacaaatagttcaactgatctagttcatctggtttaatcggacgagtttaactgatatagttcaaatggttcaactgaatgagttccaatctatttttccggcgtatggtaccaaaacattagttttattaagtaaatttgaaaaataccttctttatgagtttttatttaaaaaataatctatcctatattttctaaaaaaattatttttaatatataaaattaataaaataacctcattataatttaatataactaaaaccttaaacagaaaaattccataaattaatatttgatttaactataatttaaatgataattcttatcttaaatattttaaacaaaattttgtccaaaataatatatataaatatatataaataaattttattaagtgataaacttcaaaatatatttagatattaaattgttaaactttaatataaaagatagataaactatatttatttcaaaaatagttaaaaaatttatcaacaaccaaaacatatttcgaataatacatatctttcgaatttatcaatagcctaattctttttggaatctattacttagatttcgaatttatttaattttaattttttttcttctaaagtttgaattctgtttttatttattaagaatacagcttttaaatttagataaaactgttattttacgtattaaattatagtgttatttatattttgggccaggttatttattttattgggcttgggtcggattattttggttgaatttgtagtttctatatttttgaaaggttatttggacatttccaccagttttgattaaaaaaagaaaagataaataaaattatagggaaggggtagcattactgatcattatttcggagaaaatggcattcctgccatttattcgctcaatagagatagggagagagatagaaacaatagagatttcagtgaagatgaattctttaaaagaaaccttaaaaaaaaaatccggtttttatctcaaaaatcatggaaaaagggtaagaagtgatcagaaaagaattgatttggagagatatgaaagctttttgttccattgttgagaagtggagattgattttgagatcctcggaaggttgcggtttctatcgaaaaggaaaaaaccttctcttgtaaaattatttttttgtttttgtttaaaattaaaattaaaatttacttgtttaaaaacttaaaagataaaaatttaaggcttaagccatgtatcatcagatggagagggctacagctttttataattaatatttatacaatcctctgatgttgggcttggacccataacaacatgggctataaataaatgtcaaataattatttcagatcaatagagtaaatcttaatcgtctcgcaggttttctcatctggttatttatgttaaaccaaacttaaactattcaaaccgtccggttagatttttaattaaagtgttgttcgtttctccattcacataaattatctgaatggagatgaataatgatatccgtttagtgcaatataacagagcagtcataaagatcagttgaataatttttaataaaatcatttgaaaaataatcgaaatcagactgaatctgatcggaccagctgattcagttcaaaatagaaaatgtcataaataccccgttttaatttaaagattacattcctaaaactgaatcttcttctcttttcattcttttgacagtttatctcttcttcgccgacaactcaagacatagacaacacagctcacttcaccaacccattctctcgtgcgccacttcgttggccgtttctctccgccggatctctatctcttgtcggatgtcttcttcgctaacttgtttcttctccaaatatttcattccctcgtgcgtgagtttaaggtaagattcatgggttttgtattgagtatttgatgcttataggctataatttttcatgggtttgattattggattcttatagtttcatgggttttcaagtttttacttcctgagtcgattagctaaagattcatggcattggcttctgtttggcaattaacgagttcttatagtgaagactgtgaagatcttaattgctctaaaagccttgaatactttgatgttctccgagattagtctatgtagtttcatgtgtcaatgttttttttgtgtgtagtaacttcttcagggtttatttggttgtgaaaacctttgcgctctcgaaaaatgattcttatgtcatgtgtcaatgtttcaaaccttctagttcagtgactcttggttccagattcgttttggtggtcattgtctactcttttcttttctcttgtggtaatgtggtttgagttctttgcagataagagatatcttctgttgtgaatattacaaacttttgcttccagcttgatagattgaacaggcgaatagtttatatgaggttgttaatatcaaagaaagggctttcagatcttaacaaaaccaaatacatatagatagatttagcttaccaatgtttgacctaaccccatctcaccggattattggatttgtatgatgatgaaacagaaatgaggtgtgaactgtagaatcaataatttgttaggatcattctcagtggacttttttcttgatgggaaacttgaagcggagcaattaagtttagtaagcttagcaagaaacttttgctccttccttttattctatttatgcaggcatgtttagttacatccatacattattagattggcttgataatttgcatgttcaatcgagtaaaagcagtgtctagtgtgttgagttttgtgtctttcatgtttttgctttttgtttttgtgtttgtgaactctgtcatctttaataataataaatcttgatccatagcttttttgtaattgataagtgtgtattttgcatgtttttagcatccatttgtcatcattttagcatcatatcatcactgttttatacaatttctcatcatttgtcatcactttacatgtttaggatagatttgcatgcatgttgcatatttgcgttgatttcaggtgatttggagctgttgacgagctatttggaagaagcgggcctgatcatgtcaaacggatgctatttttgttattttttatttgttttggttatctactcagtattccgttgcaatactcgaccaaattcatccacctcaaccgtcgtctcttccaaaagaagttactcgacttcttttcccagtctcgcatctcactcgacctaggagaaacactcgacctctgcgccgccgcaatcgaatactccacctcgctcaccgtcgaagtctcagggtctactcgattacaataaaagaactcaaccacgagtattcactcgacctcctgcaaccatctactcgacctctaggcttcaccggctgaacttaaactccacgattcactcgacctcctgaagcatacccactcgaattcagagacaatactcgatccaaatcgtctaaagggaactcaggaacaactcaatctactcgagtacagaattgttctcgatcaatagggtttggtttcattactatctttgagactaacctattgacatttgagctttgagttctaaatttctacaagggaatcatgagcaattacagtggcagttcttctattgatcctgactacaacatggatgagacagagtcgtcatcttcaaggcctgagagagaacagagagaatatgaaagcttcagaagaaaagctgagatagcccgagggaagagagcgatgacagagaggtatgagcttatagacaaagatctggaagacgagtacatgcctgagcatactcacagagctaccaaacttctacacaagcccgacgcattgcctgctgaggaatatattaggctcttcaagctgaatgagttctgtagcacgaggtatccttgctcgaccacacttgcacaactcggattgttggacgatgttcagcacctgtaccagagttgtcatctggacactctgatggcttatccgtatgtagcatatgaagatgagacaattcagttcctctccacgctacaagtggagctctaccaaggtatgacctctgatgagttggattgtgaaggattgagattcttgtgattctctgtgtatggtcatgagtataggctataaattaagcgcttggaaggattgtttggcttccccagtggaacgggaactaagcccaaggatgacagagaagagttgaaagacttgtggatcaccattggcagctctgtaccgctgaattcttccaggtcaaagagcaatcagatacgcagccctgtcatcagttacttccagcgttctatagccaatgtactctactcctaagagatcacagggactgttactaactctgatatggagatgatcgcaatggctctcaagggaactcttcgccaaactaagaatggcatgtctctccaaggtgaaatcaatgacacacctctctctgtacttcttctgatccatctgtgtggatacaagagctgggctgtcagcaataaccacaagagagcacgaggcgctctgtgcataggtggtgttgtgacaccgattctgatagcttgttgagtcctaatcatttctgctggacttgagccgcgagcaatggatatcgagcacctacgtcactgcgaattcctggagtttgcaatggttgacgacttccacaggttcaggtttgagcactctacagacaagagagctagcatccttctccctagccctgaggttacacggataatagagggagataacattgattttcggcctgaggttggatgcctctactatgagaacgctccgccattggatgaggatgatcttctagaagaagctgcttcagatgggatggatgaagacagagcagtggagttcgacactagcgtgtatcactttggtgaacatgtacctctagcgagggagagcaagagcttgactgaagctcataagaacaacagtaaattgcagaagtggtgcaagaagcaggacaagctgctcgccaagtgtttcaagactatcaagcttctgacagataagctgagttgttcctcctccaccactgctattccacagggacagactcctctggagatgccatcgaggagatttgatgagcttgcgcacaggcctgagcttagcgagcagagagtctcacatgtcccgtctaggcattcgtcattcgagtcccgggagcacaagcgaagaaggaaggctacactcactcgatctagcagcagatcacgcctcattcactcgaggagatcactcgaccgcggtgctggccgcaacagaaggagagaggtcgagtatcctcatagcggtgctggccgccaaagagctgatgaggtcgagtacccacctgctggagctgatacagaacaaggtggttcgtctatggcctgggagcaatcacaggcagccattgacgagcaactacgttcattcttcgactgaggtaagcgcctcacttcaccattgtattatatcatccgttgtgatttgtttcttcattttgtttctgtgattggatttgtcctgagcactctcttccaagtttattcgcacagtggactgtctgatttaagtttgggggagggctcaggaagtgtgtgttgcattgtatatattcttgagtctgcattcatctaaggcatagaaaaaccaaaaaaaaattgaaaaatttcagaaaatgatttcacaaaaaaagagtgttcatgtagttgcattacatttaggatcgagtctagagtgtttcatttaggattgttgcatatgcataggggataatgatgagatagccttgtaagcattttggttcactggataaactcagttccctcgttgctagttgtctgttgcgtagtcaatgaatttgaaataaaactgaaccatgcctaaattgctctactcgaccacactgtcatgatctgataccattcactatcaatttgaacctgaatctgatctttaattatcatatctgcatcaaatttgaactcatggataccctaaaatacttgaattttcttattcattttgatcactcttgttaatccaagtagctgactttccttattagagcagttaacccaaacccaaacctagactttctttcaaaccctatatcacttgtgagtgtttgtgaggtcgtattccgattaagcttggtagaaagtgttaggttcgtaacgacagagatagtgtctcatgtagttctagttcgcatttttcggactagataggactaggtgggcgcttatactttgggttgggatctgtttaaaagaaaaaaaaaaaaagggtcgattcattgataagaaaaggtaaaggactctaggtgaagtaagctaaagaagcagaaaaagtctagtaaaggttttgggatttgtaaagaaaagaaagagttcttgttagctattgaagatgggcaaaagcccttggttttaaaatgttaaaaacgggaaccttagttgttaaagaaatccaaatccgctagatgtatcaaagtgttgagaaagcttctcctagagttaagagaaaagaaaagaatgattagaaaaagggcttaaaagattcatgaatgcaaagggtagagttaagttcttatattgggattggagatgggattgccattagagcttcatttgatgtactctgggtagatgggatcttatctctatatgcatagcttgggacttacctttagcattctactaaagcttaatcattttttgagagatcccctgttactgaagcctattctgtaagggaccatctttgtctcacgaccttttaccttagccaaatgagttcattgatgatgcattgcttgattcacgttccagaagtaatgaatgttaaagggattggtagatttgaaaacttgtgtaggtcgagcatatgagtcggattgattgatgatgaggcatggctaacgtttttaagtagaattcgatcttgcagcttagaactttcaacttggacattgatttcatctggtttatctggtgctttggctctgagtccctgctttcaaacctcacctccagcttgttcttgattgtttgcttgagggcaagcaaagactaagtttgggggagttgataagtgtgtattttgcatgttttgagcatccatttgtcatcactttagcatcatatcatcactgtttaataccatttctcatcatttgtcatcactttacatgtttaggatagatttgcatgcatgttgcatatttgcgttgatttcaggtgatttggagctgttaacgagctatctggaagaagcgggcctgatcatgtcaaaccactcgaccccgaggtcgagtaggagcttcaagatctcaacagatgactcgaccccctggtcgagtagaggacatcattacttcaccacatcactcgaccccgaggtcgagtgtcttcatcccatcacctgaccatcactcgatcacatcactcgaccccgaggtcgagtgtcttcaccttcattgccagaccactactcgacctcatcactctacctggaagtcgagtatcaccatcaccaccactcgactgcatactcgatgacaagcttcagagccttcttcattccgcactcaaccagacactcgagcacaaggaagaaaagaagactccagctattcttaattcgtcccaatactgcgtcgttttaagtattagggtttcggaatatttggctataagtagcatgtacttcacattttcgcaaacaagttttatatctagttttattccgcagacactgtgttctagacctttgtaatctggatttctctttatctattcagtattcagcattcgttcttgatttcttttactgttgttcattctgttatcatcctgctgttacactgttgttatcatgtttttaatttgttcaacgtttatgctttctgttatgatgtctgagtagtgaataggtttctgaggatgggttagagtagtgtagaattctcagtatgctaggtgattgagtattgattgatagatcccttctggattagttgttcttaatgtctattgctttctgatcaactggaatttgagcctagacatttccgcgcccaaaaggtgttcgatgaaatgtctgaaccactaattccagagattcgtgactctataccaaggtattggttgcagagagcgttttggctttaacttgttgattcgtaatgcctgttaggctagctctcgtcaatggtgattgagtctgggactaggttaacttgagagtctctgttgcggtggcacttagatttggttaatgaacttgttgtctagggttaatttattgagcatgtcaattacctgtaaactgaggaaacgaagctactcaattaccccattctcgggaattctttatctgattactgcatcttgtcatctgttgtttaatttctgcaattctttcttgttactcgacctcatactcgaccacccagttgtctggcaacagattgtgcagtcgagtatctgtgttgtaattcctgtctgtaactcgacctgtcactcgacctcacccagtgctctgcaaagagctatgttggtcgagtattttattgcttgaatttctattttctgcatgttcacttaggactgctagaacacaccaaaacctgttattgtttggcttgacttagtgacttctgatcacatcttgattattagcatcacacccatttggattgataacctaaaatactacaacgacgtgagtggtgttttaggataattgattaaaaacctattatcagtaatcttgaatgtgataaatgcatgcaggtgattgaaaatctttaataggagctgccattgtgtgttgattgggtatcaagtactttttctaagtgatccaaatccttctctttttcgcagttccaactctttggaaagattgtaggaaaaatctatttgctctatatgttaagtcttgttgtgagtaattgttctctctgcggttttaggttaacttgctttaaatccaaataattgttctgtgttcgtgttaccttgagatgtatgatatgtttcagtttgtatttgcagtacttttattcctctgttgttttgattctctagggttcattgttgctctctgcctctcttgttcttccacaatagccaagatcaactctttggttcaatcgatcgctttgtctaaggtactatcatcattcatcaaagctatgttagtactcaattggtattttttatatattgaaaacagagcttgatcaattgctgaaaatagagcttgaaacttcctttgctttatttgattcaaatcttaagctctctgaattgggactgtatatatgtgtttggttgtgattatttgtgaattggaattttcagggacttagttctagttattcttgggaaaacctgttaaagtaaaaaaaattgcaccaagtctcattagtcattagacgtgaatctacttcagttttttctttatcttgtatacctcctaacagaaaatgatagatgatttcatacaaaaacttagtttaccaattcgttattgaacagtttcgtggtcatgctctcttttcacttgtcgccgttgtttcactttcaggcaagtcagagattcggtgagaaaaaggtaagctttttaaataatctttgcccatttctaataaacccttcttgttaaagattgggaattttattgcttgattaaattttgaaactttttcgtgttttgttttgatttagccatggatattgatgcttcgtgtagcttggttttatatggtaaatcctctgtagaaactgatacagcaacacgtttgaagaacaataacgttcttaaactcccagataattccaaagtttcaatctttttacaatctgagatcaagaatcttgtcagagatgatgattcttccttcaatctttcgttgttcatgaactcgatttcgactcatcggtttggtcggtttctcatttggtctccatacttgtcttccactcacgatgttgtttctcagtaagcatctatctgtttggtttcctctttaaggtttgcttatcttttatgtattgaaatcagcttttttagtttctttcagtaacttctctgagattccagttggttcagtttgtgtctctgatatacaacttaaaggtcgaggtaagtgttttttcttaccaatgatggattagataagagttaagatgtagaattggaaattgaaaaccggacaccgtgtgtgttgttgcaggcagaacaaagaatgtttgggaatctccaaaaggttgtcttatgtattcgtttacattagaaatggaagatggtcgagtagtgcctttgatacagtatgtggtgtctcttgctgttactgaggcagtgaaagatgtttgtgacaagaaggtatgttcttgaaaataacctttttgttgtgtgttttgatcccttgtatcagaaatttgaagttcatttgttttcagggtttgtcgtataatgatgttaaaataaagtggccaaatgatctatacttgaatggccttaagattggaggcattttgtgtacctctacatatagatcaaggaagttccttgtcagtgttggtaataagcattactctttagaagtttgtaataagtatcttttagaagtagcactgctcttagtcttattgaagctggtgttccttcttgcaggtgtgggattgaatgtggacaacgagcaaccgaccacgtgcttaaatgcggtactaaaagacgtttgccctccatcaaacctacttaaaagagaagaaattcttggtgccttctttaagaagtttgaaaatttctttgatctattcatggaacaaggtaatgtaatcttcatctttatcactttttaagtatattccaaacggtattatttgatcatttatttaaatgagatgagagtaagggaaatgatcatctaattatctagttttaagactatacaacctttgacatcatcactctgcacttttcaggttttaaatctcttgaggagctttactataggacatggcttcacaggtaatggttttctcttcgattgcaatttctgtgtgcttgtcattgaagggtttctgtacaaatctgaactggttttgattttatgcttatcctattagtcactagctgaactaaatggcaaaacttcatcaattgggaactatgtactaaaataattgctaggctaaaatgaccattttattctcatttatatgatttaatgtacactgtagtatttgcttgcaagaaactaagatcttttaaagttaagaagacgacaatgttacttaccatctacacactgctaaacatgtagcttttattgtctagtggcattagcaacttttcttaatacattcacattgaggtttggggatacaattacaatctttaacatgtatttacttacacctgcgcagtggacaaagagtgattgctgaagaaaaaaacgaggaccaagttgttcaaaatgttgtgactatccaggtaggatgatgattcttatggattggttattataaaatcaactcgtgctttgatcctcattgcattctcctttaaatttccggggtttgacttcttcgggatatttgctagctattggagatgacaatgtaatgtatgagcttcatcctgatggcaataggtgatattttgagcatgtgttatcgatagtttaatcgataaaatggataatgttacagttcatattttaagctaatatgttgtgtatctgttcaactacagttttgattttttcaaagggctggtccgaagaaaactatgaaccagagactcttgaagcatcttttggtgaacgcagatgttatttagcaattagcaccattaacactaagataaacaaactgcctttatatatactgtggatattgtcctttgttgcaacttttttgtgtatgttttgactcattaatgttccttgagggttcgttgaagaggaattggaagcgttgatcatctaattatctagttctgtaattagaaataatgatttgggtccaaactgtttattgaaaatattctcaaactctcttcttattaatatgacaaaacttaagcaaattgtacgtatattatacattcatcatacctaagctattataaacaactgacaagaaagttatttttttgtaatattcacaattttatatcacctaatctgtaggtagtcgtcacgtactacaaatacatggtgatattatttttaattatgatacaactaataataatgaggaacaaacaagtgtttttttcctggggaacatgaaattcactgcgggaataagacaaaaactgtatatttaccttactcgttttcttgaaaacctcgtttaataattttctgaaaattactgtaaaatcatcattcaaccgccagtaaagtgtattcagaaaatcactttcaaatttttttcaatcggtgcaacttatacttctccagtgtcatgcaatttttcttatagttatctaaaatgtgaaacagagcaaagaagccttacattgtcgtttggtttaataccaaaattaataataacattgtatgattattttgtgtttccaatagctgcatgtaaaggtaatgatgcccaaaccaagggaagacttttcacgtcactaatcttctatcaaatctatcaaacccatacttgtactcagacttctcacgtttgtcttcataggttatcatcacctctttttgcctactcaatttttatttatttttacttattcacctaatatctatttgagtacacgttttatgtttcatgatgatactcatattaataattacaacttacgtattttagaagatcgactaacgtattttgtgacacgttttatgtttcatgatggattcatttcatgccacttgtttaaaactcagttaattaagaatcatttgaagacttatcataaattgctatgttttaccaaatatatagtataacttttttgcttacgttgtatgttttataatcaaatcaggagtcagattttggtataagaatatatactcaaataaacaaaaagaaagactcaattactgtttagttacgtcaatacgagtgatcagaacttaaaagagaagtcaaatatgtgaaattgaccttagctaagaacttccaaaaaaagaattcaaaccccagtggcaaaatagaagcaaaaattagctttaaaatcaaagcttttctgatcaattttttcttgggactctgcctctctatctctctgcctccgaattttcttttacctttcacatgagtaaagcgactcacaaagacaagtttcaatgaaacaaagaaagttatcataaaataagacaaaacagaacctaaagagacaagacagaaggtacatactacatctctgcgtctgagaaacaaattgcttttgttttcttgtcttcttctagaaaatgctactcttatttttccttggatgttatccttttgctttttttttctttgttatttacttatttatatacacttggtccttccattttttcttttttggtaattgtccttcgaattatttattttataaaacaaaaacataatttaatttactggtatatttcactctgtcactcttgttacattgactgaaattatttattttataaaacaaaaacataatttaatttaaacaaaaagaactctatgaacacttgtagtttcctctaaactcctctcaactcgagtacccccatcattcgtcacacgaactgatgaacagaagatcattataagagacagtctaaatttcttttaaacgctattgataattttctttacgcaaatataatttgctttatttaaaactacttaatccataatacatattcctgactacacatttatggcataacaatagattgaccaccaaacggacacattcacttccactgtttcacctgaacaactagtgttttaaaatagtatagattcaccaactctttaacactataaaattacaatctttagtttgatacagttttaaaaaaaggttggatattgtaacgtaaatatgatcagtagtttgcatggaaagaaatgaacatggaacaattgcatgttcataagcataccatttcatcttaactatcctaatattcttttgattttattctatttcgatttggattttattaatatagctaaaaaataaaagaatctaaaccaaattaatcaatattttcataaataatagcataacaaagggaatgatagaaaaaaagtaactacacaaatttgaaaaaattcaaacgagattccaacagagaaaaagtgtctaaacatttgtcctacgattgcaatttgaccaattagatagtacaaatcagaagatgtctcgtcgacaatacgattgatagcccagtggataaactctgcttctccctctctcaatcatgccgccagatcaaaaatattcaatagaccataaaaagcctaccatttcttagtattgggacaagagacattaaatgcaaaaacattaaaaacaaaataagaaagaaaaaaaacctaaaaacttgtctgaaaaaagcttctactctgattcttcttttctcttttctactgacacgttttcaatcaccttaaacgacaaatctctccacaacaagacacgacacaacaaagcttatcttctcaaaacccttcactcacactctctcatctctagggtttcactaacacaagcttcctttatccctctctctctctttctcttcctagtttctttagcttccatggaaacgaaaaaacccactaaatctttaaacccatacgcaccggcgtttactcctccttctcgttctcctcctttgtttaactttaacaagccatttccttgttacaacaagccttttaaagctattaccggcgctcatgttaagccggaaaaaaaccctttcgtccgttatgggttttgtcaccggagatgtctcccaccaaggcttttgaagaagcctttaccggaaaataagctcgccggaagaacctcggtcatggttaagaatatacctaactgtctcgggtcagattttatctcttctcaacttttttataattttgtttttggggatggatgaattaaaataagagtttgtaagaatttgcagacgaatggatctcttgaggattttggacaatcattgtcggaaacacaatgaaaaatcttcctacgactttctttatctgcctatggattttgggtgagttaatgcttatttttctctattttgggatgaaattaaatgcttcttgcaatagcggtgatgatggacatttaatgtgtaacaggaaacgagccaatttgggttacgccttcgttaacttcacgagctctctcgcagcggagagattccggagagaatttgaaaacttctcttgggacaatatcgggttcaggaagaagatttgcgaaattacagtggctaagtatcaggtttgtgttcttttgattctttggttagccattgttgttgttatttagagttaatcttttggttttgatttgatttagggttaaagtcttggttttgacatatttagagttaattagtgcaatctttgtttctggtctattttgttacaagactctcttttatctttggttcatcatctgttgttgctcatttagggttgtattgtgcaatttggtgtttgagtctctttctttcttgttttgaactctcaatatcttgtttttttccttcttctttgtataatttctcaatttctgttttcgtctctctttttattttattttgttgaaatctctctttaaatcttgtataagtaactgttattgcttatttagagttgttaaattgtgcaattttgtgtttgagaatctctttcttcttgttttgcttattaatgactctttatattcttggtttgtaattgttttgtccttctttttatatgatttagagttgagtagtgcaattttgtgtttgagtctctatattcttgttttgtttgttaaagactcttttattcttggtttagtaactgttgttgcttatatttgaatagtgaaattgtgcgatttattaaattttgggtctttttgttgtagttcttggttttgtaatggatgttgcttatttagagtcgaactcttttttcttcatttgatatgacttagagttaaatagtgcaattttgtgtttgagcctatatctgaagctcttttattcttggttaagtaacttctgttaaattgtacaattttgtgtttgacttttgtgataggggaaagaagagctgactcgacatttcaggaactcaaggtttacttgccacaccgacgattatctcccggtggttctctcgcccccgagcaacggcttcacggcttatactctcacaaaacttggttaccgagtcggcgcacttggtggtggttcacgaaacgcttcattgcgttaaggtttttagggtttcgtagaagagaaattgtgttttcattatctccctgggtgtggtgtcaccaactagggtgaaatggaaacatagctttcctcttacttctctctcgttcgctttttagttttctagtttgtgtgttcgttaattagttaaaggtgtgttatgaacttagttacgctactacaatggtcaagtgctcttattatattccacgttcttttaatatcctatgtctcattctctttctgatttttttttttcatatggaaagtcttcaaaataaatggatctaacatatgtcgtagctaatgtaaagtggttatacaatttaaccctaaatttcttcttttatcaccaccgctcaaagctttggaatgttaaggatttatttggataaaagttccttaagaattaacaaaacgaaagtttcaacgaaatggtctttagacccaatacgggctttatcaaaagttaaaacagcgatacaaaatttgggccggtactcatagaaagcttttgattatacggtgggcctcaataaactttggataagcagatattgaaatgggcggtaatgatattgtaatggactagttttttgcggtttaactaaaaataaagttgatcagttaaagcattttgttgaacaaaaaaaacaatttcagtataagcaaatcgtaaatgtgagttttcatttcaggtaaatcattgtagacattttaatggtaagaaacattgatttttttttttttaataccaggaggttttggatcgaagcctgtaatccctctaaacccgaaaccacaacatataatattagttttgttccaagcgtcactcgaaccacatcatataatattgacttttctacatgaactaaaattgaaataatactaattcaatttattaattaccacggatttgtctcatgcttctcacatagaatcttctcatcatatatatattatcaatttctttttgtgataaaagcctaaaagaatatcatatatatatatatatgtgtgtgtgtgtgcgcttgttattacatttacaataatcagatattgagagtttaaaaatcttttgtgtcaagagagttcattttgattatacacaataaatatggtagcgtaagtcatgatatcaattagataaagaagctttacaataatcttgtagtaaaacatataaatgtatcttaacgaaaaggtaaatataactgtagacagaacaaaagaggagttgattcatatcttttcttttgacccaaaaagtaatactaaatcagttctttttcttctttatctatcaaccttctgaggtgaactttgttgcgtcatttccagacttttctcatgcgataaaaatatcatatagctttaactatgtaaacataaaaatgtaaaaaatgatgactttttgtgaagccaatcatttctttaaaatatcttacgaagagtagtggagtctacatttgaatagcaacgtagctgtgccttcttctttttcttcctcctattttcatagaaacaagaaaataaatataacattttacataaggggacaaattataatttgataagttatgaggataatctttttttttaatgttggagcatattgtttctatggttttaaaattatatacgatttgaagtggtttaaatttaatagttttcaatgactaattttaagtttatactaaagacaaaatatattcaaacgataagtagatgaaagagttagaactatatgttctatatattaaaaaaatatatatatatatgttcagagaggttgatttaattttagatgtttatttatataaaatttattccttactatattaacttgtaagaaatattataatttttggaattagataatcaaagttttatttttgagtattagaagaaaaaaaacccatcgttttctcttaatttcaagttgtaagcaatacaatagaactatagcataaatgttaaaatgtacatcaaagcatcttgaaccaaaaaatatacttaacgaatttcaactaaaagggcataagataatcaaaatgatcattataatgcgtcaggggatctaataacgcattttctaatacattagttaattaggagcctatgggcttgagcctcttgacaaaagtgataagtcaaaccaatatatataagaaaaaaaataatttactaatacgaaaatagatgaatctttacattgcttccacttaaattttgtttaatagaatttagtaaagaagccgatttttaatgtataagtaggtcttggatcctatgctatcatgaaatattttaatttttttgaagtattaaatacattagaaaatactaagttattgttgaaggttgttaatagtaattaatcacgttctcagttcaatttgtttttggtttttagaatttattattatgaatatagtaaccaaaataaaactaagttagtaaggatgattgataagaatttatagttattaaccattttagattcacgttttaacaaatatacatttaaacttttgataaatagaaattagttaaaacgtgaatctaaaatgtttaataactataaattcttatcaatccaccttactaacttagttttattttggttactatattaaaatagttagtattacattttgaaaaagtagttagtatttgaaaaaaatagtattattacatttatatggtaatatataattcaaatactaactatttttcttttatcatcagatattatttatgactcaaacgaactaaaattgtagaaaattgtttacataagtgcataaattatttgtgtcaaatatctgttttgacattttcattacgagagattaaaaataaagaaaagaatttctcgtcggtttgaaactcaaccaaatactaactattcgaatatctataaacttttatttgttcgtgaatgaatatataaaattaattgtgaatgctttatatttcctctgtttctttttgtttgattgtttagaagaaaaaatttgtttcaaaatgattgattttttaggttttcaatgtaatacttattagttataattgataaattgtacacttcaatataaattattaaatatcattggtttagagttattgaaaattgtaaatcacaaagaataatatatttaaaagaaacatttaatatgttttcttaatatttatgttttttctaaacaaccaaacaaaaaagaatagaagggagtattaatgttctgttcttacaataatgaaaagtatctagagttattacagctcgaaataaatatactatatatctatatatatatagtgttggcccgatccaatgtctttggaaccgtgttgcaattattttcacactacaaatcaaatttcttttaattattaaagaatcccaccaacaaacatattactacttctatgagttttcggtatcaacaacacattataaaatttatcactagaaatacttgtttactgcgaaatttaatgcatatattttgtaaagtagaagccctaaatatatggaaggatgcaaaacaaagagtttctctgtttctgcaacccatcactaatttaagcttgttgtccatattctatgttacgtcatacttaactttcttgtccttgataatgaaaaaataattccttagattagttgacaaaataaaaaagaaaaaaaaaagcaagagatttgttgaaaaggattgaatatatagaaaatgaaaggaaaaacaaattgagctttaactacctccacaagtctcttgcgccattacagctgcccaacacatttgtcttatgactcaatctatgctgataaaaagatatttactaatgcaaaatataattagatcttaaacttcatgtgtttctctctatatatatatcttaattagttctttggatataaaaacactcgttcgatgttactatcatacttcccaattgtcatcacttaaatgtcaaatcattaagagtggttcactgtccatctttgtgcaatttatattatctttgtgttggatctaatcgtgccgtacttgaattcaattaaacgctataaacatatgattttccacccatttaagaatttgttccattatattcgtacaaatggatgtatcatcaatgtaccaaatacataaaaatgtaaattttgttcaagcatgaaatgcaactataacgatttgtttattttcttttttttggttaaagactataatgatttgtttccccttttactccgattcgattagctccatttttataattattttttttaatatttaaaagttcaggtccaaaggctttacatttctaaaaggcgagacccataacagattaaatttatctttttaaaacaaaagatctttttcaacgtatctggaacccaacacttctacctgaaaaatttactactaggccaacagcgcacgttgattttaattttataataattttaaaatgatcaattcgttgaaagattttgtgtaaatgatattcataaaggtcaatacaatcaagttattttcagttggaaacacaaaaagatatttcacataaattagtatcacatatcagaaaaaaaaaaatcaaattggtcgattatcttattttgaatataaaaataataatgaaaactgttgaatatgacacaatataataagtaactagtcgtattcgttttgatctgtattattggacgaggacaaaataaaaatgtggtgaggttcatacaatattttggggtcttcaaatttatatataaaaacccaaataaaaaaagtcgcggcctttccaaccaccaagcagcagatgggatgcggcgggtccgagtacgacccggtaaagacggtcgggtttggctcaccataacgggtgaggacgtgtgaccttgcgacgcggagccagacaagctactaagttcgggagcatgtggggttcacacgttttaactaacacgtggtcacgtgatatttgcatggctatggcatgtggcggccacgaccaactttggttttacagtttgataaattaatcttttttgctctttaattactttcgactaatttctcaatttttgcaactggtaagtgcatataaatatataaaatatttcttttccaaggagtttaatttcaattctagagtctttacgtgaaatatctttctattttttacaaaatacttatttcgaaaggactaggaatggatggatgaagcaacaccaacgtagtaacattaaactgcacaggtctagatttttttgcctatacacttaaataagttgacatcatgttgagtgaatctaaattatatgtaatagatataactgtaaatttgtttttattttctataaatttgatatttaacgccaaatttaacttgaattagcagagattacagatttgttatctatgagacatacaaatgcaacctagaaaaacatcaattttaaaacatataaccatgttgtgaattaggttaaataatagagaaatcgttaaaaagaaacaaagtttcttgaggcgttttgagtttaacctagtttacttttctttttttcttcattagtctgatataatcaattttacaaacttagtttctctaattatataggctttgaaaatttaatataacagaaataaaaaatatgaaaaatcttctatccatgatatttctccactcattcgaatagagcacccaaaagattttataaattttaagttactttaaattaacaaatgatgggtctgattggtaaccaaaagctttacaagttttttagctattagttttatcggaataatgcaaagttgttagaaggaactatagaaaaaactgagagtaaaactttttgtaacgcttttgataaagttttgacaaaattgtgatatttctccactcattcgaatagagcacccaaaagattttgtaaattttaagttactttaaattaacaaatgatgggtctgattggtaaccaaaatctttacaagttttttagctattagttttatcggaataatgcaaagttgttagaaggaactatagaaaaaactgagagtaaaactttttgtaacgcttttaataaagtttttgtgattagtaactgtcgaaactatacaaagctatattgctattaaaatggttactattcaaacccagtataagtgaaattacatgttctttatttttcacagataaatcttacacgttaacaaattattaggtatgatggttttgcttggcttatatatatggttatattttgaagattttcaaaagaagaagttcaattgtcttatatatatagaagtgaatatgttgttagttcaattatttaggaaagaggtatttgagttctgtcgaatctaagttcgacgaaggcttctcttctagttaaatatccatccacatacaacaaatcgtacatctttttttttttttttttgcttactttacattttaatttgcatcacagtagatcgaccaataagagaagttcccttctctcgtttctctcgttaccaacaacagattcacgagatacctaactttttttaatcgttttattttacctgaaaacgaaaggtcagaatcatttataacttattcttaggatgatgtaacgaaattgaatcataaagctcaggtgaagtatatttacatcccaagtcccaacgattttaatgccacaaacaagcatgatatttgcaggggcagcatttactatgtacttactattttactgttaatatcataaactaattgattcgaaatataagaaatataactatataagcccttttaacaaacaaaaaattaaaattaaatataagctctaaaaataataataacctttatctaattatttaataggtaaaacaggtaaataattctaaaatttacattggaaatataaaacttttatctttgtgggacaaatttttctttagaaaattcatttttgtgggatggagagaatactattttactgttaatatcataaactaattgattcaaaatataactatataaaccctttaacaaacaaaaaaaaaactaattaaatataaaccctttaacaaaaaaaaactaattgattcgaaatattcttggtgtgctggctattttattttatcaaaagctaacaacttgcttaggataatcatattttctgtcattatcacaaatcataataattgtttgaaagcaaattatatgttatgcttactaattttaaatctgagagtcaattaggaactactcgtctcatcaattcaaaataatattttctcctgagtttaggggagttttattagttccaatagatgtggtatttatttaaatacattttgtatgcgtgatgacttaatcttagttaaatttattatttattttgaatgagcttttctatatttaatttagaaaacaaatttagaatttctaaacaatgaataataataaattcaactccagttcatgtgcatcactaagttgaaggacactaaaattagactacttctacattagatcctccagaattggagatatcgactattgtttgatttttaatttatagaatttatgttgaatattttgagtcatatactatcataaaatcatgggtgcattatcaatcatccgaagattttttgttgttgttgttgatcatatagtattccaagcttccactattcaataaatctaaaacatattattgtatactaatctctacatatttctagagtgacacatttttaaatgaaataacatcaattcgttttacatccgttcgatttttatatgttagaaaatatatctttgcatttttctgtcgacattatttaagttcttgaagttatgaatcattgatatatgattttatttagatatatatatatatatatatcgtaacattttctatcggtttaatagcacactatttttatatagatatgatgttccttttggataacttagaacataacttgtgatgctgtattaaaattctaatcctgtaatggagaagagtttggatgctagaaacatactttataaacatgtacaattttaataagaacaaattgaatattaactgaaaactctaaagattctcaaacgattgatatattgttaaactaatcacccaaaaaggaagagtcttctaaattacaagttaataaaacaaatgaaaaaagtaaattcactccccctaatcttaaatcatatatgtggtgaagattaatataggaactaatggacgagtttggtttcaacttgcacaacaggaaactacttcgctttggctttattctctttgaaaatgattattggtgtctaatagctgtagaatttttattttattttttaacgacaaagacatatgaaaaaatgaacatattcaaattgatattcataatgtgaagtaaacgcagaaaattcaatgtacgataacctaaccacaaaaatttctgaaattactttttgtatattattgtgaaaaaaaatatcgatcgtgaatacaacgaacacattatatttccaaatccaagactttaaagaaccaacattatatacaaacaaatccctcaatacttatttagaatctatcataacactaggctttttgacgacttaacgttttgactttgaaatatcttggctttagactagaatatcaagaaatcctccttgatgttatattgcatcttctccaaattcggctgaaccgcaaactgaatcatcggtggtggtccgcaagccatggcaagggctgagccatctaatccatcagggatatgttctcgcataatcgcctcggaaataaacccggtactgtatgcccaaccttccttagctgattccactacgtaccaaacctttaaccggtccgggtattgctctgcccaaccatccagttcctcccttaggagaatatcttcctcggtccggttagcataaatgacgtacatttcagtctcatcctctggatccttgagaatggcttggataatttggtaaaccggagttattccggttccacctgccaacattgccaatttatcagcaaactttggtttaccgtgaaccgtgaaactacccttgccgagatactcaacgtgacccaatggtcctttaatctccaaagttgaccctataggcaaagagtctaggtactgagacatgagcccgccgttagggaatcttgggtggacaccgccaaagtaaatcttgaccacgagctcgaagtagccaaccacatcaacggtgctgcttggtgtgtaagctctgaggcagagcttgtcattgatggtggcgcaaaggaaaatgtgcttaccaaccggtaagcctagaaccatatcctcaaccggtaaagcaaaccggaatttacgaacatcatgagaaatggaagtcttttcgacgagttgaaccgggactttagcccggggattaaccaaagcgaggttcctaaccggagtcgcctctccaatgggagccaacagcgagaacacggcggatgaaccgtgaaccgagttgttaggcgaggaagagtcagaggaataaccagtggtgatgagctcaccgatacggtaatcctcaagcatcttcttggctttatccgagtgaatggcttcaaactcctccgtacaatccgtaccagcattgatcaagattgaatccgaaccacccgggtgatccataaggaatcgtgtacaatcatagatatgtccatggacaatgatccagcaagagtcagccgaattatgcttcttgacctcggacatcgagtacatcttcgcagttgtgttcataaacggcgtcgagacagacttctttagactaggaggcgcgtcagccgatttttcgaggtgacgttccttcgccatccatccaccagattcattaccaggaagcgttggatgctcgaacacaatcccaatctctcccttgtgtggcttgcacacgttagtcttcactctaaaccagcagttattcatcatccccatgagattccatatcattttctcgggctgcgtgttgagagtctcgtcccatgcacgaacagcaatctctttggcactaagcaagtccaaaacctcaacctcaagtgaccaaaaacaccaacaccagaacttcccatacttgtttggcttctcttgatggtcaagtgcacatacgttccatgtctctccaccatctaccgtgacctccacacgggtcactttttttccacctcctgtttttttttgtataaagattattgttactattaaattaaatcatcctatgaaataacgtatttattaaattaaaatgttaaaaggacaagtaccggaatatgcgtaaccctttaaagtataaggtctttgggttgtgaaagcgttgatgggaagaatctcctcgtgacatggcgtcgtaatcacggagtttatgtttagctcgttgattatgtactctggcttataccaccaacctaaaacaaaaccattgaatttgaatttatgtaagtcacagaagctgacatcatccaccaacattagtttttcattttttaatatgatttctgtttttgtttttctcctataggttcggagactttttaaacatatcaattagttcatcttaatgagatttattgaagcaaaaagattttatgtaccttcttcgtcggcgagttcggcgtctaccaaagaaggtaaaactctgttgtccttgaaatggtagaaattgtcggattctttagttgtgacaatgattcgtttcaaccatttaaccatccggccaccaatgaaaccggggatgatgatccgaaccggaaaaccgtggtctggtgttagatactctccgttttgcatataagccaaaatgatgtctcttgatggatccatggcatattccttcttgatgctcgttccgtatttggaaccagcagttccggcaccgcccggaagatcctccgacccttcgaagcagacgttgagagcgccgccttttcggctaaagatcccgcagcgacgcagtacgtcgcagagagggacaccacgccacacggaggtggaaactccggcggatccccagttgaatccctttgacttcttcaccatgttctgttccttacggcggttccccgcgcagactagcgtcgcggcgaactcgcggtaagcaaactcggagacgagctggtccatggtgaatttcatgggccgtttgacgaatccggtcacctcgaccgtccattcggcccattgggctttagggacgtggccgtggttacgaacgtagtgcaacgggacaggggtgataaacccgtggtgcattaaacggttaagaggcgcctcggagttgaagggatgtttccctgtgagacgtaccatggaagggttacgctcgatccagctatcagccgtgtattcgtccctcgggtccaaaacggacggttcaagctcggcgttggattttcttatcatctccttgtagtacacggcgttgctgttgtgtgtctcgttctcgtcttcgctcgacacgtcttcgtcatcgtcatgaaccttggctggtttcaagaacacggtttggttggtggtttggttctggtgcgccttaggggaatcggaccggcctggaacgggaggtttgtaagaacgaaccacgccgttcaaacctggctcgagacgagcgtattggcgattatctacagaggccgccatgttggaaagtgtataatcgtaaataatgtagaaagcagagcctttttctctctctatctctctcttgtgagtgagatgagatctgaggacgaaaatgcatcgttggtggagatgaagttatataggagagagcctagtggtatgcttttaggaagtatcgtgccgaatcacacgtatgggaccatttgtgactttttaatttttttcttacacacttactattaattttttcttatgacttgacttaattaaataaaccatccatttgtttgacaaaaataaacgatcatagttattcaataagcttaaaatgatcatttttgtccctatttgttataaaacaaatgtgaattgttggagtagttttgtaaatacttttaacgtctcggaaacatgtatagatttttttttgtcaactaagaaatgatgacaattgaataatatattattatctatcattggttatttcctgtaatacaatataaaaatgtgatcaaaacattttcctttttattttagtcgaatttgttttactaaaaaatatgttttcttattcgtgacacaaagccgtatttatttttaatggaaaaataacgataaaagatgacaaaataattaagagcaataaaattagtaatacaaaaatcgtggtgataatattttcatactattaattttaatagtttttgtgatcggtaactattaaaaccgtatatatatatatatatatatatatatatatatatatatatatatatattttgtaaaccgtatattttttaccagtaaattaaagaattatcaatgtgttaacataggaagaacgttccttttattattgagatttgataatccttttacccctggttctagtttagaagtttatcaatgttcttatatccttcagttaaacataggaacaacgttccttttattcttgagatttgataaatcaattaaacatattatcagaaaaaatctaataatcatacaatatttattttcttattaaacgttattttcagtaatattttcttattaaactgttttttagtaatatttttttttgataaaattaacagatgtgattttcagcaatattgatgagatattaattattgagtaatctaattttttgtatacattattataacctaaaatagttccttgaatcatctaaaagtttaaaatacctatgtatgaatgttggaaaatgaaaaaaaaaaaaaaactgaatgatggaaaatgatcacgttcatctttttccttaaaataactacaaaattatttctctttttgatcaagatgcaacattacagccacctatatattagtattactgttattattgtttttcttcggaaagaatggcggtgactaatcaaaaccgacggagccacgggttcagcagattcagtgggtaaatctttctttatttaagacttttttttgttgaaaatttcattgagtaaatattgaatattgattttcttgtgaacttctaattttgggtaaccaatatacatctttattttttttatatatatatatatatatatacttcttctgttataatatataagatatttcactaaaaagacaaagtttaagatattaattaatatttttacattaaaaaacatattttgatatttaattaaagagagtttgctaatgaattttttactgcagaataaaaatttatcttttgagatgtgagatgaagattaaatctgtgaaagaaaaaaaagtaaaaaagacagtttaagtttaaatcatatggtactatttatattatgtttaagttttatactttaaaaaggaacatgaaaatttagttgatttcaagtttccactttatttttttttatgctaacctttcatgttaaagtgtcaaacaatgaaaactaaatttgttgcgaagactattactatccatacaacaatttctatttcatagcacaatttcttaaataagactacttgcatatagcagtttcaatatatatgatttttatatacctaactttacaaataagataatcaatacaatatatatagtatagttaatatagggaattagggacgagtgatatgaagaaattatatttacgacgtttctaaaagcggtcgtttgtttattctttacattgttttatcatttttggtggtttgtcattttccaaactattattctcctttttaataaagtcattaaaaaatgagtcgtcaaacttgtgagatattttacctcaattgatcgcctaacttgattatttagctcgtagttgttgacttgttgtcataacgtcattaatcctccaatctcaacattaattataatcaaactttgacaatatttgcgtaacataaaagcgaaaattgtttattgccacaaatggcaattcagcactctttaaacacctatttctactttataactctcgcatatctaataatcacaaaaaactctcgcatattaatgaatagatgttggccagattgtattatatatatcaaagtagttcaaaataatttatggattatagatttttattttatttttaaacctttttaaaaaaaaatttaatcgccgtttttttccaacctattgccttgactagatctgaccggcgtgtaacggttcttatagcgccggtcccttctcttgttttattatctttgttttttacgattgtgaaacgtgctgattttgacgaggtagattgggttgtaaaaaagcttggttctaaaaaactgaaatcaacaacccttaaagtagatggtaaaaatatagtcgatgttctcgcttatgcctcatgatgtggatcttcgtcttgtctctagtcaggtgtcttattttgtttggagcactagagactgttcttcttctctcaacggatctgagcaacaacggttttgtttttggtgcctcgtccctctcttttctctcccacttccttttttgtgttcaagtgttttgtggcctcctcttattgatttggttggttacccaaaacagttgtagtgactagcttgatctctattttttggacttgtttgcacgtgttccatggttttagtggtggtctttatggtactcttcccggtttgatcttgtgatgctctcttttgagattggtttcatccggttgatgaattgtctcactccttgtttctatagttaagacatgattgaggtctggtcagttcaatggcttcggcgttcaaagattgctgagtcgatattgtcgctttctgaagtaggatagaaattttttatgctttgtcctgattctctcttgccggaatagtagtttaggttcacttggttttgagaggtagtattgtatcactataggaggtttcgctagatgtgtttggtgtttggctttgatcattttgtttcaagggagctattttgatatgtctatatctctagagttatttttagtcttggcttctatttcattttttgaggtttatttcaagttatctctatttcgtttcccttgttagggattagtttctagagatatatttcttttccgtcggctttgtttctggaaaagttaatctcttgtcggctttgtgtaacaaaaacgcatcccactcttatattcttccattatattaataaaattcgaaagaaaaaaaagaaaaagaaatatttcacttttttattgtatagatttatcctttctaattttattagacactgaggatttgaatggtgatgcggttggatggacaaatccaaaaacggtttagtgcactttatttttaaagcgtacaacaaactgtcatgaaccaactctatttatatgtaaaaacgatctgtgacagtttactttaattatttgtaaatccgcaccactatagacaaatttgtaaatgataaataaaaatgattcggtataaaaatggattttcccgtatttaccactacaacaatttagaatctaaattctcatagtcctctgccttatctgtatttaaaaaggtttttataattatattttatattatttataaatatagataaataaattaatatttttgtaagtgttttaaaacaccaccaaattttcaaatatcataatattataatttaattaattttgtataatatattaattttggattttgttaaacttttatttttttgacgttgttaattaaataattacccattggataataaagtaacccctgtatttgtatagaaccgatgcaaagcatgtgccgacaaaaagtgtaacccatgattacaaaccattaacgcgtaataattagtattaacatttataatggttagattctctagatttatctaaataaacaaataaaaagaatataactatattttgaatgatttaagtttggaaaaaaagaatgatttagaatttaataaaattttgtataaaattagataatgtgttattaaactatttcgatatatcactaaaaattagtatgaaattagatatttgtattttaacttataactctttctaaaaccttttaaattattaaattaaatttgatcacttcaaaatttccaataataatggatttgaaaagcatttttttttcagatcagtagttcaatgtcttttgattataataacatttacaaataatattaccagtaacattccattctactttgtataatgctctacactgctatttacaaaaatacttttcaaaaatagtccaaaataggaaaaataattacatataccagtttcgattttcatattgtgtaatgagttacatcagaactaattgaaattgtcgagccgacaatcaatagttattctagctatatgaaaattatagtacataatcattatgattgaatagctacgtacgtaaagcggcttctccgacgttggtttgaaatgtttgctcaacttatgtttttcaaatgttttttttctaaaatttgtaactctcaatactcttttgaacataatatttttggttggtcaaaaaatatcacattttaaaattattcatatctacaatttgtaacattagttatatattatagaacggttttaaaatttattattaaataacatataatttatatttaaaaatttatgattaaataacataagattaatcatttcaatttattttttgattgtggaagcttcatgatctagtggtcgaggatttaaatgcttgtacaacaatgctacggtttgattcctagagagcagtttttttacaacttaatggcgtaaggctaatcgaaaatttaagaatgatgtagagccgttcattgtgatattgagtgttagggataagattcttcaacattggtatggtgcatataaaaattgtaacaccggattttggaaatatggtggtacatgtagagaagtttaaaataactgatttgcttatttatgtcacaaaaatgtaattttttttcggtcaaacgttccgagagaactctacagttaaggaagtttgatcgaaaataatttcaggatggatgtcctttcgggaaatgattatcgaaaccgtatgaacgaggacaaaacacagaaaaaaatcatgtggtgatttgtaggattggtagggaaatatttgaagcctcatgtatgtagtagacggaccgtcggacaaaaatgtggtccaaaagcccgaaagaggcgtgaatgttgcaggaagtacatatattttgtatagatctgatagattgatcaatatttataataaaattaatcataatttctatgattataatcgagtacggacgattaaaatttttattatatatattcaaattgaatacaccatctaacttactccaattatcaaaaaggaaacatccacatttagtaattaaatttgattttgtttcaggagaagttttggcgactaaattgatggtgaaagtttaatatttctgtccctagaaaaaatttaaactcggaagaaacacaatgagccaataaagagtgtgaagtggcgcatggagattccaacggtccatgagtaacaaaaacatggatttcaagttacctcactatctcgttacatgtctacatgctgatgtgttccaatattttcaaaaagaaaaaaaaaagaaaagaaaaaacaaacactttcactcttatttggaaatggaaagaaacttgttacaacaatttggaatgataattacaaatatttaatccaacgcaaattcttttcttttcttcacactacaccacctaaaaatactcatgatttaacacatttaatgaatatataaagtacgagaaaatattcaagtgtcgatatcacatatcatatattatattttaatttaaataactcttacatgcaaattcaataaataattgacaaaagtaacaattatctttgaacaatgttacaggtatgattttatcaaaaaataaatattacaggtatggtattactaaaatataatcgcactatttttcgtttgaaaaagaggaacaaatagtttaagagagattacaaaaactcaaccattctcaatttttatgataaaaaataatttttgaaatcatcatgatattttaataaaccaattcaaccattcctttttatttgataatttaattcttgtaagttttgtttccctattattttattttattttgtttcaattaaattacaagtacaatgctataagcaaatatatttaaaaataaatttctcatatttggaaaaagactacaaaaatatttgagaccataatataagcttgtttgaaacataatatttggtcgttttaaatatattataagaatatgttatttctaaattaattaaattacatttaatagaaattattacacacatattatattatcatgaaaatatacagtcaagtatggatattatacggtgaggttagatattttacatgccaatttaaatttgattggaccagatatcaaattacttttttttttttttgtcaaatgatatcaaattactaaaagcacatacttgcaatgtccaccaaagatacttcattttttgtggtaaatgttatcacgttgtgtgtcggtaacaaaaaatttacggaaaaaagtataaactgtgactcaagttgtagccgatatgaaacattagagaaaacaattaaccatacaatatttgaatgtcaccctgcatgacaaatttgggttctttcgcatataccttcggctcaaggggttttcccctcaagttctatttttacaaatatggatcatttattatggagagtcccttcaaaatttgattcattttccttccaatagataatttggtatatttggaaaacatgaaataataagattttagataatgtgaataaaaagacctattagatgtgctatatttagcggaaaaagaagcatatttagattaaaatatgcatgtaacattgttatatagaacaaaacgagcttcatacgggaagagagtaatatagtaataaatatatacatttctagataatacactataaacacttttgaactaatttggggtgtaacagataaaaagtaaactcataaaaacaaaatgataaaactatattaaataactaaaactgtaatatataactatttctgcacatttagtatgcagaattagcagtatatactttttaaaagggtattaaggttgtttttatcaaacttttattcaaaaattattttataaattaaatccgtggacacactgcaaaaccgaagtcataaagtgggatggattaagattgtcattttttagacagggagtttatgcggatcgaaatgtcgcaacctgcaaaacgaaattgaactcgtagaagacgggttaaccccgcatggacatctttagctgtgataaatatctttaacctttacgtagctattcaatcataatgattatgtactataattttcctatagctagagtaactactgatcatcgggtcgacaatatcaataggtctaatgtaaatgtttcattatacaatacgaaaaaatccaaactggtttgtgtaattatttgtctgcattttgactatttttaaaaagcaattttgtcttaagaatgtatcagattggaggaagaaaggaactttggtgaaactttgacacaaggatttcaaagagtcaaaaaagagaggaggaagctacatctagggacggctaataaaagaaagaaaagggtaaactaaacttaaatagttttgaagacaatgtgacctttgctgaacctttgagccatctttgtatatatagctctctctactcttgcctttgctagaaaattccaaaatattccaactcaaaatatttttattaattaataaaacaaaacaaagaagaaatatgccatttggcttgtttttcattagataaggtgcacatattgaagtggggctttctcattagcattttgacatgattatggagaagttgaacattattcaaaaccttcattacaatgccttcattcaacttagccgcacaaaaaaaaataaaaaaattagccccataaataagggaataaactccttcatacataagtagcaatcacttaggaaagtaggcattgtaatacaccatcaagataattcataatagaatgaagtagtttcgtacattgttaatattaattcttagaattaatgtaaatgatagcaagtacgatcagagcacttttaagtgcttttagtgtgatcgtgaaactgattctgaatagatttttgataggtgtgtatgatttatctccttataaaccggttttaacagattttatctaagtagggaaaacgggttttgaactgtagatgactaaatacattgtgttttcgacatatccatcttcttaaaccaagttatactctttatggtatattattatatatgtatgactaggggttggaaaatttccttatttttagacaagatttgaagttgtcattttgacgtcacgagggtcatatatataatgctttttcgataagaaaaagaaactaaaacattgaagaaaaaaagaacaacaaaacaaatcgatcttgaaaaagacgaagattgtgatttgtggtttttgacgtacatgcatgtctatttcttattttctgtttgtttttattttctcaaaaaagtaaaagaaaaaatgagaaatactgaaaaagccaaaggaagttgcgtttcatgagatcttgtggcatccagagaattttgggtgaaccctttgccaaccagacaaagtactattttgatggctatatgaattgttcaaatttgataggcaaaataatatatcaccacaaaaagatatcaacttcaccacatccacaagaaattcaggaaaattatctgaaaaatctagtttattatcattttcaaatttacaaggtattttaatattgattcatataaacatagcagaaccacaaattacgattgtccacgcagataaataaaagaagctgatcgtgaccattaaacatgaaagtaacacaaaataaaacataaatatctagtctagatagatagaacattcgtattttaataccgatcagatatctccattgttttgcctgtaaattttgacacctcttaatctttcaccttttgtggctagactccatcttcatatgttggttggtctctatctcaaaagtttgtaagattaaaaatgactctataatttatgaatgatgttaaacttctaatgatttttttttatatattagataaccaaacatatttttaagaccaattgaaatatgaaccataagattataagtgaaaacacaccatttctttcatcatacaataaattttactttgtcatagatatatgccatactattgaaaaacatagaatttagtacttatttatatgggtaaatataacaaataatattacattgtatatttttatagtaaatgacgcaatcttacatagaaatgtatatttctttcttgaatgtattgtgctcagttcgttactataatattaaactatggagtatataaacaaacatcgagcattgcccaccaaaaaataaaataaaacatcgagcataatttcttttatattcattttttggtagaattgtttctaatattatgaaactaggagttaaaatgaattttccttttagattaaaaaaaaagtttcacaaaaaaaaaaattaaaaaaaaaaatgaatcattagatctttattaaataaaacaaaacagaaatccatgtgtgagcatccaaacagatacacaaatatgtcttcccaatggtgtaaaaggcaaccaagaaacaaagtaacagtctaatagatagtattattggtttaagtggtgtagcaatcatagtggacgaagatttcttgaaccatcacattttttatatgtctatattgttagtatatgtgatgctaatgtagcctttctagatggaagctatggaataaagatgatgttttcagtgtaattggtccaagtattattggtttaagtggcagttgcttgcacatgctcgtgtggaccgtctgcacgtagcataatatttgttatgttatattctaatgttgaaaatccacgtaaaccgtcaaagagtaaataaactacgaatgtaaaaggacataaattagcatattagcatggatgatgcacaagcagttgctaattatgctcaacctggatcggtgaaagggagaaaataagtcgagtccagtaagaaaggcccaactaaatagaaaactgtgttttccaatagagcggaagaaaagccaagcctgctgagaatatttaactcgtgccaaaacagttaataggagttcaaaattattcagacaaatcaacgaaataaacactacgtctctctttctttttctgtttcgcaagagaagaataagtacaagaagaagaaatcgaagaaggaaaaaaaaaaagaatcgacatcaacgagaacaaaacaagtgaaagaagagacgagaaacgtaatgggccttttaagttaattaaatgttctgttgttggtttagacaaaacacacacaagataggccttaatgggccagaagaaattggcattaaaaagaagaacaagatagtgagtgtttagtccaaatttttaaataatcaaatatatagaacgataaatagatcatgttaacataattgatatttataatattaagttcattttatataaactatgagatggtttcatccatatattttaaaaatgttctaatggttaatttttaggttcctttactatgtgttattttaaaattaattactcataaatcataaaccaaaatagttttctgtttgaaactttctcaatttaaattacaatatttctatttttaatctcttattgacgtataaattcacttctctcataagtattaaaaaaaacaaaattaaattgttgggataattgttgtttttggtgagtttggataattgttttttagtaaaaataaatagtgaataaatatggtaaacatattaaatattgatacttcattaatcattatttaccaattcttatactgttatgaatttttattacatttgattggttgggctgtaagaaatttttaaagccactaaaaaagttacaaccccaaaatcgaaacaaacatgctttagctttcctattttttctcacagtccaaataatatatttttaattattttgtctgtaagttcatgtttttctaaagcacaattttatggtcttcacaaaggtctgtacctttttttctctttttttttcactttattttctcattttctttaaaaacattactataatttttatatatatattaaatttagttttatggatataaataataggcaaatatctactttatgacatatctataacttacattgtttttaatatatatatatatatatattaaatttatttgtaaattctattatataacacataagtacaatttaccaataatattttttgtttaaaaatacatacaaccataatcttatttctacaaccaatttttatcaagtaataatattaaattaataaaacctacagcctaatttgtacagcaataaaatctacaactacagtcatcacacatacaacaaaaattctacagttacagacgaactaatcacacacaagtgtatggttttataatatatattaaacaaaactcaaaatccaaaccaaactactgtatttaatttctatcatgtgtttttaacacaaatcgaaaaccaagcaaactattgtgtttaattctatatgttttaattatttttccaaaaattgttggatgcaaaactaaggatttaagctagtgtttattaaaaagaaaaattagaatgagaaaggcttcaaaactaaagttgggttgtcggttggaaacaagagttcaagagggtaaatcatagttgatagtactattatgaatgtcgctcttccgggattgcattcgcttacaaattattcgacgcatcgtcttggtcgaatatggatagtttgagatggagtggaagtttcggtaacactagctcacatgagtactcaaattattttctgttgggttaagtttcgaaatggagagatatttctagtatctttcgtctatgcatctaacttcatggaatgcaatggcttaagtggagagatcaaaactcgagttattttcaaaaagcagtatcggctagagcatcaagaaactcgattaaaagtttatcaaatgaagctggaaaagtcttgacagagttagaagacattaaaatagaggttgtggagtattgtaaaagaattatgcaagcgcaacctacatgactagtggagatatcatatgactacttatcagggttggtgaattttaaatattcccagactgctgctaaaaccttaatgcatccaattggtgttgacgagatggctatcctgctcagtttttaattgctgcttggtcgatcttggaaatgattttataatagcagtgcagtccttcttgatctttggatgcatgcccaaaagtgttaaatcaactattctgactcttgttcccaaaacagatggtgcacaaaatatgaaggagttcatactgatagcgtgatgcaatcttctatattaagtgatatataagataatagcaaaccggcttaaagttactttacaagaggcgatggaaccgaatcagagcacctttgtgaaggggaggctcttactagagaacatatttttagcaacaaaactagtcaaggactaccacaagcaatcactctcatctcgtttagcaattaagcttgatatctctaaagcgtttgacatagagcaatggccgtttattgctgctaggctacgtgtgatgggttatccatagctctttatacactagataaatatatgcatctctacgtcctcgttttgtttttttctctagctcttgtggtataaggaaaggatgctctctttcaccgtacttctatgttatcatcaacaatgttttgtcgactatgttaaacagagcagctgttatgaaagagattggttctcacccgttttgcaaggagataaagcttacacatcttagttttgctgatgatattatggtcttcatggatggtactcttggttctctctgcaacatcatgatagtggttgatgagtatgcccatatttcagtttttaacatcaatgtgtccaagtccacaatatttgatgcgggtcgagggaagatgactttggaaataggggccacatcagtagggttagtagtaagttctcttcccatttggtaccttgggctgcgctaaccacaaaagcaatgacgagacttgactacaaacctctacttgacaagataaggtctcgttttttaattggacaagcaagcacctctcacttgaggttgtctacaacttatgaactcagttatatgaagcatcttaattttctggtgttcagtcttcaggcttccaaaaaatgtttttagacattgaaaggaggtgtagttcattcctctagagtggatcatcgcttgatgcaactaaagcaaaagtgtcttgggaggaggtttgctactcaaaaaaggaagggggcttggggttccgcgtatgatggagatgtctttgatttatgcgttgagcctaatatggaggttatataccatgtcgggctctctatgggtggcatagataagtcattaccttctgcgccaagaatcattttgggatatcaaagcaacgtccttagggtcttcggttggacgtaagctgctcaagctttgcccacaagccattgagtttataagaatggaagtaaaagatggagttaagacacgatcctagtcggatacttggttgtcaatggggagtcttattgatcgtagttggagaaaggggaacatatgaattgggagtgcaccgagatgctacagttgcagaggttgtagcaagaggtcactggtcaatccgtcgtggtcagaaccaacatataagtttgattgtggaccagatcatagctaaagacccgtccgtacactcggctagtcaagatcatattctatggtggtatgcaccagacacatatgaagatgaattctcagctatgattacacggaaacaaattcttctttgtcgtccagagcaaccttgggcctgtacaatttggttttcataagttgtgtcgcggttcgcatttatagcttggcttgccgtaaaagattgcatgtcaacatgtgtaagagcaagagtgtgggggaggggatcatccgtgtctttttttgtagagaacccgaattttgataccggatcccgcaaactggatctcttatgtattccgaaggcccatcagtttccaagcccaagaaggatcatgttgcacaaaggaggtggtcaaatcttaacattaatttgtagtttaattcatggattaatgactatggtcaaaagaataaacttatcaatgaagtttatgaattgattgtgaaagttattttgtgaattaattctatagttaatgaccaaataatggcatattggaagaagaaaataggctattaaagataggtgaagactccaagaaaaatggggcttttacattttgaccacaaagcttaaacttaaacattcttattttctcattaatacacaaaagatttttttttctatttttatgtaagatctttacataaggaatactatactattttctatgtacaaattcttcgtacatttctatatactctcttatacttttactagctatgcgtatctgtcttgtacttttgtacttgagagtttaagcccacaaataatataaatacttgagtgtgtgaatccgacatccacattttggcactgtctgtggggtggaggcgaccatatccctttgacacataaagcggactatgagagagtccaccataagctaagggaattaagttgaaattccaccaaacaaccagttcggctcaagacatcaatatggtaattgaaaaaacgaggcagaccccgtttacctcgcaaattgcaaatttccaagtaaagattctcctaaggtcaaccgccctacatgtgaccaaaatgacaatctagagaaccacttagaggcattcaacatagagagcacgaatttgttgcagcaaaagaaggagattctcttttgaaaatatccaaaagctcggcaacgacaaatcggacgatgcatatctatctacctctttgcaagacatttttccgctgatttctggataccatcatattattcaacatatgctcatgatggcccaagagtcagcttcaaggagcccaacttttctttaaacggagttttcttagaagagttataatcaaacggatctatcatgaacagtggtttcgtggttcgagacttgagatccgttttgttttctttaggaggtaatgagattgcaaattgtgaaacattttctcgaacatgttctagatcccttgatttgtaaagtggtcaaagaagaaatagatttggctcttgaaaagcatctagcaaactgtgattcatcctttggaatagaaaacgaaacggatctcacgtctcgaaccacgaaaccactgttcatgatagagaaagtataaacggatctgcaagagccacaacatatccgaactcgtaaaacgcagatacaagccattacgtggtgaggtggtttccagatgactctcaaagaacctcgtgatgataaacctatccacgcgttgccccaggagtcagtttctcaaggagcccatccttgctttggacagaattgcctgtcaacaaaaatcatcaaatctctacaacaggtagaacatgtacgaaatcgtaaagtgcagattcaagccactttatgataaggtgattttccagcgacattcaaagaacctctgggagtaaaacctatccagacgttgccctgataatcagctttccaagtagcccaaatttgtttattggagttggatacggagagttatcatcaaatctttgcaacagatgtagtctgtagaaaattcccgaaatgcagatccgcctctatcaatcaagccaatgtcaagaagagttttacggtggaccagatataacctcaaagttaaactacaaccgcgtttcccaaagagtcaacttcctaaataacacgactttacttcaaacaaatatgtctgctaagaattatcgtcaaatctatgcaacaaatgcaatccgtacaaaattcaaaaaacacaggtccgtgcatgtcaaacgatcccacttcgggatgagtcccggcgaactacatggaaccacaagactatctacataccggcggaaagccccaagacttatctttccaacaaaaccaagcttgcatctggtgataagtctgcgtggaaatcctcattatatacgtgcaatcgcttcgttttggtgaaatctaagtgttgagtttgctcttcacaaaactagatttcatccctcgaggattttttcgagttccaactctcggaaaatgtattcatttatgtgaaatctaagtgttgagtccgctcttcacaagactaaatatcatcactcaaagatttttccaagttccaactcttggaaacatgtattcatttcggtgaaatctaagtgttgagtttctcttcacaaaactagatttcatcccccaaagatttttccgtgttccaactaatagaaaaatgtatctattccggtgaaatctaagtgttgagtacgctcttcacaagactagatatcatcactcaaagatttttccaatttccaactcttaaaagatgtattcatttcggtgaaatctaaatgttgacttcgctcttcacaaaactagatttcatccctcaaggatttttccgtgtttttcaattaaaaataaatatttatatcttacatgtgtataaatttggatcctttttatataatttttaaggaaataagacctaattgcttaaagaaatctaagtaaaaaatagtggaccctatacaaatgctcctttggcacactctctaagtcggctctggaagaagagaaacggtcaaaggcatgggactcacccacgtacgattacacacatggctcgtatgatagagaaaacggttggagaacgagtgatttccctttgctaccaagactcactaagcttgagacccccttttagagattgtttgctgtatttgctggacagccactgagattcttcctgcatgaatttgttgttgtaataggcttgtcctacgacaaattttctgaggagtaagacccaaaagatgatccaatttatgttgatggaaagaagtgttattggaacgagataatctacctccatgactatcctccattagaaaaaattaactcagttaaaacaattatttttgcttcctcatatttacgccctataaaatgaccttaaggtatttgtatttttaacatgtttctatacatcccgtcttatttactaatattagctttggacaaatgccagtggatccgctaataattactgatgataatgtagaccaaagttgagcacagtgggatgatggggtgaaagacatgaaagtttcatatatgtttgagttgataatgaaatctcatcaattcaaaaaagtgaatggccaggaggtgatgacacattaccattcatctcaatctcaaagaagaagctttctattgttcacaaaaggcacattgtcgattgtaagaagaaacaactgaaaaagaaatcaaatacaagtcaactatgggtgtagtctaagcttcccaaaccaaagcattggtattcgactcatacaaagtcagaactcaagctacctgatgatgagaagtccagtctcctcgttgaactataaaacaaggtggcaaagctatcaaagcgtgtaatgactgtgtacaagtcgaatacctatgctttgatttgtattttacgctctagaaaacactcttctagatttgctgaatgttcttctagatcaaggcgaatgctgctgcgtgaagtaaaatacagaagccacgatctccacagactccattgttttttttgtaggaatgaataaaaactttgtattcaataaaaaaagggttttcactttgaggttgattttttgtaattacatctcttgggcaatgctttgatcctttttcttaattggttgattttgtgtacacaaacttcattgttgctctcatacatactcaacatgattttcactaattctaaatcacctaccaaatccaaacgctctcatgttctattttgcaaggaaagagagaaagaaagttaagatgaagagagagagagagagagaaagagagagagagagagagagagagagagagagagagagagagagagagaagccgacgaagaagggaaaaagtgtatgtaatcttatcgatcagatattaactaccacttccatccaacgactcatcatatgccaacatatttgttcttttttaactcacaacaaactaaactcaaacgctggttatcttccttccttattattcagtggcaaattggtcacaatttcactcaaagagttggaaaagtgtcctcttcctcagacgtgtcccaaacatataaactttcctttaagtgcctctttgtgcaactcacccttattaaaatgaaatgataaacaattacacaccaacacattatagacacaaaagacctaaagtatctacactcatgacatgagcaactcactcggaacagagtcatatatatgaaaacctaatggcaaagaaaaagcaaatttggctaaccagtatgcgagacagttagtctgtcgacacatgatccattcagactatcaaattctttgatatgaagtcatgacataagcataccgagaatgacatcgaatgagaatcacaaaggttatggttggcaaggaacattacactccaaaaaaacatgtgatattccaacatatgtttccaataatcgtattttgttgaaactatctaaccgatatcctctaaaattgcattaaatattttgtttattgaaaatttattgcaaatttccaattaattttgataatggtaaatttatcacaaacgtagtaggaatattgttggaatttgccaacaaatatgatatttttgaaaattagcaataatttttaggttgttggaaattattaacaaaatatttgttagactaattctaacaatttgatgacaaaatatttgttgaaaagtggaaaaaaacaaaaaataaacaaaaacagggaaaatttagttagcatatatatgtacatatcaaaaaaaataaaaaaaaataatacacaaatcaaaaagaaaatggaatagaagaaaaggaaaaaaaaaagaaggaaaatattctaagttaaatatgattcatcgtcttctccttttatcttttttttttttttatgtgaagctttactttctctaaatcagaggaaaaattgaaaactgttttcaacgacaataccaaaaaacaaaaatcgtgagtggatggataattatacagatgaaggtaccagaaaattaacaaaggaatataaagaggtcttgttgactttatgtgttttgctgcaaatgatgagattccattggagtgtggtaagatgtattgtcctagacaagattatcaatacttcttgtgctaattcacattcagagttaagtcgtccttggaatttggaaaccatcttgtcaatgaccatgggaaggtagctcttaggttgagtagatgttcggtaagccaagcgtgcatctcgtagattttgtctcgccattttgatggaggaatttcgtcaagagagaaaccattatgtggttcggcattaaatcttggattccaatctagcggaggcttacgagattcttacctttcttcatagattctgccatcatcgctctccatgtccttttcttctacagttggttcggccatcatgaaatgcgggattaagacctcttcggctggttcatcctttatattttcagacattgttgtcgtggtttgccgcttaggatttctttcttgataagcaaccttctcaaggaaagtagtgattgggttggcatgttccaccataaattgtttgtcatttctttcgggtggagtttgaggctttgaggtgcttgggatatgttctttttctttgcccgttgattgcttcctttttatggcttgtctttctatagcaaccctttttggtaaaaaggaggatgaaccaaaaatacttggatcttgagaaaaagataaaggttgtgtttgaactgcataaggcgaagtataaatggggtaaagtgtgaaaagatcatattgtattggctggttttttggctagttttgtatggaatttaactgggctcttagggattttagttctgattctttttgggacatgaggggtgaatttatgaaaactgtattggctagatgaaggagttctttgtgtagagaggaaatttgtttggtaatgtctttgatataaaggtctatgatggatacctttttattaatttggctcaagagatagttccggctgctgcgttctctcattgccaatttagtgttgtttctgctattctaacttgttttatcgacccatctagatttttttgtgttcggatttcttatcttccatgagtgtttgatattgttttcttcaaagtcttgtgatgggaatgatggtcctaaacttggtgggggaccaaacatgtagctcaaccggatatcttatatatctggggttgtgggagtcgagttgcttggataccagacataatattcaaaatttcttccgcttggttctctgagtaaaccgtctgcgggtctccggactcatatcgttctttgagaatttgctgggaagattttttttttcttcgtcttggtgtttcgtcttcgtcagaactattcattaagcatttttcacaatcacaaatatcgaagaatttgtgacctgtctcataagcgaacgagtagacgggatctccgagtgaataaaaaaattctattggaatgccgggtagatgctttgctaactccttttgttctttttggttgttatcaattggagagattgtattgatttccgtatagaaagctgcaggtcttggcttttcttcttgttgtttaaaagcaatttccatcgctccatcttttcttctatgaatagaggaatccattgattgaattagggtacttctatcatggagtttttcgtaatttgtcacccatgactctggaaatagtttgaccagttcatctctaggtatttgtcttaggatgtggacgcatgatggactgtgttgtgactccagttggacaagtagggcatcttctgtgtctcttggtagacttagatccataacatgattttggactcgatacgccacctcgtggtgaagtgttgttgcataagtatttccaatttgtggggcacccgtgatttgtatgttgatttgcatgttctgatatttctggggatcttctagtaccacaataaagtttggaaataatgtaaaaaatattgttccagcgtttaaggttgtttggattgttgcgatgcatgcatgttgatattctttgtatctggtgtcgagaagggcgacccttgccacaacacgtagacctttccgtccatgaagagttagtgctagtcgtattgctccatagtaaagatgggtgtaaccatggactctccattgatgcaacattccttcattgagtcggaggggaatcatttgttctgtcttaattgccggattaagatgttgttctagttgagaggctagaagaatttcttttgccgcatgtttcttaggaccgaatccatgccttatgaattttgggaaagtggagtttggttttgtgaaggctttgtagggcttgagtaaagggagttgggtaatagggactttgctctcacatattctacttcacatagataatttacgttactagcattggattttctgaaagaagaggatgatataaaagaagatgtactttccatagtgtatgtggaagtcagaaaccataacaaaatactttgcttcttatctctcttgaagtaataacaaaccttgaattgtttttcttattataaataagtgctaagattaagaaattaatcaagaggtacttagctacgcaaactaaggcaaaacacttatcaaccttaaaagtctcaaggtacttcgagctctaagacctcattgatttctttttttatgttctctttttcttgctaaaacggatttctgatgtagaggatccattaatatggcaaccatagagcatactttccataatagcatatggtagaaaacagttataagatgtatcacgacttgagaagttaagagccaaagtttagactgccatagctctgataccaaaattacaaacacatagtaggtacaatcatgaaggaggttttataagatcgagatatataaactagtatatgaaagggatgaagtgtttatggaagagattagagtgggataagtatttttacaagagaaagcttttattatacaagaacactctcaagagaatacaaaggactcttaggattttagacactcacgcttgtgttcaactctcttcaccaagcttggtatctatagtaaatggcttaaggaatattacaaagcatattcctttcacacatatttacacacatactacacactatacatcaagtcttcacaccacatattttacatcatatcttcacaccacacatttcacatcaatgttttatttcacatcaatacttcatttcatactttcacttcatgtctttatttatattacatcaattcttcatttcacttcatactttatttaaattacaaacaaatagtaggtacaaccacgtaggatgttttataggatcgagatatataaactactatatgaaagggattaagtgtttatgaaagagtctagagtgagataagtatttttataagagagagcttttattatacaagaacactctcaagagaatacaatggaatcttaggattttagacactcaaacttgtgttcaactctcttcacctagcttactatttatagtaaatagcttaaggaatattacaaagcaattcttttcacacatacttacacacataccacacactttacatcaagtcttcacaccatatattttacatcatatcttcacaccacacatttcacatcaatgctatatttcacatcaatacttcatttcatactttcacttcatctctgttatgattatgatccaattccggtttaatgttggtctagtgatattcggtttagcagcagattggagttggttattgaagcggttagctttggtttacagaagaaggaagtttgattggaagactctcattcagaaagaggcttcgagactcgaagtcaaacacatataaatagaagtctgttatcttcttcttcttcattccgttagaaaagtgttgacgatctctcttaaacccagaaaattagggttcttagttgatcttgtattgagctcagagaagcttgtaaacatctcatatagtggattgccggatctatctggccccagacgtagatctaatcacaccgattagattgaactaggtaacaaattcttgtgtgttgttctctgtttcttctttgattcacacaaacaaacttcaattgagagtttgagagcaaacagagtgaggctcgtgttcgtattgggatctgttttacaacaagtggtatcagagcgaggcttactcgtttcttgattctgatcgatggcgacgactacaactagagttgagataaaggtgtttaatggcgatcgagatttctcgctatggaagatccgtatccaagcacaacttggtgttttgggattaaaagatactctcactgatttctctttaacgaagacagttccgcttaccaaaagtgaagcaaaacaagaatcaggtgatggagaatcttcaggtactaaagaagtaccagatcctgtgaagatcgaacaatcggaacaagcaaagaacatcatcatcaatcatatctctgatgtagtactattgaaggtaaatcattatgctacaactgcagatctctgggctactctgaacaagaagtacatggagacttcattacctaatcggatttacacgcaattgaaattgtactcgttcaagatggttagcacgatgactattgatcagaacgttgatgagttcttgaggattgtggctgaattaggcagcttagagattcaagtggatgaggaagttcaagccatattgatcttgaattcgttaccagcgagtcatattcagcttaaacacacgctgaaatatggaaacaagactcttacggttcaagatgttacatcctcggctaagtctctggaaagagagctggcagaagcagttgacttagacaaaggacaagcagctgtgttgtatactacagagaggggaagacctcttgtgagaaacaatcagaaaggaggtcaaggtaaagggcgtagtcgctctaactcaaaaacaaaggtgccttgctggtattgcaagaaagaaggacatgtgaaaaaagactgttactctcgcaagaaaaagatggaatcagaaggtcagggtgaggctggtgttatcacagagaagctagtgttttctgaagcattgagtgtcaatgaacagatggtaaaagatttgtggatacttgactctggatgcacttcacatatgacttcaaggcgagactggttcattagtttccaagaaaaaggaaacactacaatccttcttggtgatgaccattctgtggaatctcagggtcaaggaacaatcaggatagatacacatgggggtactatcaaaatcctagagaatgtgaaatatgtccctcacctcagaaggaatttaatttccacaggcactcttgacaagctagggtacagacatgaaggtggtgaagggaaggtcagatatttcaagaataataagacagctctgcgtggaagtctgtcaaatggattgtatgttctggatggaagcacagtaatgtcagaactgtgtaatgctgagactgataaggtgaaaactgccctgtggcatagcagacttggacatatgagtatgaataacctgaaagtgttagcaggaaaaggacttattgacagaaaagaaataaatgagttggagttttgcgaacattgtgttatgggaaagtccaagaaggtcagttttaatgtggggaagcatacatcagaggatgcactgagctatgtgcatgcggatctctggggctctccaaatgtaaccccatcgatctcagggaaacaatatttcttgtccatcatcgatgataaaacaagaaaggtatggctgtatttccttaagtctaaagatgagacttttgataagttttgtgagtggaaaagcctagttgagaatcaggttaacaagaaagtgaagtgtctgagaacagacaatggtttagagttctgtaactctaggtttgattcttactgtaaagaacatggcattgagagacacaggacctgcacatacactcctcagcaaaatggagtagcagaaagaatgaataggactattatggaaaaagtaaggtgtttgttgaataagtcaggagtagaagaggtcttctgggctgaagcagctgccactgcagcatacttgataaatagatctcctgcctctgctattaaccacaatgtaccagaagagatgtggcttaataggaaacccggttacaagcacctcaggaaatttggatccattgcctatgtacatcaggatcagggaaaattgaaaccaagagctctaaaaggtttcttcctgggatatcctgcaggaaccaaaggctacaaggtttggttacttgaagaagaaaaatgtgtcatcagcagaaatgttgtgtttcaggaatcagtggtctacagagaccttaaagtaaaagaagatgacactgacaatctgaatcagaaagagactacatcgtcagaagttgagcagaataagtttgcagaggctagcgggtcaggtggagttattcaacttcagagtgacagtgagccgattacagaaggtgaacagagttctgattcagaagaagaggtggagtactctgagaaaacgcaggagactcccaaaaggacaggactgactacatataagcttgcaagggatagagtcaggagaaatatcaaccctccgactagattcacagaagaaagcagtgtgacatttgcattggttgttgtggaaaactgcattgtacaggaaccacaaagttatcaagaagctatggagagtcaggactgtgaaaaatgggacatggctacacatgatgaaatggattcattaatgaaaaatggaacctgggatcttgtggacaagcctaaagacagaaagattattggatgcaggtggctgtttaaattgaagtctggaattcctggtgtggaaccaacaaggtttaaggcacgtttggtagccaaaggctatactcaaagagaaggagtggactatcaggagatatttgcacctgtggttaaacatgtttcgataagaattctaatgtctttggtggttgataaggacttagaactcgaacaaatggatgttaagacgacgttcttgcatggtgacttggaagaagagttgtacatggagcaacctgaaggctttgtgtcagattcaagtgagaataaagtttgcaggctcaagaaatccttgtacggattaaagcaatctcctcggcagtggaacaagagatttgatcgttttatgtcaagtcaacagttcatcaggagtgaacatgatgcatgcgtctatgtcaagcatgtaagtgaacatgatttcatctacttactgctttatgttgatgatatgcttattgctggagctagcaaggctgagattaacagggttaaagaacagttaagtactgagtttgaaatgaaggatatgggaggtgctagtcggattcttggtattgacatttacagagacagaaaaggtggagttttgaagctgtctcaggaaatctacattagaaaggtactggacagatttaatatgagtggagctaaaatgactaacgcaccagttggtgctcatttcaagttagctgcagtaagggaggaagatgagtgtgttgacactgatgtagtcccatactcaagtgcagtggggagtatcatgtacgcgatgcttggtactcgtcctgatttagcttatgctatttgtctgatcagcagatacatgagcaaacctggtagtatgcactgggaagcagttaaatgggttatgaggtatttgaagggagctcaagacctgaacttggtctttacaaaagaaaaagacttcactgtaacaggatactgtgattctaattatgcagcagacctagacagaaggagatccataagtggatatgttttcactattggtggcaatacagtgagctggaaggcgagtctgcagccggtggtagctatgtctactacagaagcagagtacattgcactagcggaagctgctaaagaagcaatgtggattaaaggactgttacaagacatgggaatgcagcaggataaggtaaaaatctggtgtgattcacagtctgcaatttgtttgtctaagaacagtgtttatcacgaacggactaagcacatagatgtgaggttcaattacatcagagatgttgtagagtctggtgatgtggatgtgttgaagattcacacgtcgagaaatcctgtagatgcattaaccaagtgcattcctgtgaacaagttcaagtcagctttaggtgttctgaagctgatgaagtgggactgagtttgctcagctcaagccagaggtaaagtccaagtaagtgcagttcatgatattgagatgggaatgggatcaaggtggagattgttatgattatgatccaattcgggtttaatgttggtctggtgatatttggtttagcagcagattggagttggttattgaagcggttagctttggtttacagaagaaggaagtttgattggaagactctcattcagaaagaggcttcgagactcgaagtcaaacacatataaatagaagtctgttatcttcttcttcttcattccgttagaaagttgttgacaatttctcttaaacccagaaaattagggttctttgttgatcttgtattgagctcagagaagcttgtaaagatctcatatagtagattgccggatctatctggcccttgacgtagatctatcacatcgattagattgaactgggtaacaaattcttgtgtgttgttctctgtttttcgttctctgtttcttctttgattcacacaaacaaacttcaattgagagattgagagcaaacagagtgaggctcgtgttcgtattgggatctgttttacaacaatctctttatatattttacatcaattcttcatttcacttcatactttatttaaattacaaacacatagtacaaccacgtatgatgttttataggatcaaaatatataaattagtatatgaaagagattaagtgtttatggaagagactagagtgggataaatatttttataagacaaagcttttattatacaagaacactctcaagagaatacaaaggactcttaggattttagacactcaagcttttgttcaactctcttcaccaaacttggtatttatagtaaatagcttaaaaaatattacaaagcatattcctttcacacatatctacccacacactacacactttaaatcaaatcttcataccacatattttacatcatatcttcacacaacacatttcacatcaatgctttatttcacattaatacttcacttcatacttacatttcatgtctttatttatttcatatcaattctgcattacacatcataatttgtttatccatgtttccaaaagagaggtaatgtccaccatagtcgttgtcgtcttcttcactgtcagaggcttcaaccgtcacatagatgttttgtccgagatgcattttttgaatttgtacctttttccattgactttgtagataggatgatgtggatgagagtgtggccacgcttattgatcatgaaagcctgctagtactttttgtattttgtcctcaactcctaatggaaacacgtctctattatgccaatgtgccgtatatggacaaaaaagctttatgtcaaggtgtgacacatctaacccattcaatgctgctataacttctgctctttggtgaaagtcgttttcgctaatgtcatcattattgtaactagtcgtgacatgtgcttcatatatcttctttattgtgactccattcttttcttggttttggattgtagtatcttgaaagtgactaggatgatcagctctggttgtgcacgaatctgttcttgccaccacgtcacattgttaaacaatgtcagccacttgtatagtagcatgtaatgaggacttcttctggtcaagatgcacttcgccaagtattgaagcagatcctttttgtgaacaaggacaccaatagtgtaaaggtgtgccaaataccagaacactagatatgcttttattgaaaatcttctatagtgaaccggattcaggtttatggtggtgagaaatggatacatcgggtcataagataaaccaaggagtggtccttgatcaagaccattatccagcatcctctcccgtaagccttgtggcattcttgcgatcatgcttcttaaaaacctattatccatttggcgccgttgccaattgggtgtttgtttgttacatttgagatttcacacttgcttagatcaagttctttttcaattttcaattcagttactaactgtgtgtttttcttgttgtcttcttgatccaggtacaactctgctgcatgcaaactcgatcaacagacaaccagaacctcctcttcaacgacaacttcgaccgcgtaactcgcgaactcagagaaaggagaaacacagtcaaccttttaccctaacaaccactcgaaatggttgacgaacaaaatcaatagaatggccctgccaacattggtgctgaagatgcaccacgagatcaccgtcagaggaaagatattgcacctccttctatccagaataacaacttcaagattaagagtggtctcatctcgatgactcatgggaacaaattccatggtctgccaatggaagattccctcgaccaccttgatgaattcgataggctttacaacctaacaaaaattaatggtgtcagtgaagacggatttaagttccgtttgtttccattctccttgggcgacaaagcacacatctgagagaagaatctaccacatgactcaatcaccacctgggatgattgcaagaaggcttttctagcaaagttcttctccaacgccagaactgcaagactcagaaatgagatttctggcttttcacagaagactggtgaaagcttctgtgaagcatgggagcgtttcaagggttacaccaaccaatgccctcatcatggcttcaagaaagcctctctgctcagcattctttacagaagagttttaccacgcatccaaatgcttctagataccgccagcatgggaatttccagaacaaagatgttgaagaaggctgggaattggttgagaatcttgctcaatcatatggtaattacaacgaagactgcgacaggaccatcagaggcacagctgattttgatgacaaacacaggaaggagatcaaagcgctgaatgacaagctggacatgattcttcttagccagcagaagcatgtgcacttccttgttgatgacgagcaatatcaggtccaagatggggaggggaaccagttagaggaagttagctacatcaacaatcaaggattcaaggtggctacaaaggatacaacaatttcaagactaacaaccccaaccaatcttaccgcaacaccaacgttgcaaatccacaggatcaagtgtatcctccacatcaccaacaaggtcagaacaaaccttttgttccctacaatcaaggttttgttcccaagcagcaatccgcatctacttctgctcccaaagttacgggacttccagggaagtcaattcagaatcccaaggagtatgctaatgttcatgttatcaccataatgagtagaagagagttatccactagagagagacccaagtcagtcactaaggacagcgcataccaagatggggaggatttcagtctcaatgaagatcaagttgacaaaccaactgaagtacttgagcccatactcgaccttgatactcgaccaacaaatccattaacatcatccgctgctctaaaactagttgctgctaaaaacagtgagacatcattcattcctcctcacaagcccccacttccatttcctggtcgacacaagaaagagttagaagataagtacagtgctatgtttgccaagaacatcaaggaagtcgaattaaggatacctcttgctgatgctctcacgcgtatcccggattcccaaaagttcctcaaagacttgatcatggagacaattcaagaggttcagaaaacaatagttctgagccatgagtgcagtgccatcatacaggagaacgatgtctcagaaaagctaggagaccctggttcattcactctaccatgctccataggttcattgactttcaataaatgcctttgtgacctaggagcatcagtaagtctaatgccactctcagtagctaagaggttaggtttcaacaaatataaatattgcaatatctccttgatcttggctgatgggtctgttagacaacctcatgggttattagaagatttccctatcaagattggaaatgtggaggtgcctatagacttcatagtgttgaacatggatgaagaacgaaaagatcccttgatcttaggaaggccctttttggctacagctggagcaatcatagatgttaagcaaggaaagattgatcttaatatggggaaggaatttaaaatgaagtttgacatcaatgatgctatgaagaagctgacaatagaaggacagaccttcttagttgaggaaatggatcggctagttgattaactgctcgtggaacttgaagaagcaaataactcaaaaactattttgaccaagagtggtaaagctgggtatctccctagtgaaactttgagttctgagaagtcattagactcacacaagtcagtagttggctcaaaggtttacaagggcttgctggggtctgacacaaaggttatgaaagctaatgaagtaagttcaacacatgctcgaccaactgattccaccaacaactcgaagaagcctccaacttgccttgaaagctcatgctcgaccaaacaactcaaggcaaacactcagacgtcagatgattggttagaactcaaggagagatctaaatggcaggacaaagccatacaagagctaacacatattgtgaaagagctgaaggatcaaatcaaggagctcaatggaaaagccaaccaagtaccacttaacatcaaggacgcccctgacgatggagctactattcttgtcagcaaagaaggatgtgaattcacatcaaaatggtctagaggagaaggttatcttgataaaaaagaagcttactgtgaggacatggccactgagtacccaattgtagacctatcaagaaaccttaatgagtatgatgatcactctactcaagaaggagaggagacctcatttcctctcttcaacccaccctaagcctaatgagtatgagaagtcaagcttagagacttaaaacaagctcacttgggaggaattcccatgtctatctatgtacatatctttatttttccttgttgtttttgatgcatttggttagtgtcttcaggagataagtataaagagctgagtgaagtggattctaggtctgagggtacagtagtatactcgaccacagagcaatgaaaactacttgaccatgttttagcttacccacgccaggagatcccttgaccgcggtgctggatgcagcagaagaatggaagtcgagtatactcatggcggtgctggtcgccacaaaggcaatgaggtacagtacccacatgctggagctgagacagaacagggcgactcttcaatggcctgggagcaatcacaggcagccattgacgaccaactccgttcattctttgactgaggtaagcgcctcacttcaccattgtactataccatctcttgtttatattttgtttctgtgatttgacttgtcctgagtactctcttccaagtttagtcacacagtggactatgtgatttaagtttgggggagggctcaggaagtgtgtgctacattgtatatactcttgagttgagtctgcattcatttaaggcatagaaaaaaccaaaaaaattgaaaattttcagaaaatgatttcacaaaaacagagtgttcatgtagttgcattacatttaggatcgagtctagagttttcatttaggattgttgcatatgcataggggacaatgcggagataaccttgtaagcatgatgattcactaaatgagttattagttctctgatgcatttgaatgactttgaagtaaaaccgcaccatgttctatagaaaccactcattgcatgtcatgacacctttccctgtcaatttgaacttgaatctgacttataattatcatgtttgcatcggttttgaactcatggatagaatatatatttggattttctttcacttattcaccactcttgctaatccaagtagctgcttctattattggagtagttcccccacccttaaccaacccttctttcaagccatgttatttgtgagagcatgtgaggcctattttcaggactgagcttggtagaacgtgttaggtttgagccgacaagagtagtatcccatgtacttccaatccgcgttttcggacttggtaggactaggtgggaacttatttgggaattgagattgaatgtgaaaagaaaagaaagtaaacgagttagaatctttaggagaaggaagctaaaaatcatattgaggtctagtgaatgtttgggaagcatagaattgataagatatactctaaaaaaaaaaatggcaacaaaaacagaaaagaaaagaaaaaaaaaatcataagagccattagagtttaagaaaaactcaattcactagactagactcatagagtttaagaaaaacttctccttaagaggaagagccaaagaaatgaaaggaaatgttttgatccaagaaaaaattgaaatatgcctttagtgcaaaaaggtagacttaggatcatcattgggtttagagataggaccatctacttgttattcacggtttatgtcattgggtagatggggtgctattcttgtatgcataggttggcacttacctttagcattcttctaaagctcagtcatttttcattgagagtcccatgttattaaagtctgaaccatcttaaagggaccatctttgtctcataacccgtctttagccaaatgagttcactagcgatgcatatcttgattcatgttcttgaacttaatgaatgttaaagtgattggttgatcttgacgtattgtgcaattgagtgtgaatttggatcataacagagcatggctaaagtttttaagtagaagtcgatcacctcgcattttagaactgttagcttataaatttatcttaattgtcatgtctcatgctttggttcggagtccccactttcaaacctcacctccagcttgttcttaattgtttgcttgagggcaagcaaatactaagtttgggggagttgataagtgtgcattttacacgttttgagcatccatttgtcatcactttaacatcatatcaccactgttttataccatttctcttcatttgtcatcactttgcatgcttaggatagttttgcatgcatattgcgtatttgtgttgtttttaggtgattttgagctgctaatgagctaattggaagaagtggacctgatcaaatcaacatactcgaccacgagctcgagtacagtcatcctggagttcctgaagtactcggccacaacctctacaacaattcactcgaccaatcactctaccaaaaggtagagtatcaccatcatcattcactcgaccaatcactctatcaacatggccgtgtcccaccatcatcactcgactaatcactctaccaacatgaccgagtatcaccatcatcattcactcgactaatcactctaccaacatgaccgagtatcaccatcatcattcactcgaccaatcactctaccaaaaggtcgagtatcaccaccatcattcactcgaccaatcactctaccaacgtggccaagtatcaccatcatcatccactcgacagaatactcgactgctagcttcagagtcttctccattctgcactcaaccagagtctcgggcacaaggaagagtagaagactccagcttatcactcgaccaatcactcgaccacatgggtcgagtgccgttcttaatccgtcccaatactgtgtcgttttgagtactagggtttcagaatatttcgctataaatagcatgtatttttattctcgtttttatctagtttttattccgcagataatgtgttcttgaccttttgtaatcgggatttctcttaatctattcattattcaacattttcttttgatttcgtttactggtgttcatcttgttatcatcttgtgctattactctgttgttatcatgttttcattctattcaacgtttatgttttctcctatgatgtctgagtagtgaataggtttatgaggatgggttatagtagtttagaattctcagtatgctaggtggttgagtttgatttatagatcccttctggattagttgttcttaatgcctattgctttctgatcaactggaatttgaacccagacatttccgcgcccaaatggtgttcgatgaaatgtctaaactagtaccaaggtattggttacaaggagcgttttggctttaacttgttgattcgtaatgcctgttaggctagctctcgtcaatggtgattgagtctgggactagtttaacttgaggatctctattgcggtggcacttagatttggttaccgaacttattgtctagggataatttattgagcatgttgtttactgcatcttgtcacctgttgcttagtttctacaattctttcctgttactcgacccgatactcgaccacccagttgtctggcaacaaactctacagtcgagtatctttgttttattgactacttgttactcgaccagtcactcgaccacacccagtgctttacgacgagctgtgttggtcgagtgtctttttgtttctgcttgattttcggttttctacatgttcatttaggactgctagaaacaccaaaacctgttattgcttggcttgactctgtgaactctgattgcatcttgattgttagcatcacacccatttggattgacaaccttcaatactagaacgacatgatagtgctttacgattaattgatcttaaaaacctattatcagggttctccgaactgagagtacaaatcatcaggacaatggttgagatttttcgttgccttcttcataggaagtcaaggaggaagttgtattttcctttgatatgtttcacatcaaacttccattgtgaaaaccaactcgcccacctaagtagttgtgcttatgggtcatttttggaaatgatgacatgtccatctcaatacggaagtgatggctcaccatgagaaactcagtttttttaatacctctttttactgcgagtatctccttgtaagtggaatggtagtgttttcactatctttgaagactccactcttgtaaccacatatatgcctttttcctttttcatcttcttccaagaggactgctctccagtaagaatcacttgcatctgtctgcagaatttgttttcttctggatggaatcttcaaggctagcaaggtcttggaaattgtttttaattttttgactgcttctatgtatttttgatcccatggaggagcgtttttcttgagttgagctgagagtatggatctgtgttcgccagagcatggaggaattctgacatttagttgacaatgccgaagaattgctgaacttgcttgaaagagagttcttcatcagggaactcgtcgagctgcgttgcaatatgaggctgaaaatagtattcttctttagaaatatgcattccaagaaaatctatctcagggaaggtgcaatctttaatccaaacggcatgactttccaatggtaatgtcggtcttgtatgcaaaaccccgtctttggtctatcttctggtttgattccaagttgccaaaatcctgcttttaagtcaaatttcgagaagacttgtgcttgggggagcctctggaatagaaattctcactttggtagaggaaacttgtcgtttgaaggaaatgattgagcggctggtagtagataactaacctcagttttcctcgtacttgttcggctcttttgttaacatagaaggcttcgcatgcccatggggaggtggttttctcactaaggtcttctctttggagttagtcgacttcttcgagagtaaaattataacggtctggattcattcctggatggcttgcttttgttggatagatatcctcattcttcttgaagggtaatgatatgaagaagtccaggttcttccataaaggtgatgaacatttggtgaggaactctgaatgtgtgtagcacaagaagtattgataatcccgtctttgatggggttaatatctccatgggatagagatgggagatagtagtccatggtagcagttggttcttgtgcttaagtccctttggatgccaagatactctcttaaagctatgaagtacatcaaatccaagtatgaaatattttccagggagttcggactcatatactttggctttgatcatgtatccttaaaagagttggatgtaagtgggcttgctgactaaggagatgtggaagatctggccatttgctgccttgaaagctactgaataggaattccaatgagaggctggaagtatgtctggcttgatgatatatgatgctgctccagtgtcgagataagcaatgacttggatgagcttgtcatatttgttgggaaagatgtaacttttggcgtttgctgatggttgagatatatacgtcagttcttctttctgcggttgttcgactctacaagcatcaaatgtgtagaggtcgaataacatgaattgatcatctgtatcttctttttcttcttcagtgcttgattaatatgaagtcttctttttgtttgatatccattgctagaactatatcatcggttggttcatcatcaagggagaagattgattcaatgtcggagtcatcaatatcttctatctatgctaagtatccaagaagattatctcttttttcttatttgggcattgttttgcatagtgacctttttcttgcagatgtaatacctgtctgatttcttgaaatctctttgtgactttttcctgaagaatttccacttctttttgctagacagatgaggatacttcttctgccattttttcttgaattttttttctttctgataatttgttgaacatccacacttcttctctttgcattttatagagaaatctgaacgatcacatgctctccttagtagttttccttcctcatgcatctgcttgaagaacttctggtgattgcatagcttttctagtgtcgcaagagacatctggaatatttctcctaatgaggcttgagcaactgttgcatttttgaaggataacaaccgtgaagttttatttccaagtggctctggtaatgaattcaaatacgtctgtttgagattgacatcgtctatactgtttaaagcgtagaatctttttaacatcctctcataatgtttttctagatcctttcttttgaaagagcaacacttcatgttgaggtattcttctcttgcttgaatggtgtagtgatcccatgttctctaagaaattcattgtggatgtgtccaatcaatgcatcaatcgaaggagtttgacattcttcttatggtaatgagaaacttattttagtagataatatttggaagcatttttatagaagaggatttgcgcctggatattacatatgatttttacatggggaagattttcaaacttagtactaaccaaaacaatggagatgctgaaaattgtgaattggaacttggaaataataatagtactgataaggaagagaatacaactagagattcaaccggtgtaatacagatggtaatagatgcttttcgcgaaaagactgaaagtggaactggagaacaaaacttagatgcgaaaaagttttttgatatgttagatgcagcgaagaaactaatttatgatggttgttgatatgttgcatttttagtgtcttaggtccctttgttttgagtcatttatcatgtcgtagtccgtcttttgcgtttttttcgttgtgtcttgagtcttttgcaggttttagatacttctgacaggattggatggtttgaacttgctcaggtcgagagagggtgagaaaatctcaagtggggagaaaacggtgtagaccgattggtcctgataggactgatcggtctatgcctcgtcgattgggcagagacggttggaccaatcggtccagcactaaatcgatcggtccgtgcttcaacagacggccagagacggttggaccgatcggtttgataacatgacgcaagatttcagttttccttaactggatttatcttatattttctgtaattgggtataaaaactccagagacctaattttctatttacgcttctttttctaaaactttttgagagcgtttttatgtaaacaacttttggagaaggatccatcctctttgacactttggaaaatatttctaatcccttttcttttatattccattaatctattatatcttcttcaactctttgtgttgtttattttcctatgagagagtagtctcttaattggattttaaggttctaagtaggagattaaatgaattcatggtttgattgttgtttggagttttttatcttgaagttctttgattcacatgttcttaatgctagaataggattgatcaccctattttagagtctaggtttttctatgcatcaaaagtgtacgatagaacatttgaaccaatgcgaattgagcattgtatttctagccaacgagagttgacgttagaatgaatcgtgaacctaatgaacctaattctaatgcgaatttgactagaaaattacaaatgacaatttagtagtcaagtaatcaaatttagtgattaatgtcttaagagggaattagtcttaacttgtgttcatgttcgagaacggctctttatgttaaatttcctgtctaatattttcattaatcattgatctccaaaatatcctatggcccaatgctttttatcatataagtttaatcgtttatttttttataatttaatctacaattctgaaaataaaacaaacaacctctttagttttagttaagaacgagtcttggaaatccttagagtatctttgatccttgtggatcgacctcgaatatactacctagcggttaagtatattgagtaattactcgagcaatcaagttggcgtcattgtcggggaccaattgtgttacctaaggatttaggattagtttctaatctaaaatatttttatttactgttactgattatcattttcgccttttctttatatttttcaggtgtatgatttctgtagccaagactcatcacatctagcagactaccataaggatggatatcagaaagtttaaaagagagaaaaagaaaaagaagcagttagctgagtagagagaagctgaaatgtctgattgtattgctgcaagaaatattttgagtgatgatggactccaatttgctggagaacatcatggagagtttcaggatccaccacctcttggaaccattaatcctcctgttgctactgaaaacgttgcccgtgtagctgttgctaatgttgcttctttagctgcgttaaatgctaggcatgcgcctcgacaaactcagagggattataatgctcccaatgttgagcttttatgagatatgaaccaacaactccctatcaataggaatgattttgagatgaaaattgggttgttgtctcttgtgaatctgagaatctggtctaccatttggataattttgaggatatatgtgggacgacgaaattgaatagagtgccaaatgttctaatcaaccgtaaattgttctcattctccttggcagacaaaacccatcgcttgtttaagtctatgaatccggagaatctgagaagttgggaagattacaaagctgcattcttgacacagtattttacccagtccaggacagccattatgaggaatgagatctcctcctttcagcaaaccggtactaaatcattccatgaagcttgggagcggttcaaagtttactatagggaatgccctcaccacggatttcgatatgccacattgatcaacactttctacatgggagtcgataaggactacaagatggcgttagacactactagtaatagggactttatgaccaagactgaggaggaagctacacaactaattgagaatcttgcacctagcaacaacaaccacagtgttgactataataggtcacataaaggtgttagaggaggaaaatcaaagcaaattgttgagttaactaccaatgttgtgcaactcctgaggacatatcaaataactgtcaatttttgtgagaattctggtaaaggtccagtacatcaagtgttcagcggagatggttctgaagatctacaagcagtgttgaactttgtgaatgggtatgagaaagatcaagacagagggttcaaccagaactacatgaaccatcccaagctttcctacaggagtactaatgttaagtatcctccggatcaagtgtatcccactcaggcagggtcacagggtcagcaatttcagcctcataagagttttcagaataaaggtagctaccgaggacaattccaacttccaacatgtactgctaatgcgtcttcatctgggataatcagatgaaattgatggtgcagcagattcttgaaggtgagaagaagaatgctgctaagatcaatgtaaaggtggataaaccgtacaatgatctcaatgggaagtttagaacactatcctcacaaagatccttgagagtcaagtctctcagactgtttttgcctctacgcgaccaactggtgctcaatctgggaaagtataacccaagagtaaaaagtagtgttatgcgattatgatccacaaagagcctcgagagattgatgtcgccaaacaggtggaagctaatgttgttgttttttagacacttgtagaggacatgattgaagaggatgatgaaccaccatatgtggagccgccaccctatagccctaagcttccatttccaggccgtgagagacagattcaaagtcagaaagagtatgcacgttttgctaagatcatgtaacaactttacgccagactttctttcttacagtttgttctccatgttccaagctatagaagttaccttaaagatatcttatccaacaagaggggcattaaggaaggggttatgttagtttccaaaggagaagagtatgctcagctggaggaatatcagagacaataaaaagaagcttagctcactgatctagtagaggtgttagcaggtaaagagatggtcaacatttgtagtgccatccttccacctactattcccgaatagcaggtgattcagggagttttgttttattttgtcggattggaaaatctttattcgagagatgtctttatgatttaggagctggagttaacttgatgcctctttctatgtcaatacgactaggcatcaccaatttcaaccctttatagatctctttaattctagcagatcgctctatgcgatttccagtgggtttggctgagaatgtgcatgttagagttggaaatttttacattcccactgattttgttgtcttggaacttgctaaggaaccacatgaccctctcattcttggtaggctattcttaaataccacaggagccataattgatgtgagtacaagcacgattaaccttcagattggggactttgctttggtgtttgacatgagaaggacaaggaaaaatcccaccattgaaggtcatgcattttctatagacaaaaatgataagcctggtgctgaatgtataaaggattgtattgagtggagtgatattgaggaagtcctggatggagacacgaaagattctcatgttacattgacaccactatagcgtgtaggaaacaccatcgagtataaggtgcaatgtaaggaaacctcgaaacctttctccaaagctaggagcattctcacttcagagtggaaagagaaaggtggaaaagctgtgaaatgagtagttggtaaagttctaaggatgaagttgaatgattgggaccggatcaagtttccgcactcgtgcccattgattaacaagaatccggtcaagctagtgacacaaaacaagcgcttagtgggagacaatctaccaggtattctctttacatacattcatctttgttcttccttatttccttttgagtatatccgacatctccttttcaaattgttctcatactgagacggtgtgaagcaagtcgaggagaggatgtcatttgtctactaatcgagtttcctttgattgttttcttttgttcattcgtttgagtgagtcctttcgattttatcgagtcaaaatggtgtctttttattgagtcaaaatgttgtaagaattgtgatatttttttagaaaattgcaccttgcttgatttcattgcctagggaccattttagcattattcgataacttagaaggtcagaaaaatccatcactagattgctttatagtagtccctatctctttgaaatttgcaatgaatggagctttattttatatacttgaccttaatatggacttaatttatttcacttaaaggcttgagaatcatgtaatggatatacattcaaagtattccttgaatcagttttatcattctttgctaactttgaatggctagactcatttatagtctagtaccacacctattcccttacctattgtttgaaacctcatgcactcttatatagtcattatgatatgcatccatgtgcaaaaactatggagtatacgaaccaacatagctctccttctactaggatagtgtaagagcatcattaaaagagggaattttagaggtttcttagggtaattaaggatttaaattcaatgttaattgatgaatgaactttagagccgctcttagcttggaggtgctctgaggtttaatgcggggtgacgtggcaacaatttcttagttgtattgggaaatattaaagccaaaaaattattcccgtgcattttcttcctcctctctttctctctctcacttcggcaataacgccgagccaaagcaaaaaaaaattgacgcgatttgtaacccaccagtgtttctaatgagaatcatcttcatcatgatttgttatccgacggtgctttatatgcgcgctcttcttcctgggaatctccatcatcatcatggttgtcgtcatggtcaactattttcaccagatctccggtgaaagcttggaaaatcggagtcaaatcgtcagcaatcaatttgttaagataagaacgcctctcctcttgtattaattgatgtgattttagtttttagaaattagggttcaagggaattatgggttttgagtattgtcgattaaattgatcctcttttgtttgtaattgtttgattctttggtatattttgtgcttattccataataggcaaattgatcggttaaaggaaatgataagaaaggagtagatttatcgttttcaatgcttggctacttgcatttctgtgattcatttctttcaaattggttatgtttatagttgggatcagatgctgtcaaccaaaagaacatgatacttttgaggacgattcactgacttttcatgcatcgtgttatgtagcaaaagtaaggaaatgataactaacttgcttgatttggcaacaatatgctttctatggttacacattttagtctacaattaatttttggattttggcatcgaaggttcactcctttatttgttctgtttctagatcactttgaaagcattggaagggatgtttgaagctgcaagagctatcaagagttggtttggtaattgtgcaagagctatcaagagttggtttggtgattgtacaaaggtcacttcttttaaaaacaattagtactatacttgatttgattggtcttaatgttgctatctctaatatgtttaagtttaattacattgcagttgtaagaaggagtgtgcatctgttggaatagtgttgtcttcttaaagaagttatgaaacagaatatggttagaaggtaaacgtctcttccttttttcatttactcatcaaagttgagttgagaattaaaagtatttactaggtcacatttattgcttattgcttgttgaatttaatttattgcttatttactttgattaggtaaagtaataagtgttgacattgattgctatttcaacaatccattaaccaaaacttaaaaagttaccttatataagcaacaattataatcggagttgtacaaacaccttcttaattctcttgcattttgttttcaagctaaatgaatccctttcctaaccaagccaatttcattgatcttttaacaagtcaacatgaaaccccaaaccgtcaacccaacccttatgagacacattcaccaagtattaaacttggtgaatctgaattccttgtctttaacacccaatggcatgaatcacatcttcaaggtggaaacacaactactaagcgcacaactactacgaggaacaagtggacaagtaaagaagatatcgtcctcatatctacttggctaaacacaagcaaagattcagtagttgggaatgagcagagagctgatgctttctggaagcgtgttgtagtttattttgcaagtactctgaatgtttctagtcagataaagagagaaccaagccactctaaacaaaggtggggaaaaatcaacaagattgtatgcatgtttggtggatcacatgaagcagcaaacactcagatggcgtctggaatgaatgaggatgttttgatgaagttagccaatgagatttacgagaatgattagggttttaagtttagcttggaacatgcttggagaatattaagacctcatcaaaagtgatgtgcatcactgcctactgaagtagctatcacgagtaagaaaaagaaggctgaggcaaagaaggctgaggaaaatgagtctccatctgttgtgaatcttgacgatcaccatggagagactgaagctcgcccacctagtgtgaaggctgccaaaagtaaaggtaaaatgaaggccaacacttcagcaacaatggaaggagatgagaagccaacggagaggttctagagtatgtgggaaataaataaagaaggtttgtctttgagagacaagctcaggaaaaaaaattgctagacaaccttctagtaacacaacctcttagtgcaatagaggaattagagacttgttcttcaactaattagcttcagtttctgttttcagcaaatgtctttaagtttatttttctgttttcagtttatgttcgtcttatctctacttgtttaagtaatgtatctacatagttataacttgtgtgtttgcagacttctatcgaattagcttcagtttctgttttcagacttctatcgaattagcttcagtttctgttttcagacttgtgtgtcattgtgtttatgtaatgaaaagctgaatgaatgtttgtgtcaaacacatccttgagctcaagctaattgtgatacatgtctttaactttaaatttttgtgtttttgtttgtgtcaaagcttatgaaacataacttcgaatgttctgtctttgtgtaagtgtgaaagtggacttccacaagtggtgaaagtagacaaaacaaagttgaagctagaagacaagcatatgcatctctttttctaatctttgtcaaccacatatgtaacaattttgtaacccacaagttatgaatgaatttatcctaaacaacaagttacgaatctcttcttctttttgacttgctataatttgtaatatagtacacaaataatatgcattcttctcttgttcttgaaaaccttcttttcttttctggtcaaaacacaatattgaatgcaaaacacattcttttcttgttcttgcaaaacttcttgcttttctaatacttaatcaaaagaaattttatactaaaggcccaaatttctcttctcataactttttttattatactccatcatatcttcgaaactaatatggcgtcttcttctcgtgataacttttatgaagagttgaatgaagaatttgataatctttttgatgaaacatttgaaaatgaattgtattcatatgatgaacgtcaagtagcaaccaaatcaaggaaaaaacgaggtatattgaaagagattgtgaagaaggacacatcaagttatggaaggattattttagtgaaatgcaactttctctactaatcaatttcgatgccgttttcgaatgaacaagcccttgttcatgcttattgttgatcgacactccaatgaaattcaattttttcaacaaagaagatatgcaaccggaaggttaggtttctatacactacagaagtctacaacagcaacttgcatgctggcatatggttgtgcagctgatgtagttgacgaatacctttgtattggtgaaagttacttcactatcatgcatacataattttgttgaagcaatattttttttgttcggagatgagtacctacaaaaatccactgtagaagatattgatcgatgactaatgattggagagattcgaggttttcctaggatgatgggaagcatcgattgtatgcactaggagtggaagaatttcccaaccgcttggaaagggtaatatgcacgtggatctggaaaaccgacgatcgttttagaggctgtagcttctcaatatcattggatatgacacgcattttttggacctccaggttccttaaacgatatcaatattcttgatcgttctccaatttgtgatgatatcttacaaggtcaagctccaacagttaattatttagtcaatgggaacaagtatcatttgggttactatctcacagataaaatttatcttaaatgggctaattttatcaaccctattccgaatcggcaaacatctttatttgcaaccactcaagaagcttgtcgtaaagatgttgagcgtgcttttggagttttgcaagctcgatttgccattatgaaaaatccagctcctatttgggataaggtaaaaataaaaaatattatgtgagtatgtataaatacttcacaatatgatagtaaaagacgaacgagatgtgtacactcactttgatgtctcttcattcgtacaactggaatcaactagaagttcacaagtggatttcacctattctacaaatatgccttcaaatctcgagaatatgttggacactcgaactcaaattcgtgatcgacatgcacatcaacaattgaaatctgatttggttgaacatatatgaaaacaatttagcagaaatcaatagttaaattttatgttttcatgtatgttttaattttttttatgtcatctatgtatcaaatattatgaattcaataatgattaagttgttaaaaattaaaatatttctatattttattttgaaattacatttttttaagaaccctaatttaatatactaccattgaggttgccaaaaattaaaaacttaccaaaactcttaacaacaaaattttaaaaaaattattcattaaatatggttaaaaaccttaacttatatcccaccattaaggatggtctaatgtagtttatttgttattcatatgtgatgaaaattggccattatggtttagaggttgtatacttgtattcatgggtatgacatgttatactgtttgagtttttcctgatgcacatttggttagacaccggttccactcccatgtctctaaaaaacattaaaaaaaagaagggcgaaacagctaaggagaatgaaggaaccgaaaatgactagttgttattattcatatcagtaagcatcaagggtactcatcgttttgattagagcatgtgcaacagtgatatatccctatttttactgtttttagctatgatttagatattagtttcagagtccatttgttatttttagagtctttttttgtttttttacaagtttgggattcatttggagataatgcagcattctcgaggaaaaagagaatttatgcagctgaagaaatcagaagactaaaaaccgcgtaggtgtcaaacgacaccacccctggttttcgagcgacaccacccctggtgtcaagtggcaccactacctgacggtaattcgaagacgcaacttattgaagttttgaagatttctaaattcggctcgtaacttttcctttcggctcgtaacttttccttatttttaaagaaggcccatcacttttttaggtcatatatatagtttttagctcattgtttagacctaagcttggagaggctattctcctttatattttttgttcttgggagcaaaaccatgtggagactccctttagataagatctttcttactctttctcttgatatattgactaatgatttcttgttcatactatgatttgtgtttcttttatcatgtttgagttatccacttgttaggttaagggtttctcattagggattcatatggtttagtaaatcgatccctggtaagttatctatagaattcttgtatttttctcgcttactccagatttgaatgccactggggatagtgacgtttaagtctgggagaggcacgtttttctttttgagtcttattcttactcttatttttcttatttttgagtcgttttattgaatcaaaattttgttaggaattatgatctctattctttagattattgcctggttgattaatgctgcaggtttgaatcaatccgactattggaaaatccagatggcaaaccatgagacttgaggatatcctggtttctaacacaatcctttaaggttggagctaatctcactgcttttccttttacctcatcaaaacagttagtgttcatagaacttgactccttgttcatacctgatattgaaaccaatgtgaaaaagaaaagtattcctctccccttatattaaaaaaaaaaagaagtaagatattgatatgattttcggtagtgtataggggtaggaatttttcccatgacctaataacactgtattttacttattttaggtgtatgtttatcatcatttagctttgcatttgctcattgtatcatttcattttgcaccattttagcttattttgcatacttaggcatctaggatcatcttgcattcgcaatgcatgttttggtgtgtttttaggtgtagaaagagttaaaaaaaggactttactcgatccattcactcgatccagacagctacagaataggcatcaattcactcgacctcttcactcgatccaggatgctacagaggaggctgccgtttactcgaccctcttactcgatcaaggcagcctcagatgaagcagcagattgatctactcgaccctcctactgatcctctactcgacccatttactcaaccaagggtgaccaaactacaagacttgttgagctatcaaagcgtcttcagatcctcctcattctccactcaaccagacatctgagcatacggataggagaggaagaatcatctactcgatcaattgatcactcggagcatagacacaaaagcgcagactctgcagcaccctctttactccatccccaagatcaagtattcgcccaaaccgcctcaagtctcttgtcgtctagtgaatctagggtttcaacattttactataaatagatcactttggggtttgtccaaaggatctagcttttatctttcagtctttctttgtgtttatgaatcttgaaaccttaattactcttaatctatttcgtttttccatttagttgtttaagtaaagttgtttagcttgtttagatctacattatggtatgatttcagtaatttttgggtttgtgttcttgagaatgttgcttgagtagtgattagggttcttgaggatggattagattagggtaatctctaggttagttaggtggtcaagattaggttagaacccttctggattcgcttggcccctatgcggttttcgctggctaatgtggagattcgatcatagacgtccagcgtccaaaagacgttcaaatggatgtctgatcatcgaattccagagatttgtagtctcgaccaagagattggcttgtctgcttattggctttggtagattgtttcttaaaccctgctctgctatgtttcatcaacgacagttgagattaggaatttgtagagttatgggggtctctatcacgagagtggattgacctggtttttgaatctatcgtcaagggtatctacctttcacctattagccatctgatgaaccctagagttgcccttatcaatgaatccatccttagaacttctattagatttatttgtatcccctgttgattgcacttttatttacctgttatttgtatcccctgttgattgcattttagttctgcctattggttctactcgacccaatgatcgagtagggctcttaagttctcatttttacttgttcgaatcccgacctaggattgttactattaacccaccatcattataatctggcttgacttaattgtttctgtacacatcttgattgctagcaataatagtggactggattgacaccccctatagctgcatcgacatgtttgtgttttaggggaattgaactgaaccacacattctgcatataagtaggcatagtaaacctgcttatcaatttattgttgcggttgttacattcaagatatcagaaacttttaagatcaagttcttttacatttatcaagttactaactcatattttcgtctgcttgtttttgtggtataggtactaatctttgtgcatgctagattatttcccttctctttgggagacaaagcacaccactgggagaagactttgtccccagactccatcacctcatgggacgattgtaagaaagcttttcttgccaagttcttctctaacgctcgcaccgctagattgaggaacgagatctcaggattcacatagaaaaacaatgaaactttctgtgaagcttgggagaggtttaaaagctacaccactcagtgcccccatcacggtttcaagaaagcttcattattgagtacactctatagaggagctttaccaaagatcagaatgctactcgacaccgcctccaatggaaacttcctgaacaaggatgtagcagaaggatggaagttggtcgaaaatctagcacaatctgatgggtgctacaatgaatactatgatcgcttagtgagaggaactggaggtagtgaggataaaaagagcaaagatatcaaggctctgaatgaaaagctagacaagttgttgctggctcagcagaagcagatacactacatcactgatgaagagcacttccaaatgcaagaaggggggaatgatcaaactgtagagttgtgctacattcagaacaaaggaggtttcaacaaggggaacaacaactacgatcccaacccaaacctctcataaagaagcactaatgtagctaacccccaagatcaagtgtatccacctcaacagaatcagtccaagccttttgttcagtacaaccaaggttatgtccctaaacaacagtttaatggaggctaccaacagcagaatccaccaccagggttcactcaacaaccagaaccagccccaacagctcaggatcctgaaattaagcaactcattcaatagatcatccaaggacaagctactggagccatggcttttgacatgaagatagctgaattacataacaagatcggttgttcttacaacgatctgaatgtcaagtttgaagctttgaattcaaaaatcaagtatgtggagagtcaatttgcatcaacctctgctctggagcatcctcaacaacttccagggaaagcagtccaaaatcctaaggactatgctactggtaatgctatcaccatccaccaagaagatgagtctccaccaagtcgtcagactccccatactgaggaaaatatgattcaagaaggggggggggattcaactcaaattgctgcacctgccacccagcaattcatctggactataaagcacacacctttgctgaatactcaccatcctggaaaaaagttcaaaattgaaaaactcaagaaggatcagaatcaagagatgatcagcagtgcctctacccaagaaacatacaagaagaaaatcatccaagaaaagcttgatgatcccggttcattcactctgccatgctctctaggaccattgacattcaataggtgcctttgtgatttgggagcatctgttagtcttatgcctctctctacagctaaaaggctagggattatggaatacaagttctgcaacttagctttactcttagctgacggttctgtagcacatcctcatggtttaatagaaaatctgcctgtcaagattgaaaatgttgagatacctacagattttgtggtattggacgtagatgaaaaaggcaaggatcccctgatcctaggcagaccattcttagcttcagctggagcagtcatagatgtcaggaacggaaaaattaatctgaaccttgaaggcatcaagatgaagtttgacatcagagaatcttcatggaaatcaacaacaggagttcagaattttggggttcagaacatggatgttgatgaagaaacagaagctggaaccccaccaagagttaactatacttctcaagttagcaagctgaagagaacttttgaccacatgaagagaacaacagaaaggctagctcagactgaagatcctacagaagatgactggtatgagatgagaaaaataaataaatggcaaagtagagtcatagaaggattgtcttcaagggtgatgaagctgaaagatcaactttggatgtttgaaaaaagagttaaaaatttttcaaatggtattgatctagagaagatggaaactgcactagctatcaaggaggacgaaaatttcacaacagaatggtttgcaccagaagatcagaaagtagttcacttagaggaaagaagcctagagagcaagttgttgagtgaggaggaaactcctattctgatttattctccaggagtgcctaaacagcccaccaacacctctgctgaagaagaatacttgattcatgattctgttgctgaagaacttctgaaactctaagttggatacaaagctcaagaggataccattggggagctaacttacaagatggaaggactgaaccatgcaatcttggaacttcaagaaatggttaaaggctaccccagtttcgaattttaggattggtcaaaacagcctggttcagaagaagaagactactctgctgatcagaaagaagcttattttgaagaaaaatcaaataagtactcatcctaccatatctcaagagacgatgcagagtatgattcaagcactgaaaattcgaccactgaagatgaggacttctctgttcctctcttccatctcttttctgactaagctctgtaagagtcaagcttagtgacttaaaaaagctcacttgggaggaagtcccatgtctatccatgtatataactttctatttttcttgttattttgatgtttttgtttaagtgtttcaggtttatttcattattcattatggagtcaacggtcgagtaaattcaaaccaagtcaagaaaaatatcaaccgttgattgagtagaatgaggaggagtattttgagccattgatttgaatgactaaatgtgggaaatcaccctcaccgtttgatcgagtgaccaagggagaagtattctccaccgtttgatgaagtatttcacacttcaagaagatactcgattctttactcgagctctcatatttcgaagaccaaggcataacttcgtgatccaacttgctccccaaacactcctttactcaacggacaaagagattacccatgcccctcaccatttacaatcaacttttctatcctttcccaaagaaaccaaacaccattctcctccacccattgaattcgacaaacccacttttgaaactctctctttcatcatctcattttcgcaaaatctccatctctcacaaagcttcaaagtttcactccaaactcttcacgaattcgttctcacttcatcataattcaccaaagtcactcgatcacttccaagttcatcctcaagcattcaatcagtttcaagctcaaaatttcatcaccaaagaaagcgattcccttcccctttgatagctcttagagaagtgttcttgtttgtcctgtcaaagctcaccaccaatctccatggattcaagaaggaagagttcaccacgggcaagaagatcctctattgataatgaggaagttgaggcgtttgacatgagtggcatgactgaacgccaaattcgccaagctcgccgtgctcaaagatcaagcttgattcaaggtggaagctcaagccgctcaaccatgcaaagagaagaagtagctcgaggaaagagggtcgttgaagctgaagaagaacaccatgaagaagcaccttttgaagaagcggtttctgaggaagaggttgagatcatcggggatgatacaccaacccctgttgggagaagaaaccggcctaggaggaagagagagccaaccgagcgagtactatcaatatttgaaggagttgaagtttgagggaactagataccctcataaggaaacgatgcaagagcttggtatttgtggtgatgtggaatacttgatggaattggccaatcttgcaacattcatgagctgccaatgtgggggatacaaagaggagagctgccaactctttgcaaccctcaaggttcatttttgtttgggggaggattcaagacatgtttaacattgtgttctcttttcttatttcaaattttgcatcatctaaggcatagaaaaacaaaaaaaaattgaaaaaatttcataaaatgaattcatcaaaaacagagtgtcatgtagattgcatatcattttaggattgtatatagagtacttgcatttaggatttgctcatttgcataggggataatgattatttcaaagcgataagcatgttttgattcaatgaagtaagttcaatgcccaggttgttagttctcggttgcataaccgactgtatctatgaagtaagactacaccctgctttgaatttgtaacttgactatactgctttgattcgaaactcgcttatctgatgccattccatatctattagaacctgaactgaatttgcaattatcatgtctatgcattgtttgtgaactcatggctaccatatacatacttggattatcttattcacttcaccaccctctgttaatccaagtagctgtctctcatttttagagcagcttctcatacctttagcctagctttatttcaagccaaagatcatttgtgtgtgattgtgaggtctttttcgattgagcttggtataacgtgttacgtatgagccgacaagagcagtctttcatgtagacctagcccacgcttattgggttagctaggactaggtggacacttgtatttgggaatgagattgtgtatggaatgaatgggaatgataatgagaatgaaaaaaaaaaaaaaaaagagagtaagagtttagagttctaaaggggatacaaaagtgttaagtttagtaaagggtttggaattcaaagaagttagggattgtgattcaaagaaaagggtaaaacgccctatgtgctaagattagaagaacagccttaagtttgtcaaaatataaaaccaaacccgctagactcttaaatcgtttcaaagaaaaccccttagaacttgaaccaaaaagagagaaagaatgagaaaaagggtagagtaaggaaatctatgggactgggatcatcttctgagctatcatactatatcattgggtagatgggagtctgttcttgtattggtccattggcttttacctttagcattctgctgaagctcaatcttttctctgagagtcccctgttactcgaccaaacctctagagggaccatttttgtctcttagcctaagcccgaaacaaagtgagttcataaccattgcattgcttgatccactattcgtgcttaatgaatgttaaagggaactggttgatgtgaatgtttgaatagattaaggcaagttgttaggttgcattgtgacgagtatggctaaagtttttaagtaagagtctatcaccttgcaacctagaattagctacctggacatagagcttacccgttttatatgcatgctttggtttttgaatccccaccttcaaacctctccttcaacttaagattttttgtttgcttgagggcaagcaagatataagtttgggagagttgttaacactgtattttactcattttaggtgtatgtttatcatcatttaactgtgcatttgctcattgtatcatatcattttgcatcattttagcttattatgcatacttaggcatctaggatcatctcgcatacgcattgcatgttttggtgtgttttcaggtgcagaaggggctaaaaaggactctactcgatccattcactcgatccaggcagctagagaagaggcatcagtttactcgacctctctactcgatcgaggcagctaaagaggaggatgcagtttacttgaccctcttactcgatcaaggcagccttagatgaagcagcagattgatatactcgcccctcctactcgatcctctactcgacccgtttactcgaccaagggtgaccaaactacaagacttgttgagctatcaaagcgtcttcggatcctcctcattccccactaaactagacatttgagcatacaaataggagaggaagaagcatctactcgaccaattgatcactcggagcatagacacaaaggcgcagactttgcagcaccctctttactcgatccccaagatcgagtattcgcccaaaccgcctcaagtctcttgcctactagtgaatctagggtttcaacattttactataaatagatcactttggggtttgtccaaaggatctagcttttatctttaggttttctttgtgttcttgaatcttcaaaacttaattactcttaatctatttcgtttttgcatttagttgtttaagtaaagttgtttagcttgtttagatctacattttggtatgatttcagtaatttctgggtttgtgttcttgagaatgttgcttgagtagtgattaggattcttgaggatggattagattagggtaatctctaggttagttaggtggttaagattagtttagaacccttgtggatttgcttcgcccctatgcagttttcgctggctgatgtggagattcgatcatagacgtccagcgtccaaaagacgttcaaatggatgtctgatcatcaaattccagagatttgtagactcgaccaagagattggcttgtctgcttattggctttggtagattgtttcttaaacccttctctactatgtttcatcaacgacagttaagattaggaagtggtagagttatggggatctctgtcccaagtgtggattgacccggtttttgaatctatcgtcaagggtatctacctttcacctattagccatctgatgaaccctagagttgcccttatcaatgaacccatccttagaacttttattagatttatttgtatcccctgttgattgcacttttatttacctgttatttgtatcccctgttgattgcattttagttctgcctattggttatactcgacccaatgatcgagtagggctcttaagttctcatttttacttgttcgaatcctaacctaagattgttactagaaatccaccatcattataatctggcttgacttagttgtttctgtacacatcttgattgctagcaataacagtggactggattgacaccccctatagctgcatcgacatgtttgtgttttaggggaattgaactgaaccacgcattcagcatataagtaggcataaaaaacctgcttatcacttttctagtattttcaggtctttacaagtttgagattcatttggagataatagagcattctggaggaaaacaaagggtttatgctgctgaatcgcgtaggtgtctagcgacaccattacctgacgacaactcgaagacgcaacttattgaagttttgaaaatttctaaattcggctcataactttcccttatttctaaagaaggcctatcacgtttttaagtcatatgtaaagtttttaggtcattgtttagatctaagttggagaggctattctccttatctctttggtcttgggagcaaaaccctgtggagacttcctttagataagatctttcttactctttctcttgatatattgactatttatttccaattcagactatgatttgtgtttctttgatcatgtatgagcaatccacttgttaggtttagggtttctcattagggattcatatggtttagtagatcgcccccctgctaggttatctgtagaattcttcatatttaattgttcttaatgctagttctagagtaataaactagaacttgaatccaaacaatagatataaccgccataggtatttatagttggatctattatttgatgagcctggtttatagctgtgtaataagaatcagcctatctactaaggtgaacaattaaactcgtttagaatgcatgtctaggtataagatctctcggcttctcgagttactctttttgttttttgaaataaagttaaattagtttcaaaaaagaaaagtatatgtgtttacaacttgtgcaacgtttttgaagaacataaaaaccaagaagaagcaactttttaccccaactctcttgtttgaaaccaaaaatggagagctcgatcatatcttttgtctccactaatattaatagctgatatatgattccgaatgtgcttatcaatccacttaactagtcgggctacaggatttgggagactgccgtgtttacgctcatttcgttcccgccatatggtgtgtaccgttgcctgcaaaacacaacgagctaagaatccttcgacacgattctcgaccaatagttagcgatgttgtgtataatctcctgccaatccgtggaatttctctatacttgagaattgttttccacatccatgaaccaaggcaagtgatatctattactgcccaaagagacccttgtttgaggagggaagttctgacccatttcacccacagcgaatccttgtgggataagataagccaaatcaatttcaagaaatagacatcattcgcttctttaagagaccgaaacccaagtcccccctcttgtttcggtttacacacagcttcccatgcgatctttgcttttgttgtttgtaaatcaccaccggaccacaagtacgcttaacacaactgatctatttctcttatgcatgctcgaggaagacgaaatgctcccaaccagaagttacatatgctccaaagacaaatatcgtgccgaccaagaacgaatcttcttctttatttgttccatgagagggcgataatctgtagaagagagaccttttatgaccaaaggaagtcccaaatatctcaccgggagtgtaccaactgcaaaaggaaatcgatctgctatatcttgttgagaaatgtctgtcactcctacaagataaactgttgatttttccatacttatttcttagtcccaaacttttagcaaaagcatcaaacacttccacaatgccttctatagatcgcattttaatatgggcttatatcgagtccgttaaaaaaaatataagccctaaccctgataaaattaaataaaagattttgggctaagatagggctatactcaaattgttatgggctaaaatagggttggccctattacactcttttattattccctgtcctttttttcttcttctctttctcccaattcccaaacgcgtcttcttcgactcttcttcttcaatctcttcttctttgatttcttcttctttgatttcttctctgaaaccataagagtgaaagatttcatctgaatatatagagaaacagaagcttggtgaagtagcaacaaccctaattgcagatacttaggtttataacaaagtggatcccgtcacggccgacggaaaggttgatattgtgaggaataatttgatctcgctttatgaagaataccagactaaatctgcaagttcttcgaactcttcaaccacacttactccacacgagcttctcaatgaattgccacttgaagcagatgtgaatgatgtaagtataataatatatttgaatatctttcactagttctggtttttgtttaactaattgtgtgtctatttgtgtatttacaatatctttttgagcttgaaagtagtctcatatctgcttcaaaaagtaccaagtcaactttggaaatctatttggatgatgaaccaagattagagatgaagactttctctgacatggaaattttaagcttttggaaagagaatcaacatagatatactgatttagcttcaatggcatctgatttgtttagtatcccaatcacaacagtagcatcagagtctgctttcagcgttggaggacgggtgttaaatccttttaggaatcgtcttcttccccaaaatgtgcaagcattaatttgcacccgcaattggcttcgtggatatgcagatcttgaaggtaaaattgtaatttgaagttataaaacttacataaatcattgtcttattttaacttgtatcattaaaatgcaggagaaatcgaagaactttttgctgaagaagataatgatgctacaaagatgacaagtagttcaggagttggagattctaacatatgatgagaagttttttttgctcagtttttttttggacaaatatcggtaacaatgttttacatttcagcaaaatgacaagaaacaatgttttatatgttgtggtgttatagtgtttccatttgataataaacaatagtattattatcttataattgtttttgtttgaaaaacccttctctttaaataaaaaaaaaaaacttaagggctacaaaaggccaaaaaggtgctcaaccctgttttaaatttttttagggattaaaaagggttagggctcacttagggctgggcttaaaataaatagggctgggttgggctggaaaaccctttttaacatccctacattttaccatccgaaagaaccttaagattatctgcaaaactaaggtgagttaaaccaatgttcttacatcttggatggtaaccaaacttcctcaaacctactgccttatccaatagtttggagagaacatccatactaacgacaaacagatacagagatagagatagagaacatctctgtctcaaaccccgcacactgttgaaatatcccaccagttccccattgacttgaaccgaaaaagaggttgtggtgacacaaagcataatccaatgaataaaaaacaatggaaatttcatggcttcgagtaccttacggagaacagaccattgaaccgagtcgaaagctttagagatatctattttaattgcgcagccagtcgataccgattctttgtgataatcttttactaactccgtcgcgagcagcacattctctatgagcagcctatcttgaacaaaagccgattggtttcctacaacaaaatttggtagcactcgcttcaggggattagctattatttttaatatgactttaaatatgacattgcaacacgatattggcctataatctttcatctcattagtcgttgccttctttggtatgagagcaagaatggtggaattaattgcctttggtaagaatcctttcacaaagaaggatttaatcgcaagaataaactccttcccaatgatatcccaagtcgatttataaaactccattgtataactatctggtcctagcgacttatcttttggcattgcaaagagtactcgtttaatctcctcctctgttactgacctagtcatctctgttttctcctcctctgagcatcgataaggcagcaagtcttgaagttcactaatggatatttcctcatagtcatgtgaaatcagctgaagaaattctctaaaaaagtgttctgcttcctcttttatttctactactttttttgtaactgagccatctggtctttgtatttccctaatcgagttgtgcgctttccttaaagtgaccgctctatgaaatgtcttgtttttttgtcacccacatcaagtcaatgcaacttagatttctgttttagaaacttctgttcaagacaagtcaccctttcccacctatcataagcctttgtttcctcctccattgccctaactgaaggattttgtagattcagttgctgctttatgcaaagatcctcatgtgcttcctttgccttcttgaccaaattttccaaactatctttggtcaagtttctaatcaccggttttagtgcctttagttttctaataaacgtcgatgtggacatatgaattggttccgcgtccccccccccccagtaattcgccactaaaggtctaaattcctccatcattgtaatagctgataataggtttttatggtcaattaatcctaaaataccaatcatgtcgttgtagtattttaggtgtcaatccaaatgagtgtgatgcaaacagatgaaatgtgatcagaagtcactaagtcaagccaagcaataacagttttggggtttctaacagtcctaagcgaacatgcagaaaacagaagtaataacagaattactaaaatcactcgaccacaacaggctgatgccagaagtaggatgtggtcgagtaacaggtcgagtaacagacaggaaacaagacaatcttactcgactgcacagtctgttgccagacactgggtgtggtcgagtaagttggtcgagtcattgtaaaaactaagaaacaggcaatgagaacgatcaagcgataacgataaaacagagaaataagatagacgagaaattcctaaggatggggtaatcgagtagagtggtatcctagcctattcgaatggttaacaagcgcaatcaagttatccctagacaacaggttcaacaacagatcaattcactcccgtgacagaaatcctcaagcaaagctagcccagacaaattcgcattaacggaatctaactatgcaagcaataaaaacagactgataaagtcaataaatgctctaaacggccaatcccttgggatagagacgcatatctcaggaactagtggatcaagcattccatcgaacaccttctgggtgcgcgaatgcttgagatcgaattccagttgatcagaaagaaacaagcagtaaacgcaactagtcctaaagggatttaatcaattctaaaacttaaccattctacagactacggattccacaactactctatcccatccctaagaattcaaagtcactactcagacaacatgctcaaagacataaacgcagataaacgataatattgcataagtaaagagataaagagtagagaaacaagatgacagatgaaatcaaatgcggaatctgaataacttggaaaaatctcgaattacaggttgcagaagcaaaaccggcgcagtagagtaaaacagaaaataaaactgaagcaaaaaaactcaatgtcgaccggatatctgaggacagaaccctaagacatctatttatacaaaacgaaataaaatgatagtagacgggccaataacctaatcgctcggcccatagagagataatgggccgagatgggcttcgtgatccgatggaggtccaggccgcttccaaacactttgtcttctcctcttctcttccttgtgctcagcttgtctggttgagtgcgaatttgagtagactgtgaagacgtgatcgagtgtccggtcgagtgatgcttatggtggtgagtgttgatactcgaccagggggtcgagtaacttggtagagcgaatggtcgagtgatggtgatggtgtggcgaagtgatactcgaccagggggtcgagtattgtcatcgagtggcctgagctgaggttactcgacctggtggtcgagtggatgggaagaatggctccaaagtcactcgacctgggggtcgagtatgtgggaagaatggctccaaagtcactcgacctgggggtcgagtatgtcttctggttctggctcgtttcttccaatttgcttgcaaacagctccaaatcacctgaaaacaactcagaaatgtaatatgtatgcaaaactatcctaatcatgcaaagtatgcaagaatgatgagaaatgatataaaacagtgatgaatgatacgaaactggactcaaaaccatgatgaatggacactgaaaacatgcaaattatagacatatcaactcccccaaacttagtctttgcttggcctcaagcaaataagaagacatagttgaaggagaggagtgaaggcggggactcagaaccaaagcatatgatagagcaaataaaatcattgtccaagttggtagttctaagatgcgatatgattgaattctactcaaaaacgttaaccatgccttgttatcaatcaatccgtctcttatactcgacctacacatgctttcaaatctaccaatccctttaacattcattagttctggaacgtgaatcaagcagtgcatcatcaatgaactcatttggctaaggtgaaggtcaagagacaaagatggtcccttacagaataggcttaagtaacaggggatccctcaagaatgattgagctttagtagaatactaaaggtaagtcccaagttatgcatacagagataagatcccatctacccagagtataacaatgaagttctaatggtgatcccaactcctgtcccaacttaactctgccctttgcactcatgaatctttcaaactctttttcatatcattcttttcttttctcttaactctaggagaagctttctcaacgctctgatacatctagcgggtttggatttctttaacaactaaggttcctgtttttttttttttttcctttaaaaccaaaggcttttaacccttcttctttagctaacaagaacctcattcttttctttaacattctcaaaacctttactagattttttttctaacttctttagcttacttcccctagaattctttccctttcctcatcaacaatgaattccctcttttcttttaaacacatcccaacccatgatataagcgcccacctagtcctatccagtccgaagaacgcgaactagaactacatgagacactatctctgtcgttacgtattaacactttctaccaagctcaatcgaaataagacctcacaaacactcacaagtgatatagggcttgaaagaaagttcaggtttgggtatgggttaactgctctaataaagagtggttaaaatgagtaagaaaatccaagtattttagggtatccatgagttcaaattcgatgccaagacatgataattctaaatcagattcaagttcaaattgatagggaatgatatcagtttgaacttgaatctaggcatggtgcagtttttacttcaatttcaatgacaacgcatcaaacaactaacaacgagggcactgagctttatctggtgaaccaaaatgcttacaaggctatctcatcattatcccctatgcatatgcaacaatcctaaacgaaacactctagactcgatcctaaatgaaatgcaactacatgaacactctatttttgtgaaatcattttctgaaatttttcaattttttttttttttggtttttctatgccttagatgaatgcacactcaagattatatacaatgcaacacacacttcctgagccctcccccaaacttaaatcacacagtccactgtgtgaccaaatttggaagagagtactcaggacaaaacacatctcaaagacaaaataaaaacaagagatggtatattacaatggtggagtgaggtgcatacctcagtggaagaaggagcggagttggtcgtcaatagctgcctgtgattgctctcaggccatcgaagaatctccctgttgtgtctcagcttccccctgggggtactcgacctctgctccttcgtcgcagccagcaccgctctgatgatactcgacctctcttcttctgctgcggccagcaccgcggtcgcgtaagctacgggactggagaagtcgtgactgcatcattcgctatactcgaccacatcgtcattcgatctctatagggtgtggtcgagtgatttcctggtgtgaagaagccagaacaatgtcgagtttgattgctctgtggtcgagtgtattgctgttccttcaaagccagaatctatttccatcaactcttcatacttatctcctgaaaacactaacaagatgcatcaaaaacaaccaggaaaatgaaagatatgtacaaaggaaggcttgggacttcctcccaagtgagcttgttttaggtctctagcttgactcctcatactcattaggcgtttaaaggctcctccaaaggaacagaggttccttctggaataaactgatctatcatgtatttcttgagccgctggccattgactgtgaagtctccattctttccagctagcgtgatagcaccataaggtcggactgcagtaacagagaaaggaccagaccatctagacttgagcttgcctggaaaaagcctcaggcgagagttgaacagcaacacttgatcaccaaccttaaaatctcttgagactatcttcttatcatggaaagacttggttcgctccttgtagattttggaactctcataggcttctaagcgaatcttgttgagatcgttcagttggattaaccgcttctcctcggcggttttaatgtcgaagttcaggagcttaactgcccacatggctttatactcgagttcaacaggcaaatgacaggattttccatagaggaggttgaaaggagtcgtgccaataggggtcttgaaggctgttctgtaagcccatagtgtgtcattgagcttagcagaccaatctttccttgtacttcccacagttttctctaaaattgcttttatctccctattggagatttccacctgcccgctcgtctattgatgataaggagtggctaccttgtgctttactccatgcttcttcaaaaggttctcaaaacccttgttgataaaatgtttccctccgtcactaatcacaattctcgggactccaaatctagggaagataattgtcttgaacagctttagcacaactctagcatcattggtgtggctggctatggcttccacccattttgatacatagtctattgcgaccagtatgtacttgtttccgtaagaggaaggaaacggacccataaaatcaattccccaaacgtcaaagttttcaacttctaagatcggattctaaggcatctcattccttctgctgatgttccctcttctctgacatgaatcacatttcgagataaattcctgagcatccttaaacattgatggccaccaaaaaccagcttgcaggattttcgacattgtcttgaacgttgcgaagtggccaccataggcaaacccatggcaatgcaataggatgccttcaatttcgtcttctgagacgcatgtcctgtagatcttatctttgcagagtgtgtagagataaggttcgtcccagtagaaatggttaatgtccttgaagaacttcttcttctcatagctcgacagattcggaggctcttcaccactaaccaagtagttgacgtgatcagcataccacggaagcttttcttcaattgcacatacttgatcgagtgatttctaaatttgagcactctcgttaagttgctgaattgccattagctgttcttctggcatggagtcgtcaataaggacctcgtcttcaatcctcatcctagacagatgatcagctacaccgttttcgattcccttcttatcaactatctccatatcaaactcttggagcaataagatccatctcaacagcctaggtttggtatccttcttcgcgtatatatgcctcagagcagcatgatcagtgtagattgtcactttagaacccactaggtagcttctaaatttttcaaatgcaaataccacagctagcaattccttctctgtagtggcataccttacttgtgcatcatccatcgttctgctcgcgtagtagatcacatgcagctttttatcaatccgctggcccaagactgctcctactgcgtactgaagcatcgcacatgatctcgaatgggaagtcccagtttggagcttggactattggtgcagtgatcaaagcttccttgattaacttaaaggctgtcaaacattcgtcatcaaatgcaaactcggtttccttgcacagcagtctggtgagcggtcttgccaacttggagaaatccttgatgaatattctgtaaaatcctgcatgtccaagaaaactcctgatgtctttgacagtttttggtggctgtaactgcatcatcacgtcaatcttagccttatcaacctctattccctcctcagaaattttgcggcccaaaacgatgccttctctaaccatgaaatggcatttctcccagttcagcaccaggtttgtctcttcacatcttttaagtaccctgcacaggttcaacaaacacgaggagaaggaagagccatacacagaaaaatcatccatgaatacctctaccatctcctctatcaaatccgagaaaatagaagtcatacaccgctgaaaagtagctggtgcattacagagaccgaaaggcatacgcttgtaagcaaaggtcccataaggacaagtgaaagtggtttttccttggtcatttgggtgaatagggatttgaaaaaatccgctataactatccaaaaagcaatagtaaggatggtttgctaatctttctagcatatgatcaatgaagggcaatgggaaatgttcttttctagaggcaacatttaacttcctatactcaatacacatcctatgtccagttatagtcctagtgggtatcagttcatctttagaatttttaacaactgtcatacctccttttttaggaacgcagtgaactggagatacccaagtgctatcagagatagggtagataaccccagcatctaatagtttaagtatctcctttttcacaacctctttcaagttagggtttaatctcctttgaggttcaatgctagagtaggattcattttcaagatggattctatgggtgcataaggtgggtgaaatccccttaatatcatctaacgaatatcctatagctttcctatacttcatgagctcagttatcagcaggtttacttgatcagcagttagctcatcattcactatgacaggataagtagagtttagtccaagaaaaacgtaccttagcccttttggtagcggtttcaaatctaccttgggtgccttgatttcagaccagtcatcggatactaagttggcttcagatgaggagttgtgatcgagtgacgtggtcgagtagactgaatgggctgttggtcgagtgatgtggtcgagtatatattccccccttgctctttcacccaaatcttcatattctcctggattctcaactgctttgttcatctaacagcttctggtaccccaaagtctccaaatgtaaatctccttctttgctatcctttgttagagcactctgtagatgatctgtttctcccagctcttctagcattttgtcagctaacatatccatctcttcaatccagaaaatatttccttctatcgtaggcttcttcatggtgttggtgatatcgaaggtcatcttgagatctcttccgaggttaagatcaatttttcccttcttaacatcaatgatagctctagctctagctaaaaatggtcttcccagtatcaaagggtctttgggttcttcatccatttctaaaaccacaaagtctgtaggtacctcgaccacgcctatcatgactggtaagtcttccagcagaccatgggagattctaacagatctgtcagctaggatcaaggatatattgcagggcttgtacttgttgaagcccagtttcttagccacagggagaggcatgagactcacagatgcacctagatcacagaggcacttgctgaaggctaaagggccaagagcgcaaggtaaggtgaaggaaccaggatctcctagcttttttggaatgatcttctgctgaatgatcgcactgcattcgtgacttagcaccaccattccttggacttctttgatcctctctgtaatcatgtctttcacatatttgttagagtctggtataagtgcaagacagtcgacaagaggcatcgtgacttcaagatttttcaattgtttctccaggagagctttgtacttctgtatcatgaccttcttgaatcgaccaggaaatgggagtgggggcttgtaaggtgggggaatgaagacgttttctttggttttggcggcagctggtttttcaacaagaggagatgctgcaggagctagtggtcgagtaggttggtggagtataggctcttctattgctttttcagcggaatttccattttgacagaaatcctccccatcttgatccagactgtcctcagtgttctggttcggactctcttttgtgggtaattctttaccgcttctaagtgtgatagcatgagcgtactcctttgaatttgacattgattttccggaaggtcctgtaaatttgggtgctgcggtcgacccagtttggccttctatgtatctgatcttagatgttagtgcttcaaccttgatattgatatcattgtaactgcagtcaaccttgttgtgaatttctgccatccttttggacaaatccattgctcctgttgcttgcccttggagaatctgttgtaacatgttcttcaagtccgaatctggagttgttaaagctggttgttgttgctgctgtgtgaacccaggtggtggaagttgctgctgatagttgccctgatactgctgcttaggaacatacccttgaccttggttgtatggaacaaagggcttgggttgattctgctgctgtgaagggtaaacttggtcctgccggtttgcaacgtttgtacttctgtaagacagattgggatggttctgcttgaagttgttgaaacctttgttgtaacctccttggttctgcacatagctgacctcttctaactgcagagtctccccatcctgaacttgtaacgtctcatcatcacccagaaaatgaatgtgcttctgttgcataaggagtagcttgtccagtttgtcattcatggctttcatttccctacggtgcttctcatcagaatcagagcttgtgcggatgcttctgtcataatcttcattatagttgccatccgactgagccaagttctctaccacctcccatccgtcttcaacatctttgttgaggaagttcccgttagaagcggtatctagaagcatctctgtagagagtgctaagaagcgaagctttggagaaaccatgatgaggacattgcgtctgataacccttgaagcgctcccatgcttcatagaaagtctcattattcgtctgagtgaaaccagatatgtcattccgtagtctcgcagtcctggagtttgagaaaaacttagccaagaaggctttcttgcagtcattccaggaggtgatagagccttgaggaagtgacttttcccactgatgtgctttgtctccaagagagaatggaaacaatctgagcttgaagccatcctcactgactctattgatctttgttaggctgcagagcctatcaaactcgtctaggtgatcgagtggatcctccatagggaggccgtggaacttgttgctctgaaccatggcaatgagaccgctcttgatctcaaagttgttgttctgcacaggtggaggcacgatgccattacgctgattgtggttgcgtggtgcatcgcctgcacctatgttgtttggttgcacctgctcatcaacaactgcagccattgtgtctgtttctgtctgtgttctgagttggcgtgcaatacggtcgatgttatcgttgaacaggagattctgatttcctcgtgatcgtgtttgcatacaacgagtaccaactggtgaagctggtgattcgtagtacctgaatcaaaacagacaaacaaaaaaaacacaaagtgagtaactttcagaaaaaatgaaaaagaacttgatcttaaatattctgaaatctcaaatatagcaaacaaacacccaattggcaacggcgctaaattgataataggtttttatggtcaattaatcctaaaacactaatcatgtcgttgtagtattttaggtgtcaatccaaatgagtgtgatgcaaacaaatgaaatgtgatcagaagtcactaagtcaagccaaacaataacagttttggggtttctaacagtcctaagcgaacatgcagaaaacagaagtaataacagaattactaaaatcactcgaccacaacaggctgatgccagaagtaggatgtggtcgagtaacaggtcgagtaacagacaggaaacaagacaatcttactcgactgcacagtctgttgccagacactgggtgtggtcgagtaagttggtcgagtgattgtaaaaactaagaaacaggcaatgagaacgatcaagcgataacgataaaacagagaaataagatagacgagaaatttctaaggatggggtaatcgagtagagtggtatcctagcctattcgaatggttaacaagcgcaatcaagctatccctagacaacaggttcaacaacagatcaattcactcctgacagaaatcctcaagcaaagctagcccagacaaattcgcattaacggaatctaactatgcaggcaataagaacagactgataaagtcaataaacgctctaaacggccaatcccttgggatagagacgcatatctcaggaactagtggatcaagcattccatcgaacaccttctgggtgcgggaatgcttgagatcgaattccagttgatcagaaagaaataagcagtaaacgcaactagtcctaaagggatttaatcaattctaaaacttaaccattctacagactacggattccacaactactctatcccatccctaagaattc

SEQ ID NO: 77 - DNA, 118986 bp, Arabidopsis thaliana
gaattcggttaaggagcaaggttaccaaaattaaccaaataaaaaatgaattcggttatcggtttattcggttgttttttttggaggggttaaaaacggttgtgtttaaaatccttacaaaaatttatgtttggtttcgtttgtgcttttgagagaattatgttataatttcatgaaattcggtttattttggtctaagttggttaaaaaaatactaaaagtccagaaaaaaaaagcaatattgttataatttcatgaatattcggtattttttttggttaagtttgttggaaaaatactaaaagtccacaaaagaaaagcggttaactatctaaccgaactctcagatctcaatttggttcagaaaaaccggttcagtttttaatcgcatgcctacttagaacagtagacagcttatccggtttgtccttatagaaatgcactgaaatgcttcagagtggtcttctctccaatggactaccacaatgtgtatccatgtttggaatgctttccaactaatgccagaggtaatcaaactgcctgcatttctgactatcacgtaaaccaataggaccaaagcccaactaacagattttccaaacaaatgtgattatgttttcagagaagatcgaattcggctttgggagtttcacccttcacccttcaccaaaacttcaccaaagtttcaccctttttatttttttacaagtagagtttgcttataagactggatgttctgtaaaataacgcagttagacttaagactcccccgcactaattcattcatagagagaggctcacgctcactcgtatggatgctaaactaagacgaagaaatcatgaattagtaaacaatggaaaacagtaacaccggcccaaaagaataacatttggtgtgatctttttttctttttccgctatgcactgaacttaagtttttatctgtggctgtggggtgaaacaattttaaccatttacaaatggatactatgaattaaagacaaaacctacaaaacaaaaatactaattcacctaaggtactgatgaaaccgaaggtcgatgatcttgcctttccccttctacatgtcttggagctggaccaaacatgctcaagaacaccttcatcatccattcaaatcaatatgtcaaaacaacaacaaaaattctaaaattagtctaatgtttgaatgaccatgacttaccggtaaaaatacaaggccgtgtaagaaaccgagaaggactagtgccaaatacatcttgaagtagtacacctgtcaggaaaagaaaaaacaaattaagaagccaaatgcgaagaaggcaaggagaaaaaaaagaggcttcaagagatcacaagcacgtaccacaaagacttctgatcttgagaaaccgagcacaatcaccccaactagtttcgtcaatgtaattccactgccaacaatacatgatacacattttagaataaattcaatatcttgaacatatgttaatgaggactttagtttgtattataactatttatacttctgtttgttagttaggcgatttctgataaatagagaagcatgacttgtttacgagatgacatgctttttaagttcattagtcgtgttcaagactgacaaaatacctgaaaactgaagctcccatcccacccaacgcctctttcatccgatggtttctgtccccagtgcttatctgagcatttcgtacagtcagagtgacaatagcaaattgcttgtgtataatgctagtacagacagagaggggactaaccgagaaagcgtgtgttatgtgtacgcaaaactcaaccgctatgcccacggacatgattagatttacaaccgatagtgcgtttagctggatatgaaagactgccataactccctagcatttttcaagtcaagtgttcatagggtacaacattagtaacttgagtgtacgaaaacagttatcggttttttcatgagtagcaatgagagtgaattaccaggagatcaataatgatcatcgcgatcaccagcaaaataattgccgagctccaaaagctgagtcagaaagcagacagaaagaaaaagaaagatatgtacaatcagacttaaccatatctaacacagaggttggagtaaatttcagtgagaataagttatacctgcatgtgatgattaaacacacgacaaacacggcagctgtaaaatgatggaactttcaaagtcagttcatttgtttagtcacaatacctaccaactagaaactcaagctaagatcagagattagaagattaacgaaccgatggctatggagaggttgattaatgcagttttccatatgtcaagatattgctcaaagaacatataaaacactgaataaggatatatctccatctgaaaatagagtaaactacaagttagacattaagttcactaagaccaaactttagaagagaccatgcttaggatgaattatcaagacaagtttgtatattctttttacctttaaggaacgggaaacttttgcactaaattcttgagcagctctcattgaattaacaaagtcaacctgaaaacaaacttgcagtataaagtaacacgataataaagagagataccaaacatggcaatgttgctttatatattatgagatggcaaagtacctgcttgttaaggggtgtgtgataagtacggaacgatgaagcttgaatgataccatttgcatagcctgataagaaaattgaacatacatatatcagaatgagtatctgcaatgacagaatcgatgactataaaatggattaagaaagagagaggggacagtgcaaaaaccttgcaaatcaacactactagaataagcaccatgtccacctttagcacaatcagcagaagggagcgcgttgaggaaccaaggaagtttctctttgaattgtgttgtggaagggcggtcactacttaaatctgcatgccggaagcactaaacaaccagaaattttttattaatgcaaaatcattgcggggagtaaaaatacaatggtaactaattcaatcacatcataagagtgagttaccgtggtacaatctttgcatacttcacttaggccacagctcgtttgaccaggagggcaacaaggaggctagaaatgtgacacaaatacaagaacattagccttcagtaagtcgtaaaacatttttggacctcggtaataagtatgatattttatatccatgtgctacttttgaatttggataagagcttaagtagtgttcaagaaagcgctagacattaagcgggcggtgacccaggcgattttaggcggtttaggcgtttattacataacatattataaatataatattattgataaaaactatataaaactatctattaaaaaatataaatatcaaattttaaacaaaaattagacaaaaacatttgtttaattcatatcaaacaatatatattaagttacgacttataatttaaatttatgtagttaaaaaatggaaaaaagaatacagtaaaacgaatttaggcggtcaaaacgtttgtttaggtgtcatctaagagcctatcacctaaacggggcctaggcgaccacctagaccactttttagaacactccacccaaaagctagcttatgagtggggatgcacatgtgacttttaagttttaacagtgggacatataacacaatgcaatgattagtcccatttataaacaatgtgggacattaaacagaatgcttataaaaactgaatctacttttttctgcatgtcagttcattcaactctacttatgtttgtagctgtatatgggaccactaaatttaaagtatcttgactctaaacctcggcagtgaaattaaaaacaaatacctacctggtcatcaggggggcaaaaggtaccatttgtaaactttctgcaacatccaaacgcctcgggagataaccacacaagaaagtcatcgagccacgaagcagctggcttagctatgtagcttagttccggagtcaaagaagcccttgcaatctatggaaaataatgaaatttagatcctcaaaaagaataagaacagattctctgctaacaatatgcctattcaattactgagacacaattaatgccaacagctaaagaagctgtagcagttaatagtaccatatattaaagacagctaaccaaattatactatgaggagaaatgaaaataaatgcagacgagaaatatacctcatttaaaagagagttaggattacacttgttaatggaacaaagttgatttgtatgtcttgattctgagctgagacatgaggcaaattgagttttaataatgagttggaacaaattatatcagtagctaacagaacgtggaatacctgtagttataattcttcagaacaaagtataaaggtggaccgattcgaagatatgtagaaatattgttgaagtaaccctaaaatggaaaagaggagcacttgttagatatcttagatttgatacttttacattagcaagattcaatgtaaacctgaagatatgagtcttgaggaagaacaatctgttgctccaaaccaggctcaatacgagtcgacaatgcctatatggtccacgaataggatgattacgagatgatcatttaaatggctaaattgataacataacatttttcttatgtatcagaaaatgtataactcacaattccagccattgctaagccaaagaagaaggcaatgaccactattttgactatccaatggctaagaacaggtgcatggacttcctgaaagtgtacaatgaagcatacaaaatgtacatttataaatcaaaattatgtagaacaaaaaccacatgttatgttttattagatggtatataagttgattattaaagtaccttcatatatcgagtcaaaaggccagcttttctttgaccaacccctgaaaggtgacacaagacaactccaatgaaaatttgattccacaaaattctacaatgagtaaggattcgatgatacatcaaccctcaaaagggattacctttttcagcactaatagatgattttgatgtcttaatacacgggaagcaatcaactcgcttatcctccgtccgtcggaagtcaaaaactatcaaagctacaaacgcggtaatctggagaagaaagtccaaaaggacagccaatgctgcaagcatgatgcatatactcgttaaaaagtagataatgaaagcattcaaactgtatactgaagagttttactgaccagcaaacatggagaatactcgaacagctggcattttaatgaaagcaccaacagcgaaagctaaaatctcggctaaacttgctagagtaatcgatggtccaacttccataagggcattgctaattcttctttccaaaggcagctcttgctcttgcctcttgacagcatgaaccaggatgcacatattatcaacaccgacctgtcgataaaaatattccaagtagaagtaaaaaaaaattaagaacaatatgaagaacgtcgccacaacatcagctaacatattgaagttgcaagcaatattagaaatagacacgacttacagccaaaacaagaaaaggtataacttccattatgattagagtcgatttcatcccaacggcactgaaaaatcctacagagccaaggacagaaagcatgacaagtagaacaccagatagaccaagcagaacctgaaattaagaaggaaatatgtccactagggtttgaaagtaacttcattaagagtgtcagagtaacactacaatacagagattctaacaatgaaccattagcataccttggatgtaatgtaaaaggactttaagcgaggtgaatctccaagtgtgagtgatatataggcaaacatgacaagataacttatctgaagcaaagaaacatgagaaatagaagacatgaaagacatattagaaacccaatagagtatgaacgaaaaacaaacttagaagcaatgagaagatacaataaggaaactcacggctatagttatgacatctgctgtgctttctcttttcagttcttcttcaatagaactttccgacgagaaagaaagagttaaattttttgcttgaaccattggcaacaactcatcctgtcacataaagagtactaatgtaaatgaaggaacaagaacgatagcatcgaacaagaacattacaaaaataatgaattaaccttggccagttggataaaggctttctcccatgctactgctttctcagttttgttacctttattgtcaacaaaattgtccacaggataagtcacaagaaaagcagaagcctgtcgaaagcatgtcaaggggtatcagatactgatatgaattcactaactctatgtagttagtttaacaaactgaagaatactacctcactaaaactgttccctgagaaacctcccagtgcagtagttggatcaagtggacccttaaatgcactcaaacatgattctgtcgaggtgaaatgctgaagaaaagtggtgagacagaattattcaaatggaacaatttagactaaaactgaggaatgcaagtatgaatctgtttcttatccaaaagaaggtatgaatctgttaaccgtgaaatgttacgtaacgaagttacctcaaaacaatatttaacatgatcaacgcctccatagtcgtcataattttctggtttcattttgaaatactgcttccaaaagcaagaaaaatccaccagatacgttagtgactatttgtcaaacgaggaaaagctaaaaacgggtggtaaaaaggaagtagtgcaacctgcagaacactctgtgtggcacaatcctctcccaggggtttcatgcagatatctgtcagagaaaccattgaacctgagtgatttgcccgaagtccatcgacctaccatattaaacaactttttacatgtccggtacataaaaacattatatgggtgattagatggatttgaaaatagttgggataccttcttttgtatgtcaaaaagtaacttaatattgtcatctgtcaaaatctctggcgccttttcgtgagaagatgtttgaactgttgctattattagctgcataaattttcataacattgtgaaaagtaccacttatacaaaagagaagcttaatgtttcgtcccccatatgaaaaaaaaaggctgcattatccagcacaagaactttaagttatagaaacaagctgatagaaatgtgaacctgttcaattctgtagaaaggagcaagatgagtgtcaaagaattgtttctcttcagcagctctgctacctgatcctacccacagctgcaacatacaatataaaaacatttacaaaggttgcatatagcaatagcttgtaacagcaataagaaaggggcaaagaaaccaagtacataccttatcaggccgtgtctcaactttgaaccggatcagacccacacaaaggagaagaactacagagactgacaaacacaaaacaagagtggggtgtcttgctacccaaatcccatacttcctgaaagcagataacacaacaatgtcaggaatcctcttttaaagctaagtgaagaaatgtagaaatttcaagtacccgtaaaagttggccaagtgtccttgtactgtcgatagctgaccccagtttctctgtggagtattttgtaacatctgagagaaccaaaagaacacataacaaagcaatgagcatcttacagcagctcaaacttcaaatatcgtagtgctgagcattaagtacctgcgattgaatagtgtctggtttttgctgattaacagaatttcgttctccactagcttctgacaatgttcccatctgtgaggtctttttcttaccccttactgggtgaagtaaacctcctccaagaaacaatgaaaccaatacaatatacaaaatggctaatatgaaatcaacacatttcacctgcatgattaaccaaccaggaccatgttaagtaacacttcatttcacaagcattcgtaaaaaaagaaaaacaaagtccatactcacctcaagtgatccaatcttgatagagcaagaatgttttttctgagtaggcacttctgctttactagagcaagtagctgcagaaggacaatcaccacaagaacagccaagagactcatcaccacatgaataaatagacacattcataggcctcattccagacgacacaggcggtgttggcaaaaaagcgatcccatacggtgagcctggcaaattgacacccgctttctgaccaataaatgtaaaccactctgatgacacaacaaacatctcagttattccaagataagtaaacacaattgaactagtcttgagacatatcaaataaacatctacccttaaagttctttgcaccggctccgagaaagtctaaagctcggctattcgagctaccaaattttacatttttgcaagattcatacatcccagctccaaaatcatcagttatatagtactgaattccatctacagtagaattattcttgacctaccaaacaaaacacagaaattagacttaaagctactcaacgttgaagcaactagacaatggattattcaaaaagttattacctttgtagtagaagttacattgataaacaaactctgatccggagaacaagtaagttcacaaaaaagattcagaaagttcctcaaacatgctggacaaccaacaataaaaggaatagcctgataacaaaaaaaaaaaaaaatatacacacacatttgaaaatcttgaatcttgaaaaagaagagattcaaagaatggtgtttttggtacctgttgaacttgcgaacgtaatgtatcaaattgagtctctgtgcaacaaacattgccagtgattgttggacataagctttgaatctttgaagataacaaatcatcaggctagaagaagaagagtgaagagcattagtagagaaacaatcaacaaaatcatctttttgagtaattaatagaagaagaagaaaaaaaaaacactgaccttcacagaaggaatgttgaaagggcaatttagtactttcccatcacttcttgctccacagatatcatacatagcacaatatcctgctgattgttttgcttccactccataaccaacaaacagaatctgcattggtacaaaacacaacaacaacaacctcaaattcagagactttcaaaaaaacaaaaaaggaaattgtataattaatttcacaaaatagcaaaaaaaaacaaatttcaaaaaatcaaatcgtatagcttggcacgagaaaattgtgttcaaccgcatcatatcacttacgtaaacaatattccttagaaatgattcatttgaactctaattaatttcggaggacaaaaaaatatatataaaaaaataatctatatatacatttcaaaaaaaaaaagttgtatatcaatgttaatcatcaatacaatctaaataatacaaactaatagaaaaagctggatttaacaagataaaattccacaatttcttttttttttgttacagaattcgaattttttgttttttgataaatcactattttgtataatggttttcacataatagaaaaaatggatttcaaaaatcttcaagccaacaaaaaaaaattcagaaaagtacaaaaaaaattgccagaagattggagaagcaaaattgattgaaagaaattgaaataaaaagggagaagaaggactttccaggagaagaagcgatgaagaaataatcctcctcataatttcttcgtcgccgatttgatttgttctcctttcacagacaaatcgatgccaaagtattatcgaaattctcaacagaatttcatcagaacgaaactggcgtggagaggaaaataacagagagagagagagagacagagtcaaaggtgtgaagaggttttatagttttatagaaatgtgagcgtgtttttatatatagacagtgtgtgcttcaaagctctgccatttttctggtcctagggatgtgaaagtcaatgtgaatttactattttaccctctctttcggtttgttttatttttgttttttctgtcgtgggatgaagaagagggtgtttctgtaatcttgggagaagaggattacgcggttcctccggaaacagattttttttttttttttttatctcttggaatagtagatttttagtttagtataggtattgaataactggagtttttagtttagtttttaagttttgaaaatttctacatctgttaacttttaaactaaatataataatttttagaaaacaatctgtaataattaggaattattttaaattaatcaccaaaaaaataaagaattctttttaatatatttttagttaattttgttcaaatatatttataatttaatgtaattattggagataaattttaacagaattacaccactatggcaaacattttattatatttttattaacattctaactgaaatctaaaaaagaagtggtagaagtgacaatataggttatgtgtttcaaaggtgacggcggtcgggatagataaatccgtcagcaatatagtcagctttatttttagggcggacaacaaagcgttgcggactaatcgtaattgtatgtaaaagcaatctgttgttggtctgcgatagtttttttctttctttttggttttactattagagattatagtttatgaaaagtaaataaaaagtggttatgccgtaaatgattttatccgctcgtaccgctgtaatcatttgaaccctatatgtttgtgttagtcattgtcttacattctgtgaaataagatggtttatatgaggttttgacactgattcttagaccggattttaaatgtgcaagaaattttgaagttcttatcgtaatgcatgaccatcgtaagaaaaactataccgtaaatcttttttatctggcattaattaacttggaaccatgtgaaatccaaaactaaatgcatagtcgcataatagatggtcggatcgaattgatgagtgaccaacttgattaaataccttttcatgtgtgtcatatctgttaaaaaaaaaaatgtttagtgtacatgtaagcgatgatcatgctgttatgtacactcttgcgcgaatagtgagaagatcggagttctgaaaacaaggttctcgggactcaaagtaaagaaggacaacatgcatattaacattggtgatagttataacaaaacaaaatagagacgtaactcctataagcaaggaaataatgggaaagtagaagagatggttcctacatagtaggttgaccaaatctctccatattacaactgaagcaaattacaggatgagtaaaaaataaaccagaccaaaatgacttattgcacatatcttcggtttggtcgccgaactcggtttgatgtccttaaaacgtggttcttcaactctatcatttggcattttaactcctccacggttgaattacccccatcattttttttgggtattttcgaaagaatgacaacttcttaatctctctggtgcatgttgcatgctccgctagacagctaggtgtcctcatgtctcatcatgattagtactatatagataattaaaacatttaacctcccacgttttataaatattataagcttaaatgtagtaatatgtttatgtcattaataattaggattatccacttgaactcaaacaaaaaagtaaatcaagcaatttaagcatgttatggacaacgtctcaaacggttttaaccttcacgtacaactaatgagtagattatatattatagtgtagctaaacacatacttatatatatatatatatatattaatattaactacaatttttttttgtcaagattcgtatagcctcctaaagtaaaattaacctgactcaaactagaataccaggtaaatgacgagtgagtcaagtttgactcgatctgtatgaaacactcaaagagtatttcacttattttcttggtgttttgtgatagttggtcgacatgttaattctaagcatgcaagagaaaaaaggatcgtttgctaagttcaaacatattttataatctatgaagttcttttaatttgtttcctttcatatctcttcatgacgcgtgtaaaagagatacggttaatttcaatttaatagaacgaacacatgagtacattttaagatattttgaagtataataagaatctgaatcatgccgtcttaattaagagtttcatgagtacaattaacgatgaaaatagttggatggtttcatttattgatggtcatatgaccacagaccacatgggttcttcatcagaatagtactggtgtactacccactgacgagaattcaagtaatgatggtcttactaatcaagttatctagacgatcacaaggtcaagttcatgtatatctataattggctcataggaccaaaagttataccaaatagtaacactaagaaaattctctaaattaattagaggttgattgttaggtattaattcaaagtaacctaacgatatttaatttatatttttatatcccgattttaggaatgtgatgatgcatgtcgaaaaatttaagataaattataatttatattttaaatctcgattttgagaatgtgatgatgcatgtcaaaaaatctaagataaattatttgctacatatgttaccaaagtgcatttatcttttgaattaaacatttgattagaactctaataataagttttggatggatgatcaattatcattccatccaaaatttatatgaaaaatattatgtggtgatttgtatgactaataaacaagtttttgaaacctttaaaaataacttttgttaatctaaggtgaaatccacataccaaaataaggcgtaggaactataggtggtgattgtggcattgtatatatatatatatatatatacttcttttttatattcagtttaataataagaagaaactttattttaaaagtaattatataatttatcatataatacattttattatatatatatatatatatatatgaatataatatgttcggtttcctttttttttttctttctatattgtgaatttcaaaataaaaattattatgattcttatctgtaaaacccgcagttttaagaagaagaaaaaatatagatataggattgaatggtaggacattagttttaggctaaccggttggtcaaaagtaacacacacacaaaaacaagaaagaaagaataaaaacaaaaatagacatccacaaacagtataaacaatagactaatcgattcattttagtatcttcatgtgcaaggatgacctacctatgactaagaggaagacctacatggttttctttttatttttaattcataatatatagtaagtttcaggtagagaaaacatattttttaaagagtattttgtatcaaagaaacatcacctagaaaatttaactttcgaaaatcgaaacccgtctcaaacaccaacccatcgattgtggaaatattaaacaatgtgagtgggtgtgcatatgtgtcatgtgtatctctttgcatcttccatcatcactgtcatagatcacccacgattttaattattttatttattattatccaaaaattttggtataacaacaaaattttaaataatcccataatcacctgatgccataatataatatatgtgacttcattttccattaccaaatatatgatattcccggatatcttgggatatttcctgatctaatctaaaataatgatttaaattagattataatgttttgcaaaaaaaagttatgtttttttctcttttatttctttatttagtttaaaataaagatttaaaataagaaatgctttgtggtacatatgtatatctaatttttctaatgatttattgagaaaattgttaaaatatacgtaaatagttatattatatattaaaagttgtaatagaagaagaaaaaattggaaataaatagaaatgggatgatcaaaaaaatcatacatcttttaattctttaatacaattccttcacctaaatgttgtgcgccaaccttttttaatgaggttaattttagggtattatcactatatgtatttagaagattgtaaagttgagttattcattataatattgtattatttttttctgttcactttataaatattattgtatccttttattatattttaaaacatttattatctctagtctaatattatgtcagacaacagatattattgtccggcatgattgatgagaaatatcattgtccaacataattggtattcacactattatcgggtaacaaattagtaaccggttgtgaaaaatattgttaatttgattttcaatttcgttataggtggatgatcatcggcatgttggattgtaacttattttgataacatcaacatactttttatgttagattagtgtatcttcgggaacgaaaataaatgattatcaaccaaaatgattgttaattgttaacatacttatacgataacaaacaaaacatccagtttttgctccttctttaacttcgcaattccgactgtatctcttctgttaacatacttatctgataacaaacaaaatatccgattgttaacatacttatccgataacacaaaaaagattgttaattgttaacatacatatccgataacaaacaaaatatccagtttttactccttctttagcttcgcaattccgaccgtatctcttatgttgtagggcgacattgatatgggaagcggtaaaactacagccggtaacgaccaggttagatagttcgtgtgttgaataaatatttaaaacggttgtatagttgacaacctttggttaaggtctttgtgtggcttgttaattgttaatcacattattatcgagtaacattttcgtaacccgcatgtcttcaatattgttaatttggttttaaatttctttatagggggatgatcatcagcaggttagattgtaacttagttcgataacattttgcttacttgttttgttatgttatcattaattacatatgtagctgctaaaagtaggctaatttaatgtcttgtttctgtcaacgcatttaatgtccgatatttttttcagtcgcctacaaatatctctgacctgtaggggtatagttggaatattcgttttgcaagattaatcccacccaaatatcaaatctacatgtatacattcttaattaaaacttcttccatgtatatatttttaagggctatattaattggtatgctcagatgtttgaaaaaataagtaactatgcatgataacttgataataaaacctctctcctctgtaacatattttcttccaaaaatactcctataaaaccgaaataacaatatcaagttatagtgtacctcagcagcattaattgctgaagatatatttgaagatacacctcatcgacattggaaacataaaaaatgtgatatttgtgaggttgcgggtattaaaaacttaacgacacgatgtcaatttgtgtttcgacacgattcaaaactagtgggacgctttagtaacattaatatcgcgataatctcttatctgctaacgcaagcctttttattcgtagccttttaaaataagtctcaaacaattgtgtacgacgataatttgataacatgataatttcatatcgattccacacgttgttggtttgggtttttaaacaagaatcaaaacttatatcgctatttaataacattagtatcgcgataatctcgtatctgctaacgcaaaactaataacattctctgattactaaccgtataccgctaataggataagttcgtatctgataaacacgataacgttttagttagtttttaaaaaaaccataagcaaaagcctgcaagtggaaatggtaatgaagttagtcgttaaaactactagcagataattaaaataataacgacacgatgtcaatttgtgttttgacacgaatcaaagctagtgagacacttcagtaacattaaaacatacactcttatctgctaacgcgagcctcttgtttgtagtcttttaaattaagtctcaaacagttgcgtacgagcttagctggtgacaatgttagtcgatataccttctagcaaataagcaaaacaataacgagagttccacaggttgtattatgatgttttgcaaaaataatcaaaactatttatataacactatttaaaaaaaaccattaataaaataacacaacttttcagacatatctacataaaatcttctcctacactactacaatattatccctctacaagctacaacttacgcaatcgataatgtaggggtgcatgtgtaaaaattttgttaacagtgttgggtgcaaaatgaagggagtgaattaacaagtcttcggagcatatccaatgatattatcctatttttaactcacccctaattatatgcaactttatttccgtctaaattcttctattatattatataattaaaaaatacagcgtaaaaatactattttaatacattaaactgatgaaaaataaagatatcttcagaaactaaatccaaacaaggaaaacataaaaatataacgggtcatacttctcaaaagacaaaacaaaaagcatcaactaaaagcaataactctaaagaaaatattggctcacttaaattcctcaaaaccaggatgatcaaagtcactaattaacaacgcaagcaacaaaacctcctattatgaatcaaaactacctctcaaaaacaacgtgagcccagacttctattccggcaagaaagaaccaacacaaagtaatatactttcaaatttaatccgaaagaggcgatgtcgaaaaacaacttttgaacgcctaagtataaacctttgacctgaccaaacatcgatcaagttttgaatgtaaaaataaggagcgaaatcaacctcaaaattggatgacaccattctcagaaaaacacagcacaatactacttttaaaccctttttaaaatttactttttgtagttacataaattatatcaaatagtgtagcaccggttttttcccactttgtatgctgttttttaaaaagggtttctgcaaaacaacccttcaagtcaatttcgtttgtaagtttacccttcaaatccgaattatgcaagtcaatcccacaatctcaaaattcacccgcaatacaactctcccgtatatcgatgacatgacactcagataactcttattgaaaacataagggttttgttcaaacaaaccctcaatttttttctttttgcaagacaaactttcatgtcaaataaataaaggtgaaaccacaatctagaaaatctcttgcaacataacccttccgtgtatcgatgacgtgacagtcgataactcatttttgaattgataaccgtaactaaccgaatttttttcagattcgttctggttcattttttttatttcaaaacaacttgaattaaccaaatttaaccaaaattaaccaaaactaaccaaaaaaatacaaagatttggttctattctattttgtaaaagagtatttaattttgacaaatataactaacagtttttggatatttttgattatttaaagtatttgattgttttggttctaaaaataattaatattttgtgtttataattatagttatgggtattcgtttctaagtttttggatattttggttaaccgtttggttatcggttcagttttacttcatttaaaacttaaatcaataactcaattaaattatatccattaaagtaatatattagatagacttataaaatctctaaatgaattatcgactgtcatgtcatcgatggctatgttgcaggagattttccagattgtggtatgaactgtatttatttgaaatggaagtttgtcttgcaaaaaacaaaaaattaaggatttttttgcacaaagcccttatgttttcaaaaagagttatcgagtgccacatcatcaatacacgggagggctgtattgcgggtgacttttgagattgtgggattgacttgcataattcggacttggagggtaaacttgcaaacgagattgacttgaagggttattttgcagaaaacccttttaaaaacaatgaattttatttatgggtattataacaatcggtatttggaagactgtaaaattaagtccccaattattctattcgactgttcccaatactatttgaagcttacaaataccgttctacccctatagctcatttcaaattttctcattaccgctagcctagtagtgtgtcagacggcaacataatctttcgagagatttttttttgagaagcgtgatccaattaaaaaagtattgggaagaactctatctgaaattatctaacagtcgcgtcttcatgtcctctttgtttatctgttctcatctctctagaaaaaactgaagagacaccgtaacccgaagaaagtcgaagagaataacgcttatagagtagaaactcatctggatcgatttataagcaccgtcccgtaagcaccgtccctttggagccggtggatttctcattaaaaggtattgattggatttcaattcggcttgggtagggtttttgtcgctgctgtcgaccgcgcttacaccattgttttgtttccagatggacgacgttgaattaccgaaccggttggttgcgtttggagaagagccgcttggcaaaagggttaatgtgtaccacaaaatcaaaacactgtcagggattataaacgcgcttgatgaacaagagcgatctttcattctcaacagttctttggggggcttttagatttcccgaataaaccggcgttttcggcgagttttgggctctttttactgagtaggcaattggaagttgccaacccccatgagatttgggttgttttcgccagtactccggtccaattttcgttaagggagtttaagattgttaccggtcttccttgtggcaaatatccaaaagttcaaaagaagaagaagagaggaaccggtggtaagcagatgccctactacagtactttgtttggtcttgaagaagatgttacagttgagagggttattacaatgcttatgaaaagggtggtaacagatcgcgatataaggttgctagttatcacgacaaagttgtatccgataaatatttttaatattttggtaactagttatcacgacaaagttatcattacagtttacagtatatgttatacgctaataggatattattcttgcaggctcatctagatcctattatttttccggattcctggatgaatcccgcggaagacttaacatggttgaacgacaaagatgatgttagggtcgagaacatcgtgaagattgccgaggaaggcaagcctttttcgaatgaaatgtttggtggcgggtgtataccaactgaggttgtcgttgcgtcgaaaaaacaaaagagaggtggtaaaaccaaggtagtccgtggtaggaaagcaccaactaatgctagatcagctactggtttgagaaggaaaaaccgaagtcccatcgaagagaaaggtgaagggtctggtgggatagatatccctgctttttcctgcatgattgatgataaactgaaggcgcaagctgagaagatcatcaaagggatgattcattggtttacggaaaatttgagcgttgatgctggaaatcgaaaaggtttggtttctggggaacacggtactcaggctgaacatacggctgccgatgctgatggaaataccaacgatgtatcctccccggatccccctaacaaaaatgctgaagcggatgttaatcctattccaccgccgtgtcatcctgtacctatggagactgatttcacccttcctgcgtttcagggtgaccaagcgatatcagctgtagatgacgttgtttctttctacaactcggttgatgtaccggtccgtcattcgtgcggcggtaccaatttcaatgaagagaataaaattcaggtctgtggatacctacgatatctgttaatattttcgtaaccgatattttcttatacattgaagtttttatattctctaaatcataccgaatgtgcagggcgacgtggtaatgggtgatgatccaactacaggcgaggatgagcaggtattatgttagcggatactattttgacgcgttaattgtttgtttacctgatactttgtttcttacttactaactagtttcttttttattttcgtctatgtaggtctatactgggttgcacgatcattttagcaaaattatggtcggtattttacttataacgatagttaagatcacgattccctaccagtcatattgacccaaaaactgatcgttaaattaaaaactatcagttaaataacccgttagctggtaaatgttttgttggggttttatatatttggcccaaattattttaagttaagtgacgaatgatgtgatggttttagggcgacgctgtcatgggagttgaccatacgacggttcttaacgaccaggttagatggtaaacgtagatgaataaataagtgacagggttttaggagcctgcgcgtttaatttttgttgatttcgggaaatctaataagatacttaattgataacaatttcatttactgttaactaactcttaaggttctaaaattattagttacttttattcatttgtgtttaccagtgggcaaattttgtgctttcctatctaggatcttaaccggtcccccgccagtggtgaagaaggtcagggtgtctcgggacctttgtcaagccctcccccaaaatctgaaataaccgaggttagttgtctaattttcttagctatcagttacctgatattgctgttagttgctgactttattactaatcatcactccattcaggataccactctcggatctgatgttgaaccaaatacatcgacctccggcatctagatggaccccattccaaatgtctctcctgctgttccaccagtcggtccacccattccaactgcggtacacgccgaggtttagtactcacaaccttattctataaatacctttgtagctgctaaagatttaaatatcctgtgtcaggctgctgaagattttcctatttattcttcacaacccaaaacaagtgtcagcgaggaggtttgtctgcattttttttttcgggtgcattggcgatgtcacttccttgttaaattttcttgttattttttttagatcgtgataactaggactgttaactccaatactcccccgagccagtcgatcccttcgaagttttttttcccctttttcattatatttaatatcattattaggtactaaccacgttacattcgttacagtagcattatttagtaacgatactgaagcatgtttgtttatgatagtaacatgaataaattgtttttgttcaggttgcggatgatgcttctggtcgtgctactttgctaccgaccacacaggtaactattctgcgaccttagtaattgtaaatctgacaattaaacaaatctccactgttcatttcccatttttattacctcgcctcacaaatatatacgactgatgacgccaaacaggattcagatgaggtaaactgaacttttttacgcgttttttagtgttacaccttttttgcaacctcgttaatttgttttttcaattatttctaggatttttctactcgacccccggcttccggcgggaaactaacatctgggaaagatgtaggcggaatcgatgttgacgttaaccaaggaagaaagagcaaaagacccaggaccttgtcgagcaaattagatgggcagttccacttcgacaagaaacccaagctgctggttggtcacccatcccctttgctaagcgccggcgaggtggtgtctgatctagaagaacgttaccacaggtcactctcgaagctaaaggggaaaaggtaacgttcttagtcgttaattttgttatgggataacaattggatttacaattacccgaatctttgttgcagttctatcagcattgttggtgaagtggccctttccaacaaagagatttttgacatcattgagcggaagaaacatttcaccagcaaggttatggatgctctcatcaaatttcctaggcatctactaaggacagacggcatagatggtgagaaactgcgggttgatgtgcttggctcgaagttcgtttcacaactgactagactcttttcaaagtttgccaaaacaagcctgcctgaggatttaatattccctgcagcacttgttgatctacttatggggataggtgagtctgaccgtgtccgattgtttgcagaggatgattgtatgtatatgccattcaatttcgacaaaaaacattgggtggcattgtgtgttgatcttaagacgcataagatcactattattgattcgaacattcaacttcgacgtgactcagcgttgtatgcggaactacatccattggcagccatgctcccttacctcttcaaacaggccaactcgtctggtggtcctatcttgctgcaacctttcccgctggatcgtccccatgacatccctcaggttcttccctgtttgattccggtgtgctttcagtttatctaattcatgctcatgctgccagaggggttaaggaatccctggaatttgatgttgccgctctggatcaagaagtgaaaaaactcgtctcgactataatattgtccggtgttgcatcctaactcagaatttgtgtatcgttacctgtacgttttgatacgtttgaacttaattgcctgtttatttatttattttagattgtgttaacagtcgtttttattttggtgtatgggtttttgaatatgcttattaaaccataaccttttgttagttccatgtgggcctaattagtgggtaattttttcgctttggcttttcgtgacaaaagagttaaagtttgtttggctgctgcgttatcgaatatgttaacatgtaacctagatcaagaagtgaataaagtggaaaaactcctcagtaccaatttccgaatatgcttattataccataacctttttgttagttccatgtgggtctaactactcggtaattttaaactttggcttttcgtgacaaaacagttaaagtttgtttggctgctgcgttatcgaatatgttaacatgtaacctggattttagtgcttttataataatttatttctcggtgggttttggtactgaggagttttatttgttgtttggttataagcttatgttagcttttaacatagttattatcacatatgatttattagatactaagtcatgttcatatgctttttctgatttggcgcatcatagagtatcaatacgtatggccgctaaaagatagcttatccattaactaataggactagaatctatgtttattaccctataatcaattatgttacatgtcatgcagcaccataaaatataggttatcagttaatttttgtacggctgctgcgttattgaatatgttataagcttatgttatagtttagccggtaagcacgtgctgcactggcgaccaaataactcaacccttcggacttgaacattgatactatgttcctcattagatggataacgcaagctgcgtgggaagacatggggtaaacctagagatttgtgacaatctattaggtttatgaaacatttttaccatgataaacaaagccgtactagatgctaactaaattattattgcacgactaaagttatctcctaaatataacttgttatcagataaattaccttgcgtatgcttgcatatatagacgagtgcctgtctgaaacgaataccaaatctggatcatctggtatggcttctgttagcctctccatgaaccatgtccacgcatcgtcattctcgctgttcactatcccaaaagtaatggggaacacttgaaaatttgcatcttgagcgcttgctgctattaggcagcctccgtatcggcccctcaaatgagtcccaacaatcaccatgacctttcgcatatacgcataaccatggactgcagcaggtagagcgaaaaataagtacctaaaacgctccacacctttgttatatttttctgtatcaagtgccactaacgagttagggttggtttctagtggaagtttgaaataaggctgaatcaatgtgtagcttcccattgccgatctcatggcattatccatagctatttcttgagccctccatgccttcaagtacgacacatttaggttgaactcatcacggagcatctttctcaactcgttaggccttggacccctaccaacccccaggtatttggtccgcaccaatttaccaatcacagctatagatgcctgtttgtgaaagtctccccttgcgtcaacactgcaagtgtgcagttgtgttgcgcattttatctcgaatcggtcaatttcctctagctctgttgcatagacacgccacaggcatgtatggctcacgcacatagcgaagacaatgttagggcaagacttggcgtaaatgaagtggaactttcgccgtatcggatgtattgcaagttttgtcgtgcagtcttccttattcttgaacaatgagtcgtgcagtctttcaaatagatatctgccatcctccagctaacctgtttatttaacaccatcatttggtctggagtcgctatgatgttctcccttacaagatggtcaattctactcacccttggagtattaataggtgccatacagagtggtctgtccaggtctgagtagtagtgtgcaacctcgtcttgacctaagcataaggcggagaggactgttacgagtaagtttctgtttgagttagtcagcaaccttaatattatttactaatctgccatttactgaataacatacctatcttggcaagacaattgttgttagatgatatgatcctggtgaggaatcaatcccaatttcggcacttggaagatctggagtggatattctcgaaatagagacgacacacgactcaaagacgagatgatggattgaatgacgccacaaaaggatgcagaaaagccttttgatacgtcgagaaagatcaaaatttgacatacgaaaatggatccatgatctatttttaagagagagttttttataaaaagatagatgagttctcataagagattataaggggtttataaagaagagagaagtcttggaacacactcacaagactacattggaaaatgaaaagaaataaaaattagtttgaaaggttaaaaacaacccttctacttcttgcctccaaaatgactcttgaaatgctatttttgtcactcctcttgaccagcaaattacccacttggtttgggctcttcttgggcttgtgatggtcataaaattggctggacttcatatatattctattgggccaatttttgaatattataccatggtttggatcatcaaatgggtgatttgaatgtgaatcatttgcctcattaaaaaccttgtcaagaaaacctattgggacaaaacttgacaagggaaaaagagtacaaatgagacacatgcccatttgatgatcatgtatcaaaaccaacgaggttaagataacatctttcccatactctttcttcgctagaagctcgttttctggttcaaaatgctcctcaggttcaagctgctcctctgcttcaagctcttcctcggctacaagctcttgatcaaattccaagtcctttgtgctttccatgatcacatcactagataagtcatcctcgtccatcagctcttcagtacagaagctcacactttccaatggtgtcttaaatgttgagtcagttgaagacagcgccactgttgaagacaacgccactactgagacatcgggacgagctgggtctacgcttccaagggttagacgtattgactcctctggattggagcttgtgtgcccgataaccatgttatcctggacattagctgtagtactgtccagttgtccacccagcaagccagctagacgaatctctctttcctgcatctctctcaacatttctccatgttgtgttttcctccaaagtgcaaactccaagtccttaatgctctcatcgtccaagacacgttccttccctttagctgttgcacttgggtgggcttggattaggtttaacgggtcgacgcttcctacacccgtctcccttgtattttatcgaatatttattcccccacgcctgccgaagggagcaccgacaccgttcttgttttgcccggtaactctagccggaccataacttgagacgttaccgaataacattcttgttactgtcgaatcccaggctgcccttgtttcactgctattccaatacttatcggatatcgcttccgaagtcatacctcctatatctaagacgattcagtatgaattaactgtcggggtccccatattcctgcttatggttttgaccttcaagtgaacctcctctagatccgaccgaattgccataaacaacgtcatgtcttcgtcatcgataatatggatcgggtttgcacgctaccaatctggacccatcatccattgcggccattgataagatacttccacctcatcttttgtctgtagattcactctgtccttaacaacttcaatcaccttgaccaacgtatctctctcccggagcttgaccgccaagcataacccatccaactcggctacgtgctcatagcatccggactcatctcgtttccactctccccttaccagcctaacaaccatcgccatgaatactgttgataatcaaccataactgtaacgttagcggacaagtttgatagaagacaaagccctatgtcggggtgtaccatttattacactatacctaggcagaacaaagatccatgagcattaactgcttacctctgtctccaagtacttcgctcttgttttcttcgcagaagttaatgctgttttctttacagtgttatgtgtttctacttttgttgaggaagcaacgttgatagaggagtaataaataggccaacacgcaaccccgattaaatctttgatcatcattatgattctctgtttttacaagtaacgccgacgggatatatgtttccagagtttgttcccgcatttaatgcgagatattcgatatctttgttcagttggcttaatgtatgttaggggaatagggctaaaataggcatattcatttgcatgttttattccagctaaatatcaaccatacatgtatacttccttaattatgtagctctccatgaacatatatttcattgaccctttatttatttatattgctacttatctaatttccaattatatatttaatgttaaaatcttttaattgtgtttgattatatagatagtagataattaattgtgagattttttacatacataggtataaataatgacattctttgtgataatttactataataaatgttaactttaaaaatatacttcaaaaatactgatatagattatgcatcctcaatcttttctagcggaacactatacaagtcagttatcaaacttaccagaaacaagttcttcatttttgggttgccaaacatttcataaattgttttcaacttatgcggtttaggccatttatccaaaactatttaatttttatttgaaaaccgttcatgtgctaaatttagttagatatagttgatgtgtaaaatttagttagggaaagttgaggacgcgaactcaatttaaaaaacttccagacttgtgagccttctttgaattgaacatgagtcacatgtatcttactaactttagttagatcaaaattattattttttttcaaaatgaatgtttttttgatttatttttgttgttttttgttggacttttccgttaataagtgcaaagggcaaaaatatagaatgtatagtaggattacgtgcgaatagaccaaaacccaagactaaatcaaagtataatgaagataaacatgaaatcgaatactaggatttagtcattgacatgtgggaaggacttgttttccttatgcgacgagtcgagcggtgcaaatccgactagctaccactagtcgaccaaagaactgtgaaaaaaaatcctccttccgactaccgatttcgatttagatataccgcatcaaaatttccactaatcaccggagaagctccaccatgaactacatccaaattgatatagactaatcgttgctcctatttcatatgagcaacatgatttaatgaagatattattcctcgaaacaacttgactgaaacagagaggattgtgaaaaagacggaaacattgacaacgataaacaccgacagatggagatcatagcttacctaaagcaaaagaaaaaaaaaaacgaaaaaccagacaagccggtagaaaaagtccatcataaaaccataatttgtttaggtcgcacaaagcaaaatatacataaatcatggaaaggccagaaacaaaaccgaaacaaatttccgatcttagtcggaattaaacgatggaaaagactctctatctaaaagatctgagagagttaagaggaaaacaaactattttaattttttttatgagttctaatgatccatttaactcaacggtaaaattgctagcttacacacaaaagaattctaacatttattcaaaaatcatttgaaaaaaaaaatattgataaagacaaatcaaagtttcaactcttcaaaactattccaacttcataaagtaaaacatctttgcttattcgagcaagcaacattaaaaaagttatatgagcgtcattagatatttagattaggtacaattactttcaataataaactgtttttctaattcttttttttgtgtgtttcatataactgttacaagctctgacactctcattctatttataacaaacgtcttttaagaaaatgaatctcacttgatgtatcacaaacaagacatacttaactaattaatcccatatagctaaaaaccttttgaaagctaaatgtatgaatttcatacagtaaattcatgaaaatttatggatcttaagtctattcagcaacataacataatcaaatcagccaaactgaacaaaaaattataactaaattccgttaaattcaaccatattcaccccgaattcaactattactatttagacccttaatctggtgtataatttttctcatgttaaaaagaacataaataaagatggtgacattgacactggaggggtgtgtaagcctttaaggggttgttggaagtgctgctaatgatgagagtgtgataacgtagggtccaattctatttgctacgtagctcattccatttacaattacactacaatctttatcaaatcaaaaacatttccagttaagaaaaaacctagcattttttcatcatttaacatataaaacaaaaatataacattaaaaaatacataatatgtacgtaaatatataaatatatgttctcgtgtttaggaaaaaagattgtcagctacctaaaatatagtagaatatatggtcttacatgtcaagtaaactatagtaaaacttctataatttaatattcgataaattaataacttttataaattaataaattcttacggtctcaacttggaaccaatgtaaaaaatgacataaatcaataaattaataagataataacttttttgaaacttctatgtaaatatatggtctcatcaatatcataaattaataattgtataaatatatcaattatatatatacattatatgtacaaaatttctttgaaatatatttataatattttttgcttaaagttgtatttattcttattttatatgtagttctaatatgttactgtatcaaaaatattttgtgttggtttctacatatgacattaatttttacttataattgattctagaaagatattttctataatgaaaaaaaatcttacagaaattttttaaaagttactaaattaggaaaatctctttataaattaataaatactaatttatcgataaattaaaacctctctaaaattaataaaattttgcggtcccaacattattaatttatagaggttttactgtaaatgatatttagctacctgactaaattttaaattatttttttatattctttgtttagttttaaaattgaaaaagctaactattataacaatcaatggataaaattttgcaaaatatatttctattagatataaaatgtgttgtttgattatacaacaccaaacaaatctcttttttaatataaaaaattattttttaatatttttgttggttaacgctggtgaacgcttgagttagtggaccggttaacctgagattctatgtaaatgatgttgaccaaatgacgccatatatttcgtatatgtggccatacaatccataagcagcatgtagctgagtgttctttaatttagttggcatgtgtagtcatatattctgttatacttcagatagctgacaatcttttttcttcatgtttattatcaagcaaggcatacatttccatagactcgcatctctttttgtttgaaaatttcagatttaatttgtgtgcaatatatatgtccatgtgatcaacagaagacattaagttacttttagggatattggtaaaacaaaatgtaattacgaatatgagcatatgagtaaaaactaatttagtgatatagaaatttatattagttataaacaaaagtttatattaattagttataaaaaactgatgtgaacaaaacaaaaaaagttaaagaaaaagtgatttgtataaaatctacaaattagtgatagcttaataattgatggcaatatggtcttaggtcataatcaaaaccaaattcaataagcattaagaaaaaaagaaatcaattccataaactggttatgtgagcattcgtctaactttgtactacccattaaaaacaaagatggtattagttgtgagcattcgtctaactttgtactacccattaaaaacaaagatggtattagttgcaatatttttgcttcataaccttcgttcaaacttctagtgcattccatctatctccagttaatggcgacaattaaccaaaactcatgatttttttcccccactatcaagtcatgtaataactatagctaggaccaaatgggggctctaaacgacaaaacagaaaaatcaagatcttagaaacttttataaacgaaaaaataaaataggatggccaaaactagagcactatcaatattcttttccgggattggattgaatgccatgtcgaacccaagcaagattgacggtgaacattttaataccttccccatgcacgatcactttaatcgtacatgtcgaggatttggcttgacgtctacgcagttgcattggttgagaaattcatatgaacagaaaagaggtcaaaacaccaatggaatgattaggtgacgaatatttgttttcttctttctttttatttgttaaaatcataccaaagggtctggattgagccttagaccatttacgatatatatctctaattttttttctctaaaataaagcatgatttctctctaatatatcattttatatattactctaaaatacaggtaatgtaaaaaaaaattgctatatatatagaacaatcctataattctctctatttagaataacatatcatatagagtggggttgaagaaaatatactctataatagagttttagaggaagaaatacaatgaggtcggagatactcttacaagttttattcaagttacaaaaatccaatagaaaaagattactatcgacaaaaaaatggatcagaccctactgatgatcgattgcaaggtagccagagcattagatatggtgaacccgaaatccccacttcacgacagcctcaatagatcgaagaaacattaacaaaagagttcaattccttttgcattctcttttcaccgtgcaatcggtgacgaatacaaattgtctctcatgtaatttttagttactaaattttgcgacgcaaagtcattttgaaaaaatatttctcatatttttgtaatctacctaatagtcaatattttggatctctattatggtatacatatttttgaaaaaatacaatcttaacatcaaagataaatagtatagttaggaaaactgaaaaccataactttcaagaaaattttaaattagcacttggtttaaaccaattttagttgaggttaactaatttactttgaccttatttgttagacatacccaatatcgatcatcaatatactgtggatcatatacatgtatcggcacaatatagaagaatgaacatgcgaattttttttttattttttctttttcttataataatattttatctaaacttttgttttctactttttacttttaacatggatatatattttttacagttctagtacactaagtgtagggttaacaaaataatattcactacaaaaaagtgatggattacatcaattaactagaatcagaagtataaatgatactagtttaaattacttataagcaaatgacacaaataaataattcaacatcaattctaataagtgatttgttaattagtttgtttagtgtcaatttaatcaaattgatacaaatttgtattagtttgcatcacttcagaaaatggatacaaaaatatgtatttacatcaattaagataaccgatgtattcccttatttttattaacatcatttttaaaaatgatacaaaatatagatcaatagaaagtgatgctaagaacttaaattgtatcataaaattaagtgatattattttaaatcacttatgcataaatgagacaaatattgatgatttagaatcagttataatagctgatgttttaattaaatagtttagcatcaatttgataaattgatagaaatatatatattgattttgatttggatcattttaagatgttgatacaaacctatatatttacatcaatagataatcgttgtatttattaatttattattagcatcacttataaaacgatacaaattaaaatatcaattaaataaatgatgcaaaattagtatcaataataaaatgatgctaattaacttacatataatcaaaataaaaaaacacgtagtccattttatgtcactcaatcttaactgatcttaatctttttttccaaattttatcttaatctatgtgaattgtttttaaaactgttgtattttaaaattagcatgttttgaaagttgcacaaatattttttttctaaaacaatatacgttaaaaaaaaaccaatatatcacaaatctcatccataatttttttttctgtttgtttattatattcacaaacgtagatatattgttttggaatcaagattgtgttctatattttaaattgctaaaaatctgttttctcttttcttattctctaaattctcattttaattgttttttcgattatgtataaaaaactgttttgttaaaaatcgaaaattcattttcactaccccaaccaacccacgatctctccgtatctactcaaataaaacttgtagtattcccaaaattattgtatataaaatcagaagttccataaaactcttccttaaaaattctccagaaacatcaattttcacataattcttaaaaggatgccaaccatacaactccgatgaatatgagttatacgtgtacttctccaacacaaaatcatattgatccttatatgttcatcttctaaacctttccaagacgacgaagaattgtttttctgttcttatttttattattttgtatttctcattttctcacccatgactctgattttctatttattggttttcatactcagaaaatctccacagtgaagaaacaatgtcaccaaaacaatggaaaagaaaaagcttggacaagaaacaagatgtgtgttcttgaagaaatcatacctagatcttgaactaattaagttcatatcactttcttttttttttttgtatgtgtaaaatctctaatgaatttattaactgcgttaaatttatgtttttgtcttttgtaattgacgttctggtataattatttgtaaaaaaaaaatagaaaagatttagtagatattgaaaacgattttcctatataaaattatttaaaaacgaaacaaaaatatttaagataataattctgttataaattttgtagtttcttttaaccatcgtttattgaaaaatatttaacacaaatattaacatcaattactattaagtgatgtaaataattgaaatcaattctcttaattgacactaatactaacatcacttaaataaatagatgtaaaatttaacattatttttttcaattgacacatattcatatcagttagaataattgatgtaaatattttatatcttaacatcggtcattaattaactgatgtcaattatttgcatcaacaatatataagtcatttatttaagtgatgtaaaattcttttacatcaattataagtaatacaaatattcaaaataaatgatataaaatgacccttttttgtagtgattgcacaatgttttatagaaagatgaatatacatatatcagtttattgtttttggatctagaacttttttttcttcagtctcaaatattatatgtgactccttttagaatggcacacattataaattaagaaaaaggtattggctttaaaaacttgtactaacatatgctaaaacaacagtataaacctctttttgtaaaacaaataacacacaaatatctatatatattaataaatcatcaagcttttcacgacccactcaaagtaatcatgatcactcatactcatctgatctttatcattccaacaccacgccaccgttttaccaaaactaaacaactaaaagagcatctggttccgatttctcataattaagaaggagaaaaaatgctacatgtcaattcccatctttacaataataaattcgtgaaagttaatgtgatggacagacagtttagtgtacgggtacatgtcaattgttgggaatttaacttacaaaatataaaaagagaaaagctagctctaatatatgcgatggggggactcattaaaagagattcgttttagagttagccctaaaacttaattctgcgcttttgacatcacattcaatcccgttgttgttgtttttgtatgtgacacatatcaattgattgataacacgtgtcacgattgtgagccaaatttgatataataatatgaatttataaatttttttccttttttacctttccaacctaattttagtcctaatttttgtaatttttcaaaattttcattcattcaaatcatttattttctattaaaattttgtttttattttttggtatagaaaatgacttttaaagttaaaacaaaaacctcaaaaaaacaaaaaacaaaaaaaaactttgtaaactttcaaatttttcattcatcatatcatttgtttttccactaaaatttctgtttttctttgtctttgtatacgaaaatgacttttaaggttaaattaaaaaaccttaaaaaaaccaaaaaaaaacaaaaaaaaacaaaaaaaaactctttaaaattaggtaaaagttgaaaaaagacaaaacgttatattgccgaaaaaaggaatattaataattaaggccctaagaacatccttattggtaagttcttaaattagttcttatgataagaacatctcattttaactcttatataagagacaaaatgacatttatataaaagacaaaaaaaaatcccaagaactaatctaagaacttaccaataatgatgctttaagcatgcaaatgatatcattttaagcacaaatagtaatttatattgggctgataggcccataaactgcattttattggtaaagttttaggccccaagcatgtgtagcaaaatatcattttaagtcacaaatactcattcatattgggctaatgggcccataaacttcatttttatttgtgaagttaggcccacatattttgtaattcttcgtcttcttccacttttgtctttgagccgtcgaacaaaaacaagtagtctgaagacaaactacacaaaacccttgaggaaataaaactgcaaaattgaaattagggtttatactttaaagcagtcaccaaatccagccaccatctcttgctgaagccatgggacgctctcgagttcaagttaacaaagctcacaagactcgtttctcctctaaatcttctcgtaatctccatagaaccaaccttcaaggtaaaccccctaaatcctcaacaattcatctctttcaatctccacatactgaaaatcgcgtttgaatggaatcagatagtggccggattgggaaatcggatagtaactatgttaaaggagctaaagctgctcgtgttcaacgtggtaagatgcttagagagcagaagagagcagcagttttgaaggagaagagagcatcaggaggaattaacagtgctcctcgtgttatcgtgagtttttacatgtttgtgtgtttgtttgttgcaatgttccacttatgatattttctaatgatgataggttttgtttcctctctctgcttctgtggaattgaattcacttggtgaagatgttttgaagttgttatcttctgatggttctggaattgcttcttcgacagttgcatcttctgagtataagctacgagcaactgtatgtgtattcctaagatttgtttatatagatatatgaatatttgtgtgatcaatgttgtgactatatatattacaggtgttaaaggcgcctcatggggatcttctgacatgtatggaaatggccaaggtatgtgaattgtcttgtattcgtttgttggttctttcagtgagcagagtttgttataggtgtttactgattttttttggtactggtattaggttgctgatttgatggcttttgttgcatctgcaagtgctccgtgggaagagaatagctctaacttcatagattctttcggaagtcagtgtctttctgtgtttagatcaattggtctaccaagcactactgtgttgatccgtgtaagttctttctgctctatattagtagcgaccaggtttctgatttcttgaaattttgcttgaagttgagcttaacaagttcgttttgtatgattgcaggatttgcccagtgatgtgaaaaagaaaaatgagatgaaaaagatgtgtgcctctcaacttgcttctgaatttcctgaggattgtaagttttatccagcagataccagagatgagttgcataaggtaaatgtttatgactgataattttttatattattttactgagtggttttcaatagttttaatgttcttaattagtagaacatttctgggcttgtttgcagtttatgtggttattcaaggcgcaaaggcttactgtgcctcactggcgaagtcaacgatcatacattgtggctcgcaaggtgtgtgatttatgcttatataagttcattacatttaatctgactctgagaagaaaagggttttatagaaagtagaatatctctgtaatgttgaatggtgcatttaggctgggatgctggtggatgatgaaagctcaggaaagtgcactctacttctctctggttacttgcgtgctcgcaaactgtctgtaaatcaactggtaatcaagccattctgctatctatatcatgccttgtgctatacccatggatcccttgttaatttattttctcaaattaggtccatgtttctggcgttggggattttcaattctccaaaattgaagtgctgaaggatccatttcctttgaatgaaaggaaaaatcagaattccatggaattagatgattcacatgatgaagaggtatattatatataatattttctttacaaatcaacaaactattactttagaaaagatacattaagttgaatccttcagatatagttataggaaaagaggttatatagtttgttggaatgctgtcataatatcattttacacttaatttcattcttaaaataggatgttattttgctttcataatgctattttcacagctttcttctctttgtaaattcactttattttttgtacctgtgtttgatttgaccaggtattgaagtctctggttcctgatcccatgaaacaagagcctttagtaattgaaaacactccagatcctttagcaggggaacaggtaagtctgattagttctctaaaaaatgaaggtggcagttggctcgtgttgttatctgttctgggaagtcacttgtgcaattcttcctttgtgtagacatggccaacagaggaagaaatggctgaggctgacaaaaatcagaagcagggcaggctaaagaagaagactttgccgcgagggacttcagaatatcaggttcctggattatttttaacctgatgtttctagcctcattttaactattcttctgtcttgtgcaattttcctcaaaaataaatgttataagcgggtggccctcttattttgggttttatgatttgttttacaggctgcttggattgtggatgaaacagatgaagaggattccgataatggtgattctgatgataatggtatggtattggatagaggagaggattccaatcaagaaggaatgtatgaccaagaatttgaggatgacggaaaatcattgaacctgcgggatattgatactgaaactcagaatgaatccgaaatggtggtatacatttctgtccacctacttttatgacttacaaaacagtacttgtagcttcattgcattttttgttctcgtcgactatcttggtaatgttataagccaacttgctcattgttcaggacgatgaagacttgacagaagaacaaattaaggatgaaatcaagaaaatcaaagaggcatatgctgatgacgaaggttggtgtttatttcctctgtgtggagttatgttctgtatgagtcattgtgtgtctgtgtgtataaatgcaaatattcatttgagtccttgtagagtttctgtatctctcatgtgctaattgattttgtcttttctgtttttactcattaaaattttcttttatgttttgtcagaatttccagatgaagtagagactcccattgatgttcctgcaagaagacgttttgcaaagtacaggggtcttaaatccttcagaacctcctcgtgggatccaaatgtaataacactgatcttgatgtgaatttcattatatttttcacagttaagtgttgctaattttttataatttattggcaaatgcaggagtctttacctcaggactatgctagaatttttgcttttgataatgtcgcaaggactcaaaagcttgtgctcaagcaagccctgaagatggaagaagaagacagagatgattgtgtaccaattgggtcatatgtacggctgcatattaaagaagtgcctcttggtgctgcctctaaactatcttctcttgtgaacacaacgaaaccaattataggatttgggcttctgcagcatgaatccaagatgtcggttctgcattttaggtaatcactcttaagatatctgtttgttgagaccttgagtgctctgccctcttctcatcacctttgtctatgttttgcagcgtaaagaagtatgatggttacgaagctcctattaaaacaaaagaagagctaatgttccatgttggtttccgtcaattcattgcaaggtagcaaattttttctgctttatctactttagtaggttttcttgtttgcgatcttttgtaatttttgtcgtgggaatttccaggccggtatttgcgaccgacaatttcagctcagacaagcacaagatggagagattcctgcatccagggtgtttctcgttggcttcaatatacggccccatatctttcccaccccttcctttggtagttctgaagatttctgaagggtcggatcctcctgccattgctgcccttggttccttgaaaagcgtagaacccaacaaaataatcttaaagaagataatattaactgggtaatgacctcattccaaatacaatcacatattccagtttggatagatactaatgctctgacatttgaactggggagataaaaaacataatctgtagtaattctaagctgtttgaaatgtggtttggttcaggtaccctcagagagtatcgaaaatgaaagcttcagtcagatatatgttccacaaccccgaagacgtgaaatggttcaaggtaaaagagaaaaatagaatcgatggattgaataatatacgtattaatttttatgttaagctaaagctggcacaatgtttgtgtgtgcagcctgttgaagtatggtcaaaatgcgggcgtcgtggtcgcgtgaaggaaccagtaggcacacatggtaaggcattagtattaatagaagagattgccaagctagagttttgtttctggaattttccttatacatgtgagctgtgcaggggcaatgaaatgcatattcaatggagtggttcaacaacatgacgtagtgtgcatgaacttgtacaagcgcgcttatcccaagtggcctgaacgtctgtacccacagcttctctgattcgaattttttaaatgaagatgatgatgttcaagtttctctgaattgacgacattcttctttggtaatttatggtggtggtttagtggaagtcctccagttttgtcctgtatgtgataaaaatatgcaaattttcttctttattgctcactatacatatacatttggaatatggggttgaaccattgataagcttaattgttatgagaaaaatacttaaatagattgagcttgttcttattaaagacattgcttgcttgctcacaataagctacctatatttgattaatctgcctcatatatgggaatatcgtctttttcatagcccgacatataagctgtgttgaattcatacaagtatctaatttttattttttttggtcaactaaaaaagtatcgtacaagtatctattaaatgtactaaaacaaactctcactttcataaaattcaaattgcaaacctgaaatatacaaactaaaatatataaaaaacgtggaaaatgcttaacattgttaacccaccgtcaattcatgttgacatggattgtgacgtgcccaaagactccaaaacgacgtcgtttggagtgaaatgagatgccaaattttccgcataaacgacgtcgtttccgcataaatagattgctgattgtttttaggcttgttttagattttaggttctttgttgggtttaaggtacttggtgattgtttttaggcttgttttgcatcggatggtttatgcggaaaatttggcatctcatttcactccgaatgacgtcgttttggagtctctggccacgtaacaatccacgtcaacatgaattgacggtgagttaacagtgtcaagcattttccacattttttttttatattttagcacaatttgtatatttaaatttgaatttttatatcatacaagtttgaaatttgaattttatgaaagtgaggatatgttttagtacattttaatagatacttatatgaattcaacacagcttgtatgtcggggttgaaaaagctgattttcctcatatatggacatgagaggactaatacttgagcaagagattcgaagagatggacgttggatcaaatggatcaagaattatatcatctcacccataattcacaacattctaaatttatcgaaaaaatgataaagcaaaaaggctattacgctaataagctaaacaaacagatgtgatgtcattgtggttggtcaggggtaggtcaggctcaggaggtggagatggcccaaactcgaggtttgggtagacacccggaggtctctctcgtggttggatcgaaagcaactgtgttgaatcacctaccacatctgcccacccataatgtggctcagcccttcaccaaaacatgatatcaaggatagattaataaaccacaaaggttagattatatgttaagatgtaagctctttctctcttactcatagtatgtttcttcatccaccactatgtcccagctttctcctgtggtactctttccgtacttgtgaacctttctgcgatcaacgatctaatattagacctccatttacactaaatgcagtgcaaagacagacaaacaaacatctgaggcttccaagtaaacaaagttccttacccgtttccaaagtgttcctctccccacgttcttgaccaacctgaaaacgtgaggttatcgggttaggcgagattacaaacatagtcaaacaaaggaatttaaagaagaagaagaagaagaagaagaagaagaagaagaagaagaagaaggaactgacggtcgctgttaggtgatacatgccatgtctccccctgacgtgaaccaatcccactgaaaaatttctcttcccacttgtctccccatttggtccccaactctgtctcagcccacttgtctgtcctgtggattgttcaccaacaactaaatcaaaatcattaacacaatctttttgatctcaagaatttcacaaattaatgttcaagtaactctggctaacaaggagccttatatataaaccagtaaggaaaaaattgaggactagagagtagttagaatagaaaaccatttgagaacagatcctcttccatcataatgctccccccacttctcccaccatgactgctcattaagtctaccatacttatgtgctcctttctctgtccaccctttagcatcgtacttctcccacctgattttcagtgaatgatagttttagtccagtagaagaataagcttctcctttacatcaaacaaaagcaaacactgcagggtaatattagcaactggtgttgttattgacctaccatttctcgtaccaaccagcattttcagttcctgattttgcttgcttttgtgcactcctttcaatccttgctagattactgaaatttgatcaagttgacaatgagaggactgtaagaatctagcagcgcgaaaactgttggcaacgaagctatatctggtaaagggaatgttataacatagacctccactcatcttgatgaaggacttcttgccaagtttcccaccaagagtcaccctcagaatttttaccagatttctccacacctacaaaaagtacactccactgaaatgagaattcgtaaacaaaaaaaaaacagaactttgacacactcattaatcatcagtaacaagggataaggggcaaagggaaaggaattgcagcaaaacaaaatgatatcaattgaacttccaacagtttcaatgcttccaatattacatctatcaatacctaagagtcatccttgatgatttcaagtagagtaggataagagtacaatacctaactctttgtatccagtccagtcacttttctcccaccactgtcaaggatatcaataaatccgattaaacgcgtccacctggggtgatacttcatggggttacgaagaataacctcaagataactacactcagggaacaatacaaatgcaatcccagtatttacaatatcataaatcctctaaaaactacatttttccataacttcacaaggttatctcacaaagcaagcactagtcaagtaagtgaaacactagggaaacgattagtaccgtttcagtccattcagaagaaccatcatgagatcgaccacccatccttgaccacctacatctgtaaccattatctcccaaatcatgtccactttctctaaaccaactactaccatcttcattagtgccagcttcattcacattctcattcaacaaatcaatcccccaatccttttcattagctatcccagtgtctacaattataaaaaacaatttctcactgtaagacatctgaaccttgttacaaagcaacatgaagtgaaaattgttggacaaaatattatttaaactaagtgggcttaataaaattgaattgtgtgaatgatttgtgttttcgaattgtgcgaaaccagtttatagaagttgtatcctgtgatccttacatcacacagaaaccgtcgcaccacgggtgattcaaagggttaaagagttcatcctctcatgtctttacttaaacgtttatgatttcaatttcaattacttttacgtagtgttacctcttttaggaggagtatcacgagactgaggaccagtaagccttggagtacaacgaggatagaacttttcttgcttagacaaaaatcgagatctgccaaaaaaaaacaacaattgaaaacaaaaacactcacatgaacattccccataaaagataaggaagtcttacttaggagaagcaaatggcactgcagaggaagaagttttgattccggcaccgtgagcactcatcttctgatcaaaacgccgttcctctgacttctcagagcggcgaatcggtgccaacatatctgcgaagcaggtgaatcttctcgtcggagctccggcttgatcacctttgaaccacttagttaggcgcaattcatggttacttgcgccaacgccgaatcgtcggagtttgatatcgagaagagagattgcggagctagccgccatttcgctcattgactcgccatagaaatgaagaaattagaagaattgagaaaccctaggaagcgaatttgtagaactctcgattcgtggaagcgagaaagagagagagagagaagtgtttcagtttcagtttcagtttcagtccaagtagagaagaaaaagcccgagaggaggttttatattctgaaaaaacgagttttaattaaattgggcgtattattaatttactaacgtatgttaagcgagtgtagttattctaatcttcctttgtttatttttttttgttgtaatcatttgtgacaattgtatgattatcctgtagcagtgaattttgaacaatacccggacggtgaatcggactatgttttggtacactgagttactggatcaaccaggttcgatcacggatcaatccattaaaatttattatatgtatttaatatttatagagatcatacggttttataaataagaacataattataacattttaataatataagcaactctaaaaataataataaaatgattaatttttttaaaatccaactaaaagtataaaatcgcaaaacaaatacggacgagacattaacgtcgtaataaaagacgataatttgttctaacagagcaaataaacggaatattaatatcgtaattttttttattaatctgtttaacgacatgatttaaatggcaagtcaacaaaaactttgtcatttatttagaaagtcaacaaaaactttacgatttatttgtcttccgtgaagttcaagattaaatcgttccaaattcgaaagttggtgaatttttttgacatttttcccaaacaaatactaagaagtaagagattattaatgactcattggcaattacggaaaaattttataaaacatcatgaattcaaacaacgaatctcggttatctctttcaccatattgttaaatattcatcaaaatctaaaacatcaagaacacttagttgagtcaatctattaatataactaaaactcaattcaaaaagtttaatcaacaattcaagacttttaagttttaaaagttccaaaaataactcaaaaagttctaaaaattactaaacaaagtctaaaatcctaaattttgtttcaaaatcaaatgatttctttaaaacccatacccggccgtgccggccggttcaaccggttcactgggtcgcgagttaatggtggatttttgtggtttttttttatttttaaattgtctgctattaatattaaactcaaaccggagaaatgtttgggtcgtggtttaaccgatcgaaccggcgggtccgggtcaggcgtgaatactgtagtgtcgaggtgttaactttcttgttcacaacattttgaggtgatgtaaataattttttcagagttctaacgatagagtttagagtctataaaggttgttattattattttagaatagattacggttcaactctatgaaaaattgcaattaagcttccaactacacgaagtttgaactttttgcacaaactacccatattacaactcgataatttataatttcacaaattttgaaaattgaatcataactgtttgctttgctataccaactacatttggattcgattcgagttttcaggtttaggttaataatacacgttcgattatttctaatatttgggtcggatttggatcgtgttcagtttggtttggatttatccgatatacaatattagcaggaaaaactatccaaaatataaatatatatagtaaatactgcgagaaagtagccaaagtcatgttggttatagtgttacagattttaggtaattacatttattttttattttatatttccctttaataaagggcaaaatcgtgattttctttatcttcttcaacgacacaaaaaccctaaaatcactttatctacagctaggtatgtccatcggactagctgggccaggaacaacacgaagcctgcaaaatcagtatatattggagtctgacccgtaaaaattttgagcttatattttaaagcccaacctggcccttacaatgctataaggctttttccggggtgtttgggctttcttccgaagagaattttttttgatttataatatctcttggaaaaaatatatataaacgagttaattgaaactaaataaccactagtaattattaaaaccagtttagtttaaaaagaaaattttaaaaccaaataaataatctaaataccctatatattaatagagaaacacacttaagagaataacttttagctaccgtgttatttagagagatgtcatgctgacgtgtcgcaaccaacttgatttattgtccatcatttattagattatttacaaaatttgtcattagtattatatataaatatctcaagaacataataaattaaaaacaaattccaattaaagtaataaataattaaaaacaaaattttaattaaaacaacctaataattaaacaagtaatctttcggaacttaatatataaccctttttattttttctatataaacaaaaagattatatgttaacgaagatattaatatcaatcaatgtataggtaatcataatttctatgcgaaaaatcgttggttcaaataaatagaaaagtatattacattacataatacacaagaaaatttcagattttaaataataatccagtaaattttataattttttacaatatatatatttaataattgtttttccccgcactgtgcgggtaaactatctagttaattgtttaaactcataaccaaataaatataaagtgataatacttcaaactaaatagtggaacaaagattttcttttcacatttatagtaaaacacaattagaaaactagggttaaggttttcatctctttttttagaaaatcataaacaaaaatctatcaattaaacaaaaatattaacaaaacaaaaaaatattttcaagggtatttcaggctggtcagagtccggccgggcaaatccctgtaaacccttaccctgaaaggcccgattttttctggacataatttttaaagcccgagcccactatttttcagggatgggctggggtaccctgcagtatttacactaattgacttgtctacatgcatgtgccttcgttttcatcaccattttcacttgttctcttgcgttttgtaccaaaaaccttatagatttaacatatagacaagaaaatgagcaaaaataacttcatgaaagcttgaaaacagacctaattgaacaaaagaacgatgattaggataaaatatcggattactaatcctaaaggaggtttaccgatgaatttatgtaaaagtatgaattagagcttatgtatatgttcagatctcttcgcgttcacttttgatatctagtaatatccgaacgtgatcgaattttcgatattcttagattcatgacccatttaggtatttttgaggatctgtacccgatccaaatcgcctatcttgggtctgggattcagatctgttttttcttcccactcctagcttataaatatcttttgtttttgtttaatcccgtcctaaaacatccaaatgattacaactcgatttttaaaagtgatgcgattatagattgtcaagtttttggtacatggtaaacacctaaacttaacccaaattttttgttaagaatataccaaactgaacaaagaggaaccaataccaaaattaacatactaatcgaatggatgctaaacataagaaccaaaaacattgaaaccaaactagtaccaaaccgaaaccaaactggttcagaaccaaaagaacatctaccgaaccaaaacaaaaactacccaaaagtattttggttctaagcaggtttctcaatcaaaataacgaactgatactgaaccaaatatccaaatgcccatgattatgcgcttcatacctaaattacaacaaatgcattttcctcgaacaattgttacattcaaaatttattattaaactaatatacgttcaaatatcaagacattgacagtgtcagactgtacgtcaaccattaaatactaatgataaagacgccactgtgcgatgacatgacaatcaacatattcaatacgatgttgttttggttaaataaaacaaaaacaaatcaatgatagtaaggttcaaaccactaagtttacatgtcatggactaatatctcctagtttttgttgaatcattttttttggtggactagctattaattacttataacaatagctaatttatttaattatgagtaaaattatcatctaaaagaaatagagccctcttttaattaatttctttactgactaaatgttataaaaaaatgtgaaatacttcataaatgttaatgttttgagtttgtttaagaaaaatgttatttaaaagttaatactgaaaccaaatataataaagagtgagttaaaaatttatacatgcaccatcaaataattaagaatctatacatgaaaaccatttatttaggtaacttttttcaactaaaatctatatgaaaaatatacccctacaaagagatatgataaaactgaggatacttagcagataacgcattatcgagataatatcgttagcgaaatatggatggggtttgatgcatggatgaaatgacatagagtacaaaccaacttaatatgttaataatatatttgatgatataaacaaattttcagttattgaaccaatgtttagatttcaaagacacatatatatatacgaagacgataacattattattaaaaggtaacaaaatatttagcatgaagagcaaaaaaagttgacttgctactgaataattatgtagaaaaaatacatgtatcagaataaatagcagataacgtattatcaggataatattgttagcgaaatatggatgggattttgatatatggttgaaaaaacttaagatacaaacctacttaacatgttaataatacagttgacgatataaacaaattaccagctattgaatcaatgatttgatttcaaagattgtataattatgggaagatgataacattattataaaaaggtaacaaaatatttaacgtcaagagcaaatatgatataggagtataaaggtattttcataatggagagagaatgctcaacaatagctttttctgacacataattttgtaatcttctatgtatatagattcataataccctataataaaagatgtaacctttttgcttgttcttaattttttgtggcttaggaaaaatgctctattctacttaatgaagcacaactttgggttacataataacaacattagtacaaaccactaaattacatgtcttggtttaattatatcatagttttttttgggaccaccaaaatcgaacatatggcatatgccctttcatcccaaaacttcaatagctatcatttttcaaaccattatagaattcaaatttcatgcctaaattaataaacattatgcaaaaactaacattgacttagccgatgtccgttaatgttccatgcttaaacctccactggacagttgacgtgacatgcgaatggcattaaacgacgtcttttgggtatggtgtaatacatagattcaaaatgacgtcgttttaagtatagagaatgatgcggacatccaaatcaaaccaaaccgggagcataccaaaccaaccatacatctatcaaaccgattgataaggagattttggaggactcttgcccaattggagtctcaatcaagcacaaggcgtagggttaattattcaccagcaaattaactctaagaagactaatgatgattcaagaagggtcaaagaccagcgagtcgaatcaccatattgtggggatatgaccgttgcactatttttcccttatctagggtttgtccaattgggtttacctagaaaggtttttaacgaggcaacatcaagttatcaaggaatcatttaccaagcaaatgatttaaagatatcacaagtacatgacgtacttgctagcagaccggctaaacgattcgctggactacttgctgaactaccttctgaagtaccgcacgaaatgaagccaaacaaggaaatcttccttattgtacacttggacgcacctcaaagctacatatggaaaccagtagaacatctggaccacacaatacatgtaccacacgaactttggtacatcttaccacacaagaacccgcagagttactacttgctatatatggagccgaaggagatcaatttccaacaactctttccttctttgtttgtgcgcttatgtgagaatcttgagaccctccagtacattccaagacgtcacaacttcctctccaagttgacaagatacaaggcccacctcactcaccttatttggacatattctacaattaatgtccaatattttcatttatgctttgtttctttctttgaagtcttagacattgtactcagctctatataagttgatttctcattcattgtaaagcacccttgatcattttaaagtaatagaaaatgttttcttgtcaaagttgagtctttgtcatttgttctgtagttctttgtgagtgagtcactaagtacttcaggaatctgcggattaagtttgttgagtgattcaacatcctttatttgttcattgatcgagtgagtcgattaacccactgattgagcgagtcaatcacctttctatccatcatttccccttgaattgattccacacgagagaagcgatcgccagcgtatcagatcatcaccttcatcatcccatcttacgcgtggcaaatttggaactcttatcatcaagtgatcaaaagatggattagctccaattcttgcatcagagaataaattaagtttcaacaataagttaaaaaaataatattctacatattcaaaacgatgttgttttaagtctacgtacgagtccataccaaaaagacgttgttttaaactattcacgtgtcgcatcaactcttcgacataatgaaagcttagtcatcaaaaattaacggttgattgatatcgtctaagtcaatgttggttttcacataatgtttaaaatgcaaggtaagaaatttgaattttaaaatgctatagattaaaaaatgcattatattgaagtttaggtgtgaaagagcatatgataaaatgttcgagttgattttggccattttcgtgttaggtggttttgttctatcaatggataatttgttttgcattcataaaatggcttggagtgaaaacccatcttttagctggttctcatcaagctcgcaacatatggagttaacttcaaccgtatatactatgtgcattgatcaagacaaagcaagagaccgtctttcctgtttaaatgttaaatgcatgaacaaatatatttaatttttttaaaaaagttaactaattttaataattaatataattaaatgaatgggaaggagcggctccttcaaaaacaatttacatctagtcatgaagtgatgttaaagcattgtattttatctcaatgtgacgattttatactgttttttcaatgatgcgtaaaaattggattgcggagttgaatggacaattatatcatcggttattatattccttttgaactaacataactggaaaagcttattgtaacaaaatatgtttgaaatctttggttattacattattaacgcacaatttgaatctcgttgggagcatctcaaaagtccacatatgtctaacatggcatgtgaaagtataaagatacgcaaagatgatctaattttcgtcagattctctacacaaggtgcattactgaaacagtcaacaagtttccttgtagccatcaattgagagttggttgtggagagctaacaaagtatgccctatgaaaactagattaggtgtaaccaagaggactttgtctaccatgttcttatttgatactaagtatgcaaagaatagaaggattctttgaaaatatttagattccacctccattgttagaattataacttgttgaagcaaaccaaatttgaaggatctcttcaacgaggagaggataattacagattccggatcataggatttttcgagtatataggtcaacaacatcaaatatgatggttaacaatccctaggatctgatggccatgaattataatttagtcaatgaatctttaaatagtaatcattgactattctagaagagatataaagtaccgttgtgaacctcaactcggatatattgccttagcaattttactatttggttaaaatcaattgaatgcatccttggttctagcacaaaccaaaattgggaggacacactccattttctcaaaacatttttccacgggcttgactctatcctacttcactcgacattcgaaattcattggctctacaataaaacctctgtagattaatataccataaatcaataagcaataaataatataacaaaatttgatctaagtcgggtaaatgtaaaaatataacaaaatttgataagataataatataatatttgttttagaatctcaatttaggtccatggtctcattatcataaattaataattataggaataacacacacatatatataacatataacttactaatgtatgattttagtgtatttttttaaataatcgaaattttgttataattattttctaatttttattgtataacacaattgttatgttatgttatgtttatccacatcttattgtattgtcgtatataggttcgtcataaaattggcaaaatttatagtaagtttttacatgtgaatatgcatcctttttcatttcgttaacctgatagactattaaaatatatgacaattgaggtcatttattaaaaatttaatgtatattacctatcatctttgttctttaatggcattttaaaaagagtaaattagaaaaatgccttcttgttgagttttcatttgaaaaataccgtatcctttttttcattttttaaacaattaatttttaatatattaatgtattaaattcgcctcattaaaatttagtaataacgaaaaaaataaattaaacttaaaacagaaaacaataatcataaaataaaatttgatgtaactaataattttaaagataattattatcttaaatatttttaaacaaaatttgtccaaaaagtaaaacataaactttattaagtgataaactttatttttaaatattattttattaaattttaagatataaaataaaataaaatctttatctcagaaaattttaaaaaataattaagaattcaaatttaattcttatcttaaatatttttaaacaaaatttcgtctaaacaaataagcaagtaagttttattaagtgatagaatttagaatcttttttatattattttgttaaattaaaaaatatctaaaataaataactccttattctcaaaaaatagttgaaaacataattaagaattcaaatttatttttattgaaactttttcttctaaattttgaattttattttaatttgttaagaaaatagtttttattttaaatttggatataactgtcatctaacatattaagaattacaaatttttattaaaaatagaaaatgatgtatttttcaaatgaaaacaaaaaaatagggtagttttcaaaatttcccaaaacaattttctagaatttggaatattataaaaaaaaaactctctacatattaaaatttcttaatttatacataatttaatatcaccataaataaaaaaatatcatgtttgtaaccgcttttctacaatccgacttctaggcggtaaaagctttgataaaggattacaactttggtttgaaacaaggctctaaatgtaaaagttttctaatattctgctacattctctattttccgatgcactagttgtacaaaaggtatatttttctttgaatataatttaacattattttcaaaaaaaaaaaaaatcatgatctcaggattattgatttacagacgttttagtattagagggaaaactgaaatattggtatagaactctcaaaattttcataccaccagcaaaacagtaattcataaataggttaaaattttatttagtttttcaatatccccaaatttctaatttttagattttccctcaatttttaaaaactgtccagaataaccaattttgtttttttgtagcttggatctcagaaatttcagaagtagttatgaataaatcatctatatattagtgcttatgggtaagcccacaactattctcatcttttatttatttaattcttctatccattctattaaacacttttaattctatatgcaacttattgttatgaactaaacttatcaaaattaaatatctcaattttttacataagaaatttttttatataaggattttatttattttaaatgcattgtgtttttcaattcaacaatataaacatatagtacatgtattttaacaccaccaagcaagtctataagcctaaatttatgaatggcgtaaatgcaacttagctttatttatattatataaatctttaaaatattctaaaaatttaaaatttaaatttatttttgtcaatcaacaataatggaagatcattctatgattggtagcccaatccggagagaaatatttttatctataaactaaaagttgtgttattgtataatatttatatatcattattttaatttaaactattttatctataagcaatcagtttcatgatttatttaggtaagatttgcgtttaaactttttatatatgtaataagattctattaggaactaagcaatattattcttgagtcgctctatatgataatcaactattagcattccctccacgtggacactagtggatatgagaagacatgtatgtcgaaaaacatagacaagtgatcgatccttttggcttacgtgtttttgactttattttctatggtgtatccatttgcagcgccacatatttggacataatgatgtggcaccaagagatctttgactttcagataagcgtggcaaaaatctgagttatcgagctgaagtgtcgtatctgtttttagtggtctgtgacagctccacgtgtcaaagagaaaccagtgcttttatttgccattgacctaggaaaccaaacagcactctgttcgcggttttcacctctgtccggataaggttcatgtccaaatctcttttgcgaatggagaaaacaatagaaaaaaatagaattgaaagattggtatatgtttaaaaagaacttaatttcgaccaaaaaaatagcttcgtgtattgttgattagaaaaaaaaaaaacaagaccagtgaaacaacccatctttttttttttaaacataattaaatattctcataaatatttaattaaactgatttataaaactataaactgtaaattaaaaatattataaaaaaataattcaaccaacaaaatctgatcgggaacaaaaagctgtaaaatctgtaaattttattatttattattctatattaattacaaacaaatttgatatttaaatataattttttctaacaaaccaataataatttcaaatgtaaattatgttatcaattattttcttagtaagtttcaatttgttttttttttcttttttctttttttagtgattgaatgattcttgatcgattattatgattataaataatagtatttttcaaaaaaatatatatttttgaatgattctttttgtttgagtagttgtatagttttgagcagtcaaaaactcattaaaatatattttattacgaacaaaaatagctgattggaaaattatttaaagaaataattgaatgacataaataatgactgaattatatatcttatatagaaatctttacatatgtatgtaatcattgatttatgctatgtttattatttatgtatatgaattctgaagaatactatttagaccaacaataattgggatgataaaaataaaattattatttgttaaatagatcttaaaagaaagagaaaaaaataataataattaatttatcaaaaaaattgtgaaaaaatatatataaatttgtagagactttttaattattatggaaagaagaaaaaaaaagttttctacacatttattttaacacccgtgtatttgaggctttaaaaaagaaggagaaataaagaagaaaaaaataaaaaattggctttcagaactttaaaacaagaaagccaaaaaagtttgattggtagaaaaaaagaatattgccctctcagacactttttcaaaacattatacgtgtttcaacacttaaaaaacatacgacactttgccttggcaaatttactattatatcataaccgattgtcttatgtaatacaaaccaaacccgctataaccaaaccacttgtcggtttaagaacccgatgaatttgcagttacctccgttgaatttagaagactattttagaatcctgtaaaaacctaaatccagtaaaaaccttaaattactgtttgttgaagctgacgactccggcgaaatcgtcctctccatcgttttcggcgactgcgcaactcagacgattccggcgacgggttctctcttctaaaaccctaatttctatagtttatcgaatctgacgactgctaaattctctcacaaaccctaaaaatctccaatttctccgtcactgtccaacaccactgctttctctcttctgatctctccaccggtatttcccccaaatttctccatgttcttatatcgatttgaatttattttcatgtaaaatttgtattgtcgaaattcgatacagttattgtatatttggctgcttgattcataattttcaaattctatcttttgttctcttctctattgtttcattgtttagttttctttcgtatttcagtaaaaaacaagggaatgtcttgtttaggaaacgtaattcatttgtaacaaactcatttgattgacaaaaccatatacttcaaatttagacttgttttttttataaaaaagatctgcatatagttataattttcttttcctatatctattgctgacatatctatgatgagtttatctgtttgtgttataggatttggaagacaatttttcgactaaaccgatatcattggcagacaagtttattctgttacgctatggaaggtactcttaatctgttaatctaatctaagcaagcaatagacagacgtttgtgaattcgttttatttgatcctattatctgttaatctaatcttaatcttctgaactcgtttcttgctaatgacagggtcaacgtctcaggaaccatcttctcagtgtgattcataacttcctaatagactcttcgccaccgatcaatatccgaggggaaggctaaatatatactcaagaccagatattctatcctttatctggaaggtttttcatgggacaaaggaattagatttcattcttcaatcttgctttggacctctattccatttaccggttagtaagtgtgcgatgtcgggtaagcttatgcatgccttgctatgtaggcagctggtaacaaagaaaaattatgagctgtggacattatttggtggacacccaatgagactttcattacttgaatttgcttacgtgactggattgccctgtggtgagttttctgaggattacgatccagatgatgatccgatttttgttgttggcatgaagagttactggaacgagttaattagtctaaacaagactgttaccttaggggatgtatatgccatgctaaccaacaaacgcaagaccttgtcatctgaccacaaacttaggctcgcctttctacttattgtagatggtgtcctcatagcatcgaaccaaatcggtaggcttacatttaaatatgtagagatgttggcagatcttgaaaaattcctttcatttccttgaggtagagagtcatttttgaagacagtagtagggatgagacccgacaaacgaaatctcggtaagtgcactggtaaaagacagctgacaactgatcctatcaagagtttggtgaatcaacttcagcagaaaacattccgtttgaaaggtttcccccttgcgttgcagctcatagcatttcgtaacatacatggactgttagatttgctgttcgatgactcaacctcttagacaatcctccattggaaacgattaactcatccaaaacaagttatatcgcttcctcagattcatgctttagaaagcaactttaaggcattcttttttacctcagttatctatatggtgtctataatattctctttctatatattcagtcttatatactattaataaccttatatttttggacagctgccagtggatccgcttatagttggagacattaatgctgacaaaagttggacagagtaggacgatgaggtgaaagataagaaagttgcatacatgtatgatttgatactcgcatctcatcaattcaaaaaaagcgattggccaggaggtgatgacacattgcctccaatttcaatcccaaagaagaagctatctggtgttcacaaaaagcacattgtggatcgtaagaagaaattaggggtgaagtctgaggctcccaaatccaagcaaaggtattcaactcgtaataaaccagaactcaagctctctgatgatgagaagtccatgctcctcattgaactacaaactaaggtgaaagagctatcaaaccgtgtaatgaagcttgaaaaaacaagaaaagctgtcagattcaagcggtccacaaaactctcctccagttttgttgcacgttcttctagatcaaagcgcaagaagacaatggaggtgcctatccaatatcaatcccctgaggtattcaagatttcaaactgttttaaatatttgaacattatcatatacttgtgcatttctaaagtttatcgcataataaaacttttaattttctcctagactccatctcagtcacacacactgtctggacatgtatttggacagcatgaatttggagagcaagtttcaaacgataatttagataaagctcaagactcccgtgatagtaccccattgacaaacacggtagtgtaatagttaacttcaactatttccaaacttggtagaattaacgacgtcaacacatcttattgcaggtgattactgatgaccccatggatgtctttgttatcccacttcaatcggaggactctaataaggatgatgcaaatgaaggcaaccccatttttgacactgatgtcaaagatccaaatgccaatgaagcaaatgttgatagcaaaatgcaggtaattttataaatacaaacacaacaagttaaagcctttctttaaccatcaaaaatacatattattttgtgttgtctttaatgttaatcctgggtggacaatgtttcttggacacccataatgacttatatatataagagacattgtcgttcaagtctctatatttgactattgtaatttacaatcaggttgatccaagttcaaacccaagcgtaaaaaaactacttcctctcaaccaagaccatattttggatgtaagataatatagtatttgttggaccatttattacattatctctttggcgcagaccaatggttgttctgtgttttttttgaccaaattcattctacaattactttcaggactcatcggagagagatcctgcaatatattctgctttagatctgccaatagaacacaactctgaagaacagcaatcgaataccaatgaagcagatgatgatagcaaaatgcatgtacttttataaatgtaaacacaacaaatcaaagccatttttaaccttcgaaaatacatattctattttcctttctgtatctttaatcctgcgtggacaatgtttcatggaaacccataattaattatataagaaacattgtattccaattttctatagtctgagccatttgactattgtactatacaatcaggttgatccaagttcaaacctaagcgtcaaaaaacaacctcatctgaacatagacaatatgatggaggtaagataatatagtatttgttggtcctttttttacatataacccagaccaatggttgttatgtgtttttttgttaccaaattcattctacaattactttcatgactcattggacatggatcctgcattacattctgatttagatctgccaatagaacacaactctgaagaacatcaatcgaaggtcttcctttaaaattatgtctgaactatgattgaactagttttgttctttgtggatacgttataatttgcagataatatttgcttatgtttttctcaccatagttttgtgtacttcaacattcaggacaccatggaggcgcttgcagcatctcagtcattgttaggatttgcaaaattcgctaaaaagaaggtcaaccttatgtctatactaaattagtctcgcatgttcacttttaaattggacaggagtttgtggatacgttataatttgcagctaataatttcttatgtttttctcaccatcttattgtgtacttcaacatttaggccaccttagagttggttgcagtatctcattcattgttatagacgcaatcagaagtcaacatcgacggtgatcctatgaaggtatacagtatcaacaagtaacattttatggttttcggttcttgtgttattggacatgattatttggttactgaataatttgcaggttatatttcttataataggtcttctcattttatatttgcaaaaaatattttaatatattatcaaaacatatctcattaatgcaggctatggtattatatttccatccaatttatgatacaaattccaaatctgacaaacagtcagaatcttctcccacccatagtgccaatattgaactaactccaatggaggttttttcttatcatataattatgtccatctctgcacacattattttattagagatcagtttcaataatttttcttaaagataattacatatcctttttgacatatcctatcatgatcaaattactgattctggagacattggtggacatgatcttgatgataatcaggtatgctctatacaagataaacacaacttctttactactatacactaatggtcctactttcaaaccttatgatggttttgttctttgcattaatattaaattataatgtacaagaagaaggttatgttgatgtttcagattcatctccatcgcgagaaacagagaaaccaattctgtctgaagatgaagtttttcttgtagcagagttgttatcaaaataaaaaactggctcatatgaacttttaccttcaattagtaaatcagattttgcactgttttgcaataccctctccgctgcaccgaatacgtatggttatacatttattttatttatctccactacagttataatcttattattagcttatgctgttttctttcctcgtagtgaacatcttactttgtgtgaattcttaatttcaaactcattccttctatcacttgccaagcctacaaactgggtttcaactctggtataaaatcaacaattgttttactaatattacatttaaaatcattaatgtgacagtctaatctcgtattgtttgtttacctagcatatggaagttttggtttccttactatctcaaagacttgcgaccacacttactaaccagcgtgccgcttttgttcaaccatggtccgcaaaccatctacaaggaaaattcaaaagcttcaaagctgccaaattcaagtcacgcgtccggtggtcagaacccatgaaacgcttcatcgttgggcccaacactgaatggttcacggacattgataccatttacttgcatatgatatgggattcaaaacactgggtaggtcttgcaatcaatctgggagtctggtccgttgaaattcttgatccaaatacagatctttacaaggaagatgacgtacaacgtttcattgaacctgtttttacaattttgccctacctcatccaaaggtattgtaagcccgaatgttctcagaatcatggtcttcagccattcatatggagacaaatagatggcttatataagaatttgtgatctgctaactgtggcccggtggcaatgaagttccttgagtttcaggcaagtgataatctcccagaaaaatggcaaaaattacagataaacacgttgacgcttttaggcgtaaatatgccatggacatatatgaggagtttgtctgccctatctatgcatctgactttagtaacaagtgatcactttctcttctttttgtaatattaaccatctttactctccttttgaatattatcactctgtaagctatgttctgaacgtgtgtgttctattttgctttgttgaatagtaaacataatctaattgttgttttctgatatacaaggattgaatgaatgaattgttgaatagtatccattattttcattatacccaaaaggaacaatatctattttatatgatatacaaggattgaatgtgatatgcggttttataatggatagagtttgtatatcattggagataaattagggtttatttttgatttggggatgaattcgatttggggatttcttctcgacagatccctaattgggtcatcaattacgcctaaaatgtcgtcgtttcctcactaacagagagatgataacagttcttaacgtcgtctattggatctgttaatcgatttaacgtcgtgttttattaggcctagtcaacgcaaagttcgtgttttaaatgttagtcaatgtaagttgatgttttaaatggcctcctacgaagttgacgtattgattggccattttttgaaagttgagagattaaacgacatttttcccatatcatattattgtgttccatccatatatatctatccaaaatatataggatatgtggattattattttatactaaccatataataaaggtttgttacgtttagtagaattgtccaaatcttaaatactaaaacctaataaaagaacggagagaatacatgaaaaataaaggttcttagaagggtctaaataaaaagacaacattaaaatcgaatttcacatatttggacaagttttgtgtgctgccattttgcatcggcagcgccttgcattcattgctcgcactcggggctgggcccagtaagctccatcgatttgtacccatcctccgtcctctccataaggctccacccataaaggtgtcctcactacaagaaaacagtcgatttgtgagggaagaattactcgctaatccctcgcaaacagctaaaaacaagggatttgcgaggaaaacaagttcctcgcaaatcgcttctcgcaaatggttatatgtcgcaattccctcgcaaattttgcaagaaactgttttcctcgcaaatcacacgcaattgttgcctagtacttccctcgcaattactgcgacggatttgcgattcttttttaccgcctagcaaatctctagcagaatttgcgatggatttgcaagcgttctgcaacgtttttctgatatattaagacttgattaatgtctgattagcctctaattacctagttaattagttgttaattagagatgattttgtatgcaattcaaagcttaaatttcataaacttgttctaaatagataaatacacaatggaagcttaaattcaaaaacttatgctaaattgtttgaaacacaacaagaacttgttctaaagaaagagataacaaggaaaaagcaagacaatgttttgaaaatacagttgatggaggagaggatcctgttgcaaggttagctagggcagcagctgctgtctcctcattggccacctgcggttctggagcagtagacataaaaagcgaatcttcctactcctacacctctcctgtgcgttcttttttgaagtctatccgaaccgaattagcacttctcagatcagactaggcctcccccgcagagctgggcgccggggcatatgggctttatattctctacggcgtcaaccataagtttgattacatcgcgttcagttcgagtcaagcacatttctcttcttcctaagaggccgtcggggtgccttttgtgctttgcttgcctgttagttttgcgtcttttctttctttcttttgcctgttagacacaggtggttcatttgggttggcctgtcctgtttgtgtcgaggaaccacgtcgaagaattgcaaccaaagcagaatctttttcagcaagatagtcaaacaggatgtcgaagctattgatcctctcagcctgagattgagtgcatgcttcagcggcagccagcttctgagaaagtatgagcgaatcatcactaggaagcattggaccactatgggctgaggatgcttcaaactgcagagatccaaccccataaatcctttctttctttcgcggagcaacctgcaaagatcacaaacactcacaaggacacaacagaaaaaccatgagaaaccaagttcaaaagaattcagacacaaagtataatgaataagctgccaagattaagagaattttatatcaaacactagagacacaacacaaacatttcagacaaatacacaacacaaacacttcagacaagtacactaaagaattcagacaagtacagaagtacacaacagaacagaattcagctgccaagtacacaacagaattcagacaagtacacaacacaaagaatccagacacaaagtataatgaataagctgccaagattacgagaacttgatatcaaagactagagacacaacacaaacatttcagacaagtacacaacataattcagacaagtacacaatagaattcagacaagtacacaacacaacaagctgccaagtacacaacataattcagacaagtacacaacacaacaagctgccaagtacacaacataattcagacaagtacacaacacaacaagctgccaagtacacaacataattcagacaagtacacaacagaattcagacaagtacacaacacaacaagctgccaagtacacaacataattcagacaagtacacaacacaacaagctgccaagaaaaagcacagaagatttacctcagtaaaaatcttgttcttggcatgaacagacaatccacctgatccagtgctctccggattgtccattgagcacatatgtgactcttcctcttctatcctagatgtcacttgcttgtaaatctcctctgacttcccatcgatgaaagttccatccgcttttctgtgtgtctcatctagcagctctaggaaatcaggagttgtttctccagtcttctcacactgaaacagaaagagataaacaagttagattcataacattgtagtttaagtaatggtaaggagagaaaatacttatcttacccgttttcttgcacgagctttgtaagaggtctggcctgaacggtgtttatagatgcctttgccatccggatcatgatatctagcatttctgctgttgttactctttttctctgactttggatcttgccaaaactgtactagacctttccacacatcaggatcaatccattttggcttggcttcatcacccttctccttccaatttcccttccaccttgacacttgatcagacatcctagactttagctttgcttcaaacttaacccttactcttttgttaattgaacggtcccagttatatacttgctacaaaatagacaaagcaaacatcagactatgaaaccaaacaacaaaacaagcataaacatcaaaagagcacaaaacttactgcaaacgtttcataccatcgatcgattggagcctttgatgtctgtgaccaattggcatgaggttctttgaaatctctttcaaatatgctgcggactgttgctgcaactgtagagtcatcgtcaaacctacaacaacagcaacaaaacacataaggatctctatgtctttatacttctaagaaactacaatgctaagtacaaccaacctaaatccagagacttctaaggcaggaccaaaattctaaggcagaaccaacctaaatccagagacttctaaggcagaaccaaacttctaaggcagaactaaccaacttacaagacctaattccagagactataagcttaaccttaccagagagttcccggaggacgctttgggtctagccttttcaagctagcacgaccaggactatcgaggagctcttccagtgtcagattgttgagacggtcagcttgaacatcagaatgattaacagaaggctgagtcgttggcgttggaggcgatggtggaacggttgaacctgaacctgaaccttgaacccctgagatattccctccactaaaaagagaattgacatgcaacgggtcacgctgctgttgtctaaaccgtacataagtattatccgacggcatcttgcacaaaaaacaaatcaagagttagatctgggaaaaagaagtaagatcggagaagaagaataagttagatttgagagaagaacttagatcggagaaacagaggttacctttgaggcaaaacatatcgagtcggagaagaagagacgcggcggttctggagcacagatcaaagaagaagagaggcggcgaagagagtctgcgccgtaattatatcggagaagaagagaggcggcgatgagtataacagattagagaagaagaagaagagaggcggcgacggaattagatcggagaagaagagatccggcgccgaagagatcagagaagaagaagagaatcgaagaaaatttttagggttagggtttgatgcggctggtttgagcggagctcaaactaggtcttcgagtatatataggaatttatttcctcgcaaaaccctcgcgtagtttgctttgaaattgcgaggaagatttttaaaccaattaaaacgcactacatattgcgagggaatagcgaaaactcctcgcaagtccctcgcaacttatgatttttaataatttagggtttagggtaatatttgcgagggaagtgcgagtgcgtctagcaattccctcgcaatccttcaaccaattaactcaccattttgattcaatgtttgaatcagatctgatttagattctcctatttcgaataagactctcagcaaataaaaacatgactaaatattttaaataatttaaggtttatggtaaatatttgcgagggaagtgctacgacagacttgcaaacctctcgcaaagacctcgcaatgttgaatcaatttgaaaaaatacaagaaaacactacttaaaattattcagattagttattctgaatcattaggaagttaaatatctacattagaatctaatttcatctcaaaaactttaaatgtgcatttttcccaaatacatcaatgatgaacttatgtgttttcaataatatgaatcagaagtgtttaacatcttcaatatgaaatgttgatattgaaacatatacaatatgtttttgtgcatcaccatataatcaacttgtatgattatacagtcatttagatttacatttataaatggaaatcaaagatcccaaatcacttctatgtattttagggtttagggtaaagatttgcgagatttttgcgggtggtttgcgagggttgatactgttcattgcaaagtacttgtactttcctcgcaaatttgcgaggaagcagtctctcgcaatatttgcgagggattagcaacgtgcgtccgtggtgtagcaaaatacctgcaattctctcgcaaatttgcgagggattctttccctcgcaattgttcctcgcaaaacgactgttttcttgtagtgcctgtagcattcttcaacaaaattctcatatgctatccctttgtacaatacagcagtcaaggcatgtgcattgtttgcttcaagacatttattgaaaaaatgataatagatcgagtgtggcattgaccaccacatgaaataccgagatctgtcaagtcggacacaacatagtgtttcctctgaatacacaaccgccttaaataccagaccttccttaatcaaatttttcaatgcattcacgtcatcttcagtcaggtagctaacaattttagcaagcaatggaaggggcatgtgaaattttttgaatggcagttttctggccaaaaaataaaaacccaatcagacaatataaataaaagtataccgtaggagagattatgtattttgtgttgtttgcaaaaaccatttttacactacaaccggctgatggttcactgctgcatttctgccttctcataattgatatgtttgctcgcaagaaatcaaataatgagtaaattcgaaaacggagagaaattgtggatacttataaaaaaaaggatatggtttatattcttctattcttctacttcctttcattttgccccacaaacagagatttgaaaagcagaatattccctatcttaaccatttcgcaagtgttacggagatcagttttgatttggagacataatgtaaaagaaaatattcctaatttacttaactaaaaatcaaaaagtttttgtggatatgtagatcatgtggtagttatccagagaatattattattctcttttgccttgaaagaccaatctaaatttacttcccttcgtaacattgataaacttcggtatttcgggaatattcccaccttcacaactacaacttttaataaacctgaaaactataataattaatctaaccataataatatctagctacaaaaccatcacgattcgtttaagtttcttccatactccattccataagtttcaacttcaaaacatagaaattatgctcacattaacgaaggtcgacaagagtgaaccctcatttgtttcaggtgtcaaaaaggtagtccagcgtaacataaactatagttttctacgtttgacattcaacgtaaacataaaccaattgtttgctttcgtttttattttttacccgggttgcttttatccctgaaattcacatcccggcaccagtacttgctaaaattattagctacggtgctgaagatggcgtggatgctttgaaatccttggtgaaggctggaccattatttaaagtggctgtgtattcgaaggaaactctaagttgtgtccgccttgacaaatctcgttattatatgtggtggtccatgacgcactccatctattatcatttcttcacaaaatgtcttgaagccaaaaatccacatgctttgaatgttgtattgtacaaaccaatagcatatgggaattttgctgccgaatgctatagagctaccttatgggcggagctttacggagagtatggaggatagaaatcaatgtgttcataatgtgatgtccatcgttatctaatcatgtacatttctatacgtgataaatcttatatctttagaatgtgtgattctcctgttgtgccattgttctgttttaagaattcatctcacctctatttaatcctaggtaaattcaaacccccaactaactttgttggttgtcataaaagtgttgagcacgtttgtataagctaattccccagaaatgattctcaattgctaaccctgtttcgtggacatgttatcttggacagaacattgtaatggaaaaagtttatgaacacacatattaattgatgatatccgcaacctgcttcaagacgaatttccgaggtcaagacgaatttctgcttagtacaagacccattaaatccccatatcgtatttcaaactctatttacttttaatgaacattcaaagaaacaacgcttctttattacaagttacatcgtttaattcattcaatgaatcaacgcgtcgatattacaggttacatcgtttcactgtttatgcttccatcaaataaaccctttcattttgtataaatacctctgctactagtgacttcatcaagacaaccacatcacaaacgcaaaacaagagcttaacatatttctcagttttcgttactctttacttctccttttcacgatggttcaacatcactgtcggtacgagttgtctccgatggttactggttggacgatctatgtcatggtattgagaatttacaaaaagtttcttaacccgaacgctttcgaactacgtcttgtcttggccgatgaatgggtaaacaattttatccaatttcttttgcaatttgcagattttttctttacccgtgtatccctcaacccctaaaatattgttttaacagggcacccaaatagaagcaacaatcggatctcgtttctgtgccttctactttgacaggatcgaagagaatcaatggaaaacgataactacgtttatcgttcgacctaactgcgaagcaataagaacaactcctcatgagtttcgcattctattcatggatcaaaccatgccttggttggtaagtaatagcttcttcataaactccattcacttttttcaaaacatttattttttaaaaacagatatctccgacatatctcttatagatgttcttgggggcgctcgttgatgttggaattctgactattaccgcaagtaacgggaatgatgtggccggattcaagctgccgttcaaaatcctggataaaaagtacaattcttcaccatcaatttcagtttatttcaaacatctcatgtttatacatatttgtagtaaagtgagtttataatctcatatttttactgattttcagcaaggatatattgctatgcaaggcttatagagaaattgcagtggacttggagaaaagatttctagcatttcgcaataacaatgttgttattgcacttgcttggtggaagattgttagatattatgcatgtgctcaccgtttgaagattgttaaccatgcacctatatcaaccatgtatcccgaacctgatgttgaggaagtaaagaaattaaaatggttgtcgactaatggaagatgattagaactattacaatgcttgttgcttaaaattgttatctcatattcttctttttttgacctcttatgttttcctccaacataatttcactcttttagttgtaatatttttataatttgtcaaaaaaaaaagttgtagtatttttataagtgatattatatattaataataaagtttttctttattcataatttctcttttgtaattaatgcaacaaatacttgattaagtagtacagttgtaatccggtgtctgaattaagttcacctacgaaacatttatgaactgttttatagctgaagaattacccacgtacagtatcataactgtttgtacaacgtcaaactataattacttactcaaattgtttgaacttcttaatctgttgttctgactttgttatgtgaattctcgtttgcattccatctacatttctatataagttaagtcttatccttttaactatattgtttgtctttaatgacttcggtctatgaatgtataacctaatttcttctcatgtttacgaaaaaaaagaaaaaaaagtagaacctaaatccccataaatgagttccgtttgaattgcctgtaacaatacattgtaccatgtctatatattatattatagaccatgcgtatatatctgcttggacgttgtagtatggacatatctaatttactacaattattgccatgaaaaattatttggaatttttgtaggagccactaattatattcagtaacccatcgcgccacaacactccaccctcttaagtgatccatagtattagggttcccatttcatcacaatctcaaatccgttcccatcagcctggttcgctcctctttaattattggggtttcttcattactggcgatcacgaagcgcccttgcccctgttaggggaaatcaatttgccgtctagcctcttcgtcaacctttggttcaatttaacttacaggtaatgtttactcaataaatttctcaatccaattgagacactcattttctatagactgaaattgaaccaaaaattgcaaaatttaattttgaattggtatatagcctccaaaattcagtgttaacgttcgtactcattttctctcagcctcctccgttccctgatttccacatgcctgatcacgtagctgctaaaatagttagcttagtttccgaggacggtgtagatatgttaaatgcttggattcaatcaggaccagatggcaaagccgctgttttttcaagtgaaactctttcttctattcgactagataagtccccttttctttattcatatggctcaagaatcgtctagttatcacatgttttacaccaaatgcctcgccttaaaaaatccttacgccctatatcttcagagtttagtgctggcatttcatatgtttgagctccaggaagcaattgctatattagatggcataaaagacgttttcctacatactggtctactttacatcatgttccatagttgcgctggatcaattccgtgggaattttgtattcagtacaagcgaaggtattaccaatttagtgaagtcgacttattcgcagataaactaatgttccatatcaccgaggttggtccacgtcgccaagggacatacaaaaatttctgggagttcgaggattacggtgagtgttggtcggaccatcagaacctcaatgagtactagggacaatggtgtagcacatgtatctactattacatgtcccaagaaattgcactcatttcataaataatactttcagaagtaccaatttcatttatggtcatcttatcgttcttctcaattgcagacaaaattatgaatcctagtttttattcttgatttaatgtattagtttgttttgcatttttcggcaactttatttaatatattgttcgagtcttcacctttaaggtgtaacaggtattatacacataattaactttgttcagaactatgaattgcatttttgtatatgaatttattaatggaatagaagtggtaacttttacattaatataaaactgcacctatacttcccactaagcttcatccctcatgattgtgaattattaagagaaattttcaataaattactctgtttttattactttgtttttaaccgttttgctcagtacaaatccttctctctccaacacatcttactctttcgttcttcgcaacagattgataaaatgagtacatcatccaaatgtctacactctatcacacaacctatcaacacacatgtttaattttacatccatagaaacaatttagttttcattcattccacaaagtatatgtaacttctctaacttttcatatgcgttgtcaacagaggaagatcgccagcttatacattccggaaccaattctcgcactaattgttagctacgtttcacaagaaggaattgaggctctgaaaaactggattaaatctggtcatgatgggaaatctgcagctttctctgtcgagacactctcccgagttcgtttagacaaaagccccgacttcatcaacatgtcttcccccgactctattcacttctcattctactcaaaatgtcttgcaaaacaaaatccttacgctatgtatctccagagcttgaggctagggttcggttctctcgacctaatcggcgccatttcattattgaatgattgtaaagaggtcattcctatagccaaccttctttacattgctctaaaccgctgcgcatgtaacaaagtattagacgcttttaatactttcaaacgagagaacaagtgttttcccgatgtagatagcatggccaagacacttattggccacatttctgttttggaaccaaaacaattcggatcttacgttgagctctttcattatgaggattatccacactgttggctcatgcatgaattttacaaagaatataatggcgagagatgttcagattgcatctactacttcctcttcagagacatccttttgctttcctagtttattaagaaacatcatttacccattttcagatgtacatcgtttttttttctactttatatagtttattaatgtaatcttattatgaagttgtatgtaacttataaactagtgaacatctttctcggttttcatgactgatagagactctttcgagtttgcagcatgcatagcaaaattttatgactaaactaattccaaaattactaacgatcggttatatctgattggtctggtgtatgtggatagaaatataaatattcattttctatctacatggaaatattcagagacatccctttcattaccaagtttatcaaggtttttctattagaaaaaactaagctatataaaatgaaatcacatgtatttgtcgatattctataatatccaattcactaaatggccacattttctattcaaaaccaacaaaattctaaccttacatgcacttttacattacgatgcttttagcagaaatttgcaattgcatgagttttaaaaaagaatataatgggaaaagatgtttgtttacatggctaataggttctcctttgatttattaatctgagctgatctgaaaatatctttttcactataactaatttttcaacatatatttgtttacatgactgatagggtatctttcaatattgaagcataaaaattgaacaaattttccaattagatctaaataactcaaacgattggatatgatttgatggtcaactatatttggatagaaaactgaaatattcgattttcatctacgtgtacctattctgagacattcttgcgagtccctggtgtaacataaacagtataaataattaaacctaattagcatccaatacccaataaatatttcgattttttacacctacgcattacattacaaaagaaaaataattaatatcctaaatagcaatctcaaagccatccaccttaacaacttgttcaaattggatttgtacaacttgtcgtgttatgactcgtacctttgcacctcgagcaccggttctgctgcgtccttccagtcttaggtttcaacatttaccatgtacaaaccacattatgcattaggttttaacgatcaaatagaaaggactactttagcttaattttttcctaaccttgtatttccctgttgatggaattctggctacctttggcctccctaatggtctcgttgtatatggtggcaacatcgatttgtgttcaagctcttctggtatttcttcgtctattccaattgcttcagggaatactgcttcccggtaactcgaaaccttgtaggaaattttataactattcgcagccaccaaagcatgactacaagggatcttgagtttatcataactcttgcaagtgcactgcttcttttcaagatcaacaacatttcttccacctaacatgccatttatctcgtagctccagttggtgatcctcccaaccttgcttccattagttgttaacatgttttttgttatttgcttgtcaacttccgaaggaacgggacctttatgttcgagagacttcttctgacgcgcattaaaccatctagttaacatagacctgataaatcttatcaaccccacaatatgtgacgatcggcctttgtttaacgccttgtttaacgtctttgctataatgctagtcatcagatttaaacgatgtcccctgaaatataaccttgtccaattagccatttctatatcatgtagatacttaccgcaattttggttcatggattcaatctgtccataaagctctttaaactttgtactggtagccgcatatcctgcgttttttactaactgcgtcaaagctttgttcttgtacttagcttggatattcctacaaaggtgaataatacaagccccatgatttgcttgccgaaaaactctcttaacagtaacaaggattgacgagtgtctatctgataatatagttagagttttgttgtctgcagtgatccgctccaacttcgtaaagaaccaagtccaagaatcgtcattctcgctgtccacaacagcaaatccaagtggatagacttggaagtttgcatcatgatcactcgctgttagtaacacccccccccccacctttgtactttcctttcaaatgtgttccacctacaaccaatatccttctcaaatgctaaaatcttgctatcgaggcaccaaaagctaaacacagatacaaaaacccctctttgctttcatcttcaacatctttttgggtttctatatgtgttattgttcccgaattagttagcctcagtagatgcaaatattcagccagatagcaatatgattcttcattactcccggcaacattagttaaagctgatttcctagctctccaacacttgctgtatgacgcagagactctcaaatcttatagaactagttgttgtagatccatcgggacaggaccggacgaagcatcactgtacttggccttaaagacggatgcaataacttttgatgttgccttctgcatgaattgtcctctcgtctctaacgaatatgtgtgttgtagacttgctttcttaatttcaaagtagccagtacctttcatgagtgtcgccaaaattctccaatcacatttctcatctgaacaactaagaacaaattaattccactttgttcttgtttgcttgaaatgaaacatgttcttgatcgcatatatagccaaaccgatttggcaatcttctttgcttgcatacacttttcccttgtatatccctttgccatcatcctctatatccaaataaggtgtgttctctatctcatactcgatgtcttcaaataatggtgggatatcaaactcctcatcatcaacttcctccaacttccttgctctagctctcaatccgtgagagctcccaactctacaaccaaccttagcttttgcagcccattccgtttttactctctgcatcgtttacacctgaaccttcaccattcaaaaacacagcgtggtcaaagactccactacctgtgcactaaacaactttatccgcactggtgcctaccttatcatttaaaccctgaaaactcacgtgtttattatttttcccttgtaccttgcatctactccacccttagacatcaactcttcagcatttgagccaccataatcatccgacaggaaattaccccaaaactctttatcaaatccgccacagggcatagtatcatcagaaatatctatcccatcttcagtttcctctatattgtgttgtcgacaaaaattcatccacaaaaaagtcatcttcatcatcaacaataacatctttgttagatttcagcccaccgcttcttgctatttgttttttctgcttcgtgtaatgcatccatgaattcttcatctacagaagtcaccagaacaataggagattttgaaacactagaagatatatccccagaacatgtgtcagcatttctcgaaccactagctgtatcatacaaactttcaactttccgttttgcactacctgtgggtgtttcacaactcaaattcggtgtatcaaccttctcttcaaacttcccaaacaagttaagacccctgttttctctaagggtctttagatagtattgaagtccaacctcgcttgtaaccagaaccggtggagtcttatcctttgttgcaaatatattcttattcggtacagagtaacttaacataggattaacacccttaacgccaaacgcctacatgattgcttcgttcaacgcaaccaatgttattccctcatgaattggtacaaccctggagaaaagttggttacatatctccaatttccactttctattcgaagaacaaaaccactctccacaaataaccatgatatagtcgtccatcgaaccctagtcatataaacaaaatttttttttggttagattctgatttaagtaacaaaatagaatgtacgacattaataataatttaatgatatcagttttcaacaatcgtacctcctgcaccatgaaagttggccaaagattgaagattaaaacccagaatcttatgtgtttcaagggatctcgtgtttcagtttttggttattcgaaaagctggggaggtttgttagtttaatctcaaccgtttaaactgttaatatccgacgatcctcgttccttaataaccggtcattgtaaaccgcatacgaaaaccgtattttaacccaattctaacgaaaccaataaccggtttggaatgatatctgaatcgaatttgagggggtatatatatgtctttttctctaaaaggaaggaaaagtgcctctagttttaaaagtgtctatagtgcataaagtttctcggaaagtgcctcattgtcctacattccctagaaaaaaagctgtggcgacttttgaatactcctaaagtcctagaagtcatgtgccaatcacctcctaaataatttaaggatagtttgcaaaatgaagagacaaataagttgagattaatgtgtgaaataacaatatctttttttttaaaagagatttgcaaaaataactttttcctattaggtcatttttaaaactttctcctcttttgcggaaaatgattatgttaccctcaatgaaagattaggtaggtgattggttcgtctgtaacagtagatttattgcagtagaatttttgatgtaggtgtaggtttaattgctatagaaattaggttgtaggttttgttaatataatattaatacttaaaaaaattggttctagaaataagattttggttgtatgtatttttaaacaaaaaaatattattggtacattgtacttatgttttatataatattattcacaaatatcaatataatatatatatatatatatatatatatatatatatatatattaagaaacaatttgagttatacatatatcataaagtagatatttacctactatatttatctataaaattaaatttaatatatatatatgaaaactatagtaatgttttaaagaaaataaaaagtaaagtgaaaataaaaagagaaaaaggtacagaccttctaaagaccataaaattatgctttagaaaaacttgtacttacagccaaaataattacaaaattattatttggactgtgagaaaaaataagaaagctacaacatgattgtttcaattctgagggtgtaacttttttagtggctttataaattttctacaatccaaccaatcataggattttcttcctctcttctcttcgacacacaattcttcttccccgacagcgatttcctatttgaagattcgacgaaaaaattgccagatccggtgaagaaacttttcggctaagattctatggtaaatatgattctcagttgtgcaatttctggtggatttgctaacaattaatactcttgcaaatcaccctaaatcttatagtttagatctcgattttgatttattttgtatattgtttcacatatggatttagagagcaaaattctacctttacctgagcaaatctataaacaaggagaagaatcgattcaatagggattgttttgcaacattcggattggtctctagttaagagagtggagaatgccctaggcgatacattccttggtccattaattgatttagcaccaagaatgaaggcaaagaaaggagtaaaatttttggggaacatttttcattaccttaagctgcaaagagtcaagacaaaaggtttaactctttggtttagagttgattcccaaccactccggttcttcatgagagaatttttcctcacgacaggtaacttaaaggagtatatatgatttacaatcgttttaaaggataaatagtggtataaactgatttacaagggatattaaaagcttttaaaatggatttacatgatttacaattaattttaaagtataaacaagtggtattgaatgatttacaatggatatgaaaagcttttaaaaagggtttacatgatattcaatcagttttaaaggagacgaaagtggtataaaatgatttacaagaaatactaaaagcttttaaaaggggtttacatgtgaaggaagtggctcatattgttttgaagattagcctaagtatatggaagactctcggtcaaagagagggttaagtcaacactctcagaagaaagccatgtgagacgcacgtggatcgagttgccaaaattgtaacggacttgaaggcatttcagtgatttcgcattgttttgttagcttatcttcttcttcctctttcgagtttgttagattggagagtttgttaccgattaagagagaggttagagagagagaaagctctgagtgtgagagttgttgtacgatacactgattccaaagttctagtggatttccggagataacttcggcgagacgtagcgttttccggttaaggaaatgtgaactcgttaaacctctgtgtcatcgttctttgactttctctattgttcaatctatttacaaacgagagccgagttcgaatagagtgattgtgagttgagtattgaagattaaacctcacaaattggtataagagtttacggttgttaaggaagatagaattcgagatggctggaacttcgatcataatctttgatggatcaagagacttctcattgtaaaagacacgaatcatggctcatcttagcgtcatcgtattgaaagactgtgattgggaagactccaccacctcttactgaggaaaaagaggaagatcctgagaagtggaagaagagagatgttgatgaagcatcaagactcgaacgctgtgatatgataaagcgaagaatgttattttcttaatgttgcagataaagtcttgaagaagatcgagttgtgtgaaactgcagcttacgcatggacaactctagattgattgttcatgatttgatccttatcgcatagagtgtatactcaattgagtttctatacattccgatgcaagaaaataagaagatcgatgagaatattgatgatttcctaaagatcgtagtagatcttaatcatattcagattgaagtaagagatgaggttcaagcgatcttactgttgagttctttaccttctaggtatgatggtctagttgagacaatgaagtatagtaatagcagagagaagttaaggttaaatgatgtgatggttgcagcaagagataaagaaagggaaatgtctcagaataataggcttatagctgaaggtcactatgctcgcagaagaccagttggtaagaacaataatcaggggaataaaggcaagaataggtcttggtctaagtctgcggatggtaaaagagtgtgttggatttgtggcaaggaaaagcacttcaacgagcagtgttataagtggttagaaagaaacaaaccaaagtagcagggttctgacaatggagagtcaagtttggctaagtccagtgggaatcatgaccctgcaatgctgtcgatggccactgaagagaacttggtagctacagatagcattgcagatgaatgggtgataaggttcaaattaccctaagaactactctctcaaataagagatcaattgcagtatttaaggatcgatttccacaaagttcttttgttcaaacaatgagttgaatgtcgagattaagctagcaggtaatgattgaaataaaaagagaacaaagtaaaaagacagcagattgattggttgtaaacgattaaataaagagctaggaacatagtattcccaggaaactattggttagtagatctaataaaagctaagttgctatcgaaccattcttaaactcaaactctaattatggaataaccagtggtgttcggcgaaattccctatgtctatagctaagaataaccggagaagccgagagatcattaacctaaacatgcattctaaacgagttcaattgttcaccttagtagataggccgattcttattacacacctataaaccaggctcatcaaataatagatccaactacatatacctatggtggacatatctattatctggattcaagatctagttaattactctagatctagcattaagtataatcaaagatgaagaattctacaaataacctagcaaaggggacgatctactaaaccatatgaatccctaatgagaaaccctattcctaacaagaaaactactcagacatattgaatgaaacaaacaacatgattgaataagaaagtataaacacaacaaataagataagagtaagaagggatctcttcactgtattaagaactgaatgaatctctgaaaacaatggatgaatagcttatgtctctcaaaatagggatttgcaaagaaattgataaaaggaacttaggtctaaacaataacccataaaactatatataagccctataaaacgtctagagactaataacgcaaatagggaagtcttctgaggcaaatttcctcttctgtgaatttgaaagcgtcatggactttgctgggccgaaactggtgtcgatcgacaccaggagtgtgtggatcgacactctctctgaatccggaatccgaaatcgtccttagcttccttttccttagcttttgctccaaaatgtcccctcatctccattgttgtcccaatgcataaaatacctgaaaagacactaaaagactcgagaaataacataaagactgaaaatcctatacctaaaacatagataaaattggtaaaaatagggatataacaatgggtgcttgacacgggatgctctttccatatgaccccaagaagagacttgttcaaagattttaaagaactgagttcaggttttgtcaagacgggcaatgatacttattctgaggttaagggtattggcaatatcaagataagaaactgtgatgggactcaagtagtccttactgatgtgagatatgatataaccctatttttactgcttttagctatgatttaggtataggttttaaagtctatatgttatttctagagtcttatctagtctttttcaggtctttacatgtttgggattcatttggagataatggaacattctggaggaaaacaaagaatttatgatgttgaaaaaatctggaaactaaaaagcgcgtaggtgtagaacgacaccacccctggtgtcgagcgacaccaattgaaagacgcaacttattgaagttttgaagatttcaaatttggcccagaacattgtcctatgtttaatgaaggcccatcacatttttaagacatatatatctagtttttaggtcaatgaaggcccatcacatttttaagacatatatatcacatttttaagacatatatatctagtttttaggtcaatattcgctttgggaggctatttcctttttctattctgtttttgggagcaaaaccctgtggagactccctttagagaagattcttctaaactattttctcttgttattttcttataagatttctattctaatcatgttgtttgctacaatctccatgctgaagtagttttcttgttatgtttagggtttctcattagggatttagatgatttagtagatttcccccttgctaggttatatgtaggatttttcatcttgattattcttaatgctagttctagaatagctaactagaactgatattagagaatagatatgcccaccataggtacttgctatttgatctatcatagatgagcctaagcatttaagaaagaacatgtaggctcatagaagggctccagtttagatactaggtgaactaatcaaacttgataataatgagtttctcctgttttaggatttctcggcttctcctgttatctgaactctaagtatagagagtttcgcagaacaccactggttactctaaaattatagtttgagttcgagaaaggtgcgataataacctagctatttctagatctactatcatctatctcctaagaataccctaaacctgactcttttcctatcttatttacaccttcacctatattgcttttctttatttcttattttataatctattggtctagcttaattgaaatcatcataagtctattgtgtgaacatcgagagctcagtggaatttgatccttaagtgctaacgacgagctcttatttgagagagtaagcttaaggcaatttgagctatatcaaatttggcggtgttgccggggatctctttgcttcaccattagactaggtgtcgatttaagtctagacttttcttttcttctttttcgttttcttgtgtttcaggagcttcaaaaattcaattgcaacacaaagatgttgatagtaatacctgtttctgtaggagtgttaagggagagagctggccaagcatacaacgaggatggtcggaaaatcgatgagtagggaaacctgatacatgattttgccgattgtgacgatcgagaccacctgggtgtcgctcgacaccaaggcgaatacagagctgcagctattgcagaagggcgtgctatttaactagatgactacaccacgcctgatatgttctatgctagtcattccagctattctagtcaccaagcccaccctccacccacttctacgattaggatggaatacatgctagaatagattcttaagggccaagtgatgacgaatcaacggattgatagtctgtacgatgaagtttaggacttgaatgctcggatcaatagagaggatgttagtgtagttcagtcagagagtagaattcagcaccagaccttaaaggaaccactcacgactgcttgccacaatgatttgcagaaccaatcgacactaagtcacagtgtcgatcgacatgacctcgatgtcgatcgacactcttctggaacagacaatgcttcagcgtttaacggagcgaaatcgagcgggcttgataccgaagtgtcaacaacaaatgatagtgtcgatgaacaatgggcaaggacaacaccataatatgttaagattccaccggttgaataaactgagcagattatccttgaacatagatgtaacagctgtttcacgctttgtaaacagcttctatcagagttaccttatgtagacttcatgaacctggagtatgtactttatgattatatatgggagatgctatcgaaaggtattagtgctaaggacgcgagcttgcttaacgctgaaatcattgcacttctgatgtatgatgctccatagacgatgaaagacaagctggcaacacatatctctacaatagttaataccatcatgcccgatctaggcagttgtgtactcgataactctgtatctatagagagtccaattgctttgaatgagtgtgatgtggttatgcctcttgacatggacaggttgaagaagtcacccacaatagatggtcatgcactctttgtagagcactccatagacactggtattgatatagataaggttcatggtacaagctggcagctatagaaagcaagtcacgatctaattgctgagaatggatctgcagcgatggtgtcgatcgacaccaccaccagtatcaatcgacaccaccaccagtgtcgattgacaccaccaccagtgtcgatcgacaccccacacaggctgagccaaagttctttgttagagctggttttcgagttgagttcactgctgatactctaagcactatagtcacgtcacctactgcaccattactccttgatccacctctgaaacggcaaaggtactcatctcctcctcctaaacctccagatatcatcaataagactttgaaatatccagatctgttttacggctcagcaagccacgagtttctcgttgagggcttgttctttcttttcatgattgtgcaagtaaaagaagtcgaccacccatacctctgtcctgccctgctgacattcctcacttccttggtagatcgcacacaccgactacttatacgctacctttgatgatgcgaggttctactaggaagtatttacttcctccatctgatccacctgatccccaaactccaccaaagtcaaggtattgactctaaacaagcgcttagtgggaggcaacccactagaaagtttttttttttttttttttcgtttttcttttatttttctcgcttactctggatttgaatgtcactggggacagtgtcatttaagtctgggggaggcatttactaactacatttttctttttgagtcttattcttactcttatttttatttttaagtcgttttattgagtcaaaattttgttaggaattatgatcttttttctttagattattgcctggttgattaatgctgcaggttcgactcaatccgacaattggaaaatccagatggaaaatcaacaaacttgaggatatcttggtttccaacacaatccattaaggctggagctaatctcactgctcttccttttacctcttcaaacggttagtattcatagatcttgactccttgttcatacctgatattgagaccaatgtgaaaaagaaagtgttcctctccccataaaaaagaaaatgaaaatgagagattgacaggattttcagatagtgtataggggaaggaatgtttccaatgatcccattattatacattatttggaatgatcaattacaaaggttggaaaatgtcgagggtgtcgatccagtatgcgagttcccctttgtttactgtctaaaaagaataagtctgggggagagaaagtacaccaaagaaacaataatatgaagaatggtcgatttttcacagtatagtactggaatgagtctagaatgatcttgaatgttagcttatttgataagacccaacgatgaaatcctggtagatatagttgtggaacttaggtatgaaatctagaatattgtgtaagcttgcagagaagtacatgttggttagaatttgattagacttgctaggcatatggatttagttagaatgatcatggtaataggctagagaatgttgggagttcctttattttcaaacctcttccacgggttcggcttttgtgttttgcttgagggcaagcaaaagctaagtctggggagttgatataaccctatttttactgcttttatctatgatttaggtataggttttagagtctatttgttatttctagagtattttctcgtccttttcaggtctttacatgtttgagattcatttggagataatggagcattctggaggaaaaaagagaatttatgctgatgaaaaaatctggaaactaaaaagcgcgtaggtgtcgaacgacaccacccctggtgtcgagcgacaccaatacctgacggtaattgaaagacgcaacttattgaagttctgaagatttctaaattcggcctagaacattctcgtatgtttaatgaaggcccagcacgtttttaagacatatatatatatatatatctagttttcaggtcaatgtttagacccaaagctttgggaggctattccctttttctattctgtttttgcgagcaaaaccctgtggagactccttttagagaagattcttctaactattttctgttgttatattcttataagatttctattctaatcatgttgttagctacaatttccatgcttgagtagtttttctgttatgtttagggtttctcattagggatttagatgatttaatagattcccccttactaggttatttgtaggattcttcatcttgattgttcttaaagctagttctagagtagctaactagaacttgatattagataataggtatgcccaccataggtacttgctatttgattcatcatagatgagcctaagcatttaagaaagaacaggtaggttcatagaagggctctagttttgatactaggtgaactaatgaaacttgataataatacatgctttagtatagggtttctcggcttctctggttatcttaactctaagtatagagagttttgcggaacaccaccggttactctaaaatcatagtttgagttcgagaacggtgcgataacaacctagctatttctagatctactatcatctatcacctgagaataccctaaacctgactctattcccatcttatttacatcttgacctttattgcttttctttatttcttattatataatctattgttctagtttaattgaaatcattgataagtgtgtattttgcatgttttgagcatccatttgtcatcattttagcatcatatcttcactgttttataccatttcacaacatttatcatcactttgcgtgtttaggatagttttgcatgcatgttgcatatttgcgttgatttcaggtgatttggagttgttgacgagctatctggaagaagcggacatgatcatgacaaaccactcgaccaccaggtcgagtagaagacatcaccacttcacctcaccactcgaccccgaggtcgagtgccatcatctccatcaccagaccgtcactcgatcacttcactcgaccatgaggtcgagtgtcttcacctccatcatcagacaaccactcgacctactcactttaccaagaggtcgagtatctccaccacaccactcgactgcatactcgatgacaagcttcagagccttcttcattctgcactcaaccagacactcgagcacaaggaagaaaagaagactccagctattcactcgacctatcactcgaccacgtgggtcgagtacagttcttaacccgtccaaatacttcgtcgttttgggtattagggtttcgggatatttggctataagtagcatgtatttctcattttcgaaaggaagaagtttttaatctagttttatttccgcagcccttttgttctagactttttgtaatccggatttctctttatctattcagtattcagtattcagtttctgttcttgattttcgtttactgttgttcattctgttatcatactgctgttacactgctgttatcatgtcttcaacctgtttaacgtttatgctttctgttatgatgtctgagtagtgaataggtttctgaggatgggttagagtagtgtagaattctcagtatgctaggtgattgagtattgattgatatatcccttcaggattagttgttcttaatgcctattgctttctgatcaactggaatttgagcccagacatttccgcgcctaaaaggtgttcgatgaaatgtctgaaccactaattccacagattcgtgaccctgtaccaaggtattggttgcagggagcgttttggctttaacttgttgattcgtaatgcctgttaggttagctctcgtcaatggtgattgagtctgggactaggttagcttgagagtctctgttgcggtggcacttagatttggttaatgaacacgttgtctagggttaatttattgagcatgtcaatcacctgtaaactgaggaaacgaaactactcaattaccccatccttaggaattctttatctgattgattttattgtttactctactgctgtttactgcatcctgtcacctgttgcttagtttctgcaattcttactgttactcgacctggtactcgaccacccagtggtctggcaacagactgtgcaatcgagtacctctgtttcattttctgtctgttactcgacttgtcactcgacctcactcagtgctctgcaaagagctgtgttggtcgagtgttctactgtttctgtttgattttctgttttctgcatgttcacttaggactgctagaacacaccaaaacctgttattgcttggcttgacttagtgacttctgatcacatcttgattgttagcatcacacccatttggattgacaacctaaaatactacaacgacatgattggtgttttaggacaattgacttaaaaacttattatcaatttggcgccgttgccaattgggtgtttgtttgttacatttgagatttcagacttgcttagatcaagttgtttttcaattttcttttcagttacttactgtgtgtttttcttgttgtctttttgatccaggtacacctctgctgtatgcgaactcgatcaacatgcaaccagaacctccttttcaacgacaacatcaaccgcacagcccgcgaaatcagaaaaaggagaaccacagtaaaccctgtacctcagcaaccactcgttatggctgaagaacagaatcagcaaaatggccatgccaacattggtgctggagatgcaccacgtgatcaccgttaaaggaagggaatcgcacctcctgctatccagaataacaacttcgagattaagagtggtcttatctcgatgattcaggggaacaaattccatggtttgccaatggaggatccactcgaccaccttgatgaattcgataggctctgcaacctaacgaagatcaatggtgtcagtgaagacggattcaagctccgtttgttcccattttccttgggtgacaaagcacatatctgggagaagaatttgccccatgactcaatcaccacctgggatgattgtaagaaggcttttttgtcaaaattcttctccaatgccagaactgcaagactccgaaatgagatttctggtttctcacagaagactggtgaaagcttctgtgaagcatgggagcgtttcaaaggttacaccaaccaatgctctcatcatggctttactaaagcctctcttctcagcactctttacagaggagtcctaccacgcatcagaatgcttctggataccgccagcaatgggaatttccagaacaaggatgttgaagaaggctgggaattggttgagaaccttgctcaatcaaatggcaattataacgaaaactgtgataggaccgtcagaggaacagctgactctgatgacaaacacaggaaggagatcaaagcgctgaatgacaagctggacaggattcttcttagccagcataagcatgtgcacttccttgttgatgacgagcagtatgaagtccaagatggggagggtaaccagttggaagaagtaagctacatcaacaacaaccagggtggctacaaaggatacaacaacttcaaaaccaacaaccccaacctctcctaccgcagcaccaacgttgctaaccctcaggatcaggtgtatcctccacagcaacaacaaagtcagaacaaaccttttgttccctacaaccaaggtttcgttcctaagcagcaattccaggggaactaccagcaataaccacctgggtttgcacctccgcaacaccaaggtcctgctgctcctgacgctgatatgaaacaaatgctacaacagctgcttcacgggcaagcctcttgctccatggagatggcaaagaagatatctgagttacataacaagccggactgtagctacaatgatctcaatgtcaagatggaaacactggataccaaagtccgttacttagagggacattctacatcttcttcagctacaaaacagacaagccaactaccaggcaaagcagttcagaatccaaaagaatatgctcatgctatcaccctgcatagtggaaaagcacttccaactagggaggaaccaaagacggtcactgaggacagtgaagatcaagatggggaggatttaagtctcaagaaagatcaagctgacaaaccactcgacctgtcactcgagcaaccactcgacctgtcactccagcaatcactcgatccgccactcgacagctttactcgacctaccactcgacctgtcatcccagcagcatcaccaactgctccaaaaccagttgctgtcaaaaacaaggaaaaggtctttgtccctcctccctacaaaccgcagcttccatttcctagagtcacaagaaagcggtggcagacaaatatagagctatgtttgccaagaacattaaggaggttgagttgcggatacctcttgttgacgctctagcgctaatcccagactctcacaagtttctgaaagacttgattgtggagagaattcaagaagtgcaagggatggtggtattgagtcatgaatgcagcgctatcatacagaagaagatcattcctaagaagcttagtgatcctggttcgttcactctaccgtgctctttaggtccattggctttcaacagatgcctatgcgatttaggagcatcagtcagtctcatgccgctatctgtcgccaaaagattgggattcactcaatacaagtcctgcaatatatccctcatcctagctgacagatcagtaaggattcctcatggtttgctcgaaaacctcccaatcaggatcggtgctgtggagataccaactgactttgtagtcctggagatggatgaagagcccaaggacccgttgattctagggagacctttcttagccactgcaggagctatgattgatgtcaagaaagggaagattgatctgaaccttggcaaagactttaggatgacctttgatgtcaaagacgcgatgaagaagcctaccatagaagggcaactcttttggatcgaagaaatggatcagttagctgatgagttactggaagagctggcagaagaagatcatcttaacagtgctttaaccaaaagtggtgaagatgggtttctgcatttggaaacattgggataccagaagttgttagactcccataaagcgatggaagaatcagaaccctttgaggaattgaatggaccagcaacagaggtaatggtaatgagcgaagaagggtcaactcgagttcaacctgcactctcgaggacgtactcaagcaaccactcgaccttgtctaccgacgaacctagggagccgatcatttcaacttcagatgactggtctgaacttaaggcacctaaggttgatctcaaaccacttccaaaaggtctaaggtacgcgttccttggtccaaactctacttaccctgtgatcattaatgctgagttaaatagtgatgaagtgaacctgctattatctgagcttagaaagtataggagagcaattggttattcgttatccgacattaagggaatttcacctagtttatgtaaccataggatccatcttgaaaacgaatcctattccagcattgaaccacacaggaggttaaatcccaatttgaaagaagtagtgaaaaaagaaattttgaaactgcttgatgctggtgtcatctaccctatctctgatagtacttgggtttctccagtgcattgcgtccctaaaaaggatggaatgattgttgtcaaaaatgaaaaagatgaactgatccctactagaactataactggtcatagaatgtgcatagattataggaagttgaatgctgcatctaggaaagatcattttcctttaccattcattgaccaaatgcttgaacgtttggctaatcatccatattattgctttcttgatggatacagtggtttctttcaaataccaattcaccctaatgatcaagaaaaaaccactttcacgtgtccttatggaacttttgcctataaaagaatgccatttggtttatgcaatgctcctgcaacatttcagaggtgtatgacctctatattttcagacttaatcaaggagatggtggaggttttcatggacgatttttcggtctatggcccctctttctcttcatgtttgttgaatcttggcagggtattgaccaggtgcgaagagacgaatcttgttctcaattgggaaaagtgtcatttcatggtgaaggaaggcatagtattgggtcacaagatatcagagaagggtatagaggttgacaaaggaaaagttgaagtgatgatgcagctgcagccacctaaaacggtgaaggacatcagaagcttccttggtcatgctggattctatagaagattcattaaagacttttctaagatagccagaccgttaaccagactattgtgcaaggaaaccgaatttaaattcgatgatgactgcctcaaatcctttcaaaccatcaaggacgctttggtatctgctccggttgttcgagcgcctaattgggactatccatttgaaatcatgtgtgatgcatcagattacgcagtaggagctgttttaggccagaaaatagacaagaagcttcatgtcatatattacgccagccgaacgttggatgacgctcagggaagatatgcaacaactgagaaggagcttctagctgttgtattcgcatttgagaagttcagaagctatttggttggatcaaaggtaactgtctatacagaccatgcagctttgaggcatctgtatgccaagaaggatactaaaccaagactgttaagatggatacttttattgcaagagtttgacatggagatagtagataagaaaggcattgaaaatggcgcagcggaccatctgtcgaggatgagaattgaagaaccacttctgatagacgattcaatgccagaagaacagctcatggttgtagagttcttcggaaaaagctacagtgggaaagagttccaccaactgaatgctgttgaaggagaatctccatggtatgctgatcacgtcaattacttggcatgcggagtagagcctcccaacctgacaagttatgaaaggaagaagtttttcagagacatacaccattactactgggatgagccttatctttacactctctgtaaagataagatctacaggagatgtgtctcagaagatgaagtggaaggtatcctgctgcattgccatggctcagcatatggtggtcacttcgcgacgttcaagacagtgtccaagattcttcaagcaggcttttggtggccaacaatgtttaaggatgctcaggagtttgtttcaaagtgtgattcatgccagagaaaaggcaacatcagtagaagaaatgagatgcctcagaacccaatcttggaagttgagatctttgatgtatgggggattgattttatgggtccattcccatcttcatacggtaataaatatatactggtcgccgtagactacgtatcgaaatgggtcgaagctattgctagtcctaccaacgatgcaaaagttgtgctgaagttgttcaaaaccataatcttcccaagatttggagttcccagggtagtaatcagtgatggcggaaagcatttcatcaacaaggtttttgagaacctcttgaagaagcatggggtaaagcacaaggtcgccactccttataatccacagacaagcgggcaggttgagatctccaatagggagataaaaacaattctggaaaagactgttgggattacaaggaaagactggtctgcaaagctagatgatgcattatgggcttataggacaaccttcaaaacccccataggtacaactcctttcaatcttctctatggaaaatcatgtcatctacccgttgagctcgagtacaaagcaatgtgggcggtaaaacttctgaactttgacataaaaactgctgaggagaagcgattgatccaactcagtgacctcgatgagatccgtctagaagcttatgaaagttctaaaatctacaaggagagaaccaagcttttccatgacaagaagatcatcactaaggatttccaggttggtgatcaggtgctgctattcaactctcgcttgaaactctttccaggaaaacttaaatccagatggtctggccccttctgcatcactgaggtccgtccttatggagcagtcactctaactggtaagagtggagattttacagtaaatggtcaaaggctcaagaaatacttagcagaccaaatccttccagaggtgacatcggttcatctccaggagcttcttgatgattaaaggagtaaaggagtcaagctaatgactttaaacaagctcacttgggaggaagtcccatgactatccttgtaaataatttttacctttttgatatttttgatttgttttagttgtgtttgcggttttcagagacaagagaacaacgcggagatagagtaaaaatttaaaacttttactttatcgaagacctggagatcgagtgtacagcccgttggagtacaaaattttgaaaattttctgttgcacctgagaccctgcactcgtgtacattggtcgagtatatgtgatgtttaaaacccaaaaatttttaaatcatcattttactcgaccaacagaagctacagagacttgcagaaatttcctacagtttacagtaggttttctgcaaagaaattttctcaatcaacagtgtgtggaccacgcgctgaggataagctggagagagaatctaaaactcaacctagaccactcattttgaagcgctactcgaccactccaaatccactcgaccttccacttttcatttcaccgccgacactctaatctctctacaccacaaatcgccgtccaaagagctactcggccactgagaacttcactcgaccacctccctcgccgccgtcaccagcccatccactccgtcaaccgaccaaaccacttcactcgattccttccatatactcgaccaattcatccgcatcaaccgccgtctctttcaaaagaaaccgatcgacctcgcttcccggtctcgtagaggcactcgaccgacgccgtcctagccgacttcaagaagtcactcgacctcctgaaagcactcgacccctgcaataatctactcggcttcttgttcgtgaattcagtagagccttccaacttcagagaagctactcgaccactagctttcacgattcactctatctctacgactcactcgacctgctgaagcaccccaactcgacctctgagaagatactcgattcatttcatctaagctcaggaacagctcaggttactcgagtacgaaattgtactcgaccttttcaatctgtttcattgcctatctttgagactaacctattgacatttgagctttgagttctaaatccctacaggagaatcatgagcaattacagtggcagttcttctgttgatcctgactacaacatggatgagacagaatcgtcatcttcaaggctagagagagaacagagagaatatgaaagtttcagaaggaaagctgagatagcccgaggaaagagagcgatgacagagaggtatgagcttatagacgaagatgtggaggacgagtacatgcctgaacagactcgcagagctaccaaacttctgcacaagcccgacatattgcctactgaggaatatgttaggcttttcaagctgaatgagttctgtagcacgaggtatccttgctcgacctcacttgcacaactcggattgttggaagatgttcagcacctgtaccaaagttgtcatctggacactttgatggcttatccgtatgtagcatatgaagatgagacaatacaattcctctccacactgcaagtaaagctctaccaaggtatgacctctgatgagttggattgtgaaggtttgggattcttgcgattttctgtgcatggtcatgagtacaggttatcaatcaagcgattggaaggattgtttggcttccccagtggaacgggatctaagccaaagtatgaaagagaagagttgaaagacttgtggatcaccattggcagctccgtaccgttgaatgcttccaggtcaaagagcaatcagatacgcagccctgtcatcaggtacttccagcgttctgtagccaacgtactctactcccgagagattacagggactgtcactaactctgatatggagatgatcgcaatggccctcaagggaactcttcgccaaactaaaaatggcatgtccctccagggtaaagtcaataacacacctctctctatacttcttctgatccatctgtgtggatacaaaagctgggcggtcagcaataaccgcaagagagcacgaggcgctctgtgcataggtggcgttgtgacaccgattctgatagcttgtggagtcccactcatttctgctggactcgagccgcgagcaatggatatcgagcacctacgtcactgcgaattcctggagtttgcaatggttgacgatttccacaggttcaggtttgagcactctacagacaggagagctaacatccttctccctagccctgaggtcacactgataatcgagggtgataacattgattttaagcctgagattggacgtctctactatgagaacgctccaccattagatgaggatgatcttcttgaagaagctgcttcggatgggatggatgaagatagagcagtgaagttcgacactagcatgtatcactttgctgaacatgtacctccagcgaggcagagcaagagcttgactgaagctcataagaataacagtaaattgcataagtggtgcaagaagcaggacaagctgatcgccaagtgtttcaagcttctgacagataagctgagttgctcttcctccaccactgctattccacaggtacagcctcctctggagatgccatcgaggagatttaatgaacctgcgcacagacctgagcttagcgagcagagagtcccacatgtccaggctaggcattcgtcattcgaatcccgggaacacaagagaagaaggaaggctacactcactcgatctagcagcagatcacgcctcattcactcgaggagatcactcgaccgcggtgctggccgcagcagaaggagagaggtcgagtttcttcagagcggtgctggccgccacagagctgatgaggtcgagtacccacctactggagctgatacagaacaaggcggttcgtctatggcctgggagcaatcgcaggcagccattgacgagcaactacgttcattcttcgactgaggtaagcgcctcacttcaccattgtactataccgtatgttgtgatttgtatcttctttttttgtttctgtgattggatttgtcctgagtactctcttccaagtttattcacacagtggactgtgtgatttaagtttgggggagggctcaggaagtgtgtgttgcattgtgtataattttgagtctgcattcatctaaggcatagaaaaaccgaaaaaatttgaaaaatttcacaaaatgatttcacaaaaaaagagtgttcatgtagttgcatcacatttaggatcgagtctagagtgtttcatttaggattgttgcatatgcataggggatgatgatgagatagccttgtaagcattttgattcaccggataaactcagtgccctcgttgctagttgtctgttgcgtagtcaatgaatttgaaataaaactgaaccatgcctagattgctctactcgacctcactgtcatgatctgataccattccctatcaatttgaacctgaatctgatctttaattatcatgtctgcatcaaatttgaactcatggataccctaaaatacttggattctcttattcattttgatcactcttgttaatccaagtagctgactctccttattagagcagttaacccaaacccaaacctagactttctttcaagccctatatcacttgtgagtgtttgtgaggtcttattccgattaagcttggtagaaagtgttaggttcgtaacgacagagataatgtctcatgtagttctagttcgcatttttcggactagataggactaggtgggtgcttatactttgggttgggatgtgtttaaaagaaaaaaaaagagggggttgattcattgatgagaaaaggtaaaggactctaggtgaagtaagctaaagaagcagaaaaagtctagtaaaggttttgggatttgtaaagaaaagaaagagttcttgttagctattgaagatgggcaaaagcccttggttttaaaatgttaaaaacaggaaccttagttgttaaagaaatccaaatccgctagatatatcaaagtgttgaagcttctcctagagttaagagaaaaagaaaagaatgattcgaaaaagggctacaaaaaattcatgaatgcaaagggtagagtttagttcttgtattgagatgggagatgggattaccattagagcttcatttgatatacactgggtagatgggatcttatctctgtatgcatagcttgggacttacctttagcattctactaaagcttaatcattttttgagagatcccttgttactgaagactattctgtaagggaccatctttgtctcttgaccttttaccttagccaaatgagttctttgatgatgcattgcttgattcacgttccagaactaatgaatgttaaagggattggtagatttgaaaacttgtgtaggtcgagcatatgagtcggattgattgattgatgaggcatggctaacgtttttaagtaaaattcgatcttgcagcttagaacttttaacttggacattgatttcatctggtttatctagtgctttggctctgagtccccgctttcaaacctcacctccagcttgttcttgattgtttgcttgagggcaagcaaagactaagtttgggggagttgataagtgtgtattttgcatgttttgagcatccatttgtcatcattttagcatcatatcatcactgttttataccatttcacaacatttatcatcactttgcgtgtttaggatagttttgcatgcatgttgcatatttgcgttgatttcaggtgatttggagctgttgacgagctatctggaagaagcggacatgatcatgacaaaccactcgaccaccaggtcgagtagaagacatcaccacttcacctcaccactcgaccccgaggtcgagtgccatcatctccatcaccagaccctcactcgatcacttcactcgaccatgaggtcgagtgtcttcacctccatcatcagacaaccactcgacctactcactctaccaagaggtcgagtatctccaccacaccactcgactgcatactcgatgacaagcttcagagccttcttcattctgcactcaaccagacactcgagcacaaggaagaaaagaagactccagctattcactcgacctatcactcgaccacgtgggtcgagtacagttcttaacccgtccaaatacttcgtcgttttgggtaataggatttcgggatatttggctataagtagcatgtatttctcatttttgaaaggaagaagtttttaatctagttttatttccgcagcccttttgttctagactttttgtaatccggatttctctttatctattcagtattcagtattcagtttctgttcttgattttcgtttactgttgttcattctgttatcatactgctgttacactgctgttatcatgtcttcaacctgtttaacgtttatgctttctgttatgatgtctgagtagtgaataggtttctgaggatgggttagagtagtgtagaattctcagtatgctaggtgattgagtattgattgatagatcccttctggattagttgttcttaatgcctattgctttctgatcaactggaatttgagcccagacatttccgggcccaaaaggtgttcgatgaaatgtctgaaccactaattccagagattcgtgaccctgtaccaaggtattggttgcagggagcgttttggcttcgtaatgcctgttaggttagctctcgtcaatggtgattgagtctgggactaggttagcttgagagtctctgttgcggtggcacttagatttggttaatgaactcgttgtctagggttaatttattgagcatgtcaatcacctgtaaactgaggaaacgaaactactcaattaccccatccttaggaattctttatctgattgattttattgtttactctactgctgtttactgcatcctgtcacctgttgcttagtttctgcaattcttactgttactcgacctggtactcgaccacccagtggtctggcaacagactgtgcaatcgagtacctctgtttcattttctgtctgttactcgacttgtcactcgacctcactcagtgctctgcaaagagctgtgttggtcgagtgttctactgtttctgtttgattttctgttttctgcatgttcacttaggactgctagaacacaccaaaacctgttattgcttggcttgacttagtgacttctgatcacatcttgattgttagcatcacacccatttggattgacaacctaaaatactacaacgacatgattggtgttttaggacaattgacttaaaaacttattatcaatttggcgccgttgccaattgggtgtttgtttgttacatttgagatttcagacttgcttagatcaagttgtttttcaattttcttttcagttacttactgtgtgtttttcttgttgtctttttgatccaggtacacctctgctgtatgcgaactcgatcaacatgcaaccagaacctccttttcaacgacaatatcaaccgcacagcccgcgaaatcagaaaaaggagaaccacagtcaaccctgtacctcagcaaccactcgttatggctgaagaacagaatcagcaaaatggccatgccaacattggtgctggagatgcaccacgtgatcaccgttagaggaagggaatcgcacctcctgctatccagaataacaacttcgagattaagagtggtctcatctcgatgattcaggggaacaaattccatggtttgccaatggaggatccactcgaccaccttgatgaattcgataggctctgcaacctaacgaagatcaatggtgtcagtgaagacggattcaagctccgtttgttcccattttccttgggtgacaaagcacatatctgggagaagaatttgccccatgactcaatcaccacctgggatgattgtaagaaggtttttttgtcaaaattcttctccaatgccagaactgcaagactccgaaatgagatttctggtttctcacagaagactggtgaaagcttctgtgaagcatgggagcgtttcaaaggttacaccaaccaatgccctcatcatggctttactaaagcctctcttctcagcactctttacagaggagtcctaccacgcatcagaatgcttctggataccgccagcaatgggaatttccagaacaaggatgttgaagaaggctgggaattggttgagaaccttgctcaatcagatggcaattataacgaagactgtgataggaccgtcagaggaacagctgactctgatgacaaacacaggaaggagatcaaagcgctgaatgacaagctggacaggattcttcttagccagcataagcatgtgcacttccttgttgatgacgagcagtatgaagtccaagatggggagggtaaccagttggaagaagtaagctacatcaacaacaaccagggtggctacaaaggatacaactacttcaaaaccaacaaccccaacctctcctaccgcagcaccaacgttgctaaccctcaggatcaggtgtatcctccacagcaacaacaaagtcagaacaaaccttttgttccctacaaccaaggtttcgttcctaagcagcaattccaggggaactaccagcaacaaccacctgggtttgcacctccgcaacaccaaggtcctgctgctcctgacgctgatatgaaacaaatgctacaacagctgcttcacgggcaagcctcttgctccatggagatggcaaagaagatatctgagttacataacaagctggactgtagctacaatgatctcaatgtcaagatggaaacactggataccaaagtccgttacttagagggacattctacatcttcttcagctacaaaacagacaagccaactaccaggcaaagcagttcagaatccaaaagaatatgctcatgctatcaccctgcgtagtggaaaagcacttccaactagggaggaaccaaagacggtcactgaggacagtgaagatcaagatggggaggatttaagtctcgagaaagatcaagctgacaaaccactcgacctgtcactcgagcaaccactcgacctgtcactccagcaatcactcgatccgccactcgacagctttactcgacctaccactcgacctgtcatcccagcagcatcaccaactgctccaaaaccagttgctgtaaaaaacaaggaaaaggtctttgtccctcctccctacaaatcgcagcttccatttcctggccgtcacaagaaagcgttggcagacaaatatagagctatgtttgccaagaacattaaggaggttgagttgcggatacctcttgttgacgctctagcgctaatcccagactctcacaagtttctgaaagacttgattgtggagagaattcaagaagtgcaagggatggtggtattgagtcatgaatgcagcgctatcatacagaagaagatcattcctaagaagcttagtgatcctggttcgttcactctaccgtgctctttaggtccattggctttcaacagatgcctatgcgatttaggagcatcagtcagtctcatgccgctatctgtcgccaaaagattgggattcactcaatacaagtcctgcaatatatccctcatcctagctgacagatcagtaaggattcctcatggtttgctcgaaaacctcccaatcaggatcggtgctgtggagataccaactgactttgtagtcctggagatggatgaagagcccaaggacccgttgattctagggagacctttcttagccactgcaggagctatgattgatgtcaagaaagggaagattgatctgaaccttggcaaagactttaggatgacctttgatgtcaaagacgcgatgaagaagcctaccatagaagggcaactcttttggatcgaagaaatggatcagttagctgatgagttactggaagagctggcagaagaagatcatcttaacagtgctttaaccaaaagtggtgaagatgggtttctgcatttggaaacattgggataccagaagttgttagactcccataaagcgatggaagaatcagaaccctttgaggaattgaatggaccagcaacagaggtaatggtaatgagcgaagaagggtcaactcgagttcaacctgcactctcgaggacgtactcaagcaaccactcgaccttgtctaccgacgaacctagggagccgatcattccaacttcagatgactggtctgaacttaaggcacctaaggttgatctcaaaccacttccaaaaggtctaaggtacgcgttccttggtccaaactctacttaccctgtgatcattaatgctgagttaaatagtgatgaagtgaacctgttattatctgagcttaaaaagtataggagagcaattggttattcgttatccgacattaagggaatttcacctagtttatgtaaccataggatccatcttgaaaacgaatcctattccagcattgaaccacagaggaggttaaatcccaatttgaaagaagtagtgaaaaaagaaattttgaaactgcttgatgctggtgtcatctaccctatctctgatagtacgtttctccagtgcattgcgtccctaaaaaggatggaatgactgttgtcaaaaatgaaaaagatgaactgatccctactagaactataactggtcatagaatgtgcatagattataggaagttgaatgctgcatctaggaaagatcattttcctttaccattcattgaccaaatgcttgaacgtttggctaatcatccatattattgctttcttgatggatacaatggtttctttcaaataccaattcaccctaatgatcaagaaaaaaccactttcacgtgtccttatggaacttttgcctataaaagaatgccatttggtttatgcaatgctcctgcaacatttcagaggtgtatgacctctatattttcagacttaatcgaggagatggtggaggttttcatggacgatttttcggtctatggcccctctttctcctcatgtttgttgaatcttggcagggtattgaccaggtgcgaagagacgaatcttgttctcaattgggaaaagtgtcatttcatggtgaaggaaggcatagtattgggtcacaagatatcagagaagggtatagaggttgacaaaggaaaagttgaagtgatgatgcagctgcagccacctaaaacggtgaaggacatcagaagcttccttggtcatgctggattctatagaagattcattaaagacttctccaagatagccagaccgttaaccagactattgtgcaaggaaaccgaatttaaattcgatgatgactgcctcaaatcctttcaaaccatcaaggacgctttggtatctgctccggttgttcgagcgcctaattgggactatccatttgaaatcatgtgtgatgcatcagattacgcagtaggagctgttttaggccagaaaatagacaagaagcttcatgtcatatattacgccagccgaacgttggatgacgctcagggaagatatgcaacaactgagaaggagcttctagttgttgtattcgcatttgagaagttcagaagctatttggttggatcaaaggtaactgtctatacagaccatgcagctttgaggcatctgtatgccaagaaggatactaaaccaagactgttaagatggatacttttattgcaagagtttgacatggagatagtagataagaaaggcattgaaaatggcgcagcggaccatctgtcgaggatgagaattgaagaaccacttctgatagacgattcaatgccagaagaacagctcatggttgtagagttcttcggaaaaagctacagtgggaaagagttccaccaactgaatgctgttgaaggagaatctccatggtatgctgatcacgtcaattacttggcatgcggagtagagcctcccacctgacaagttatgaaaggaagaagtttttcagagacatacaccattactactgggatgagccttatctttacactctctgtaaagataagatctacaggagatgtgtctcagaagatgaagtggaaggtatcctgctgcattgccatggctcagcatatggtggtcacttcgcgacgttcaagacagtgtccaagattcttcaagcaggcttttggtggccaacaatgtttaaggatgctcaggagtttgtttcaaagtgtgattcatgccagagaaaaggcaacatcagtagaagaaatgagatgcctcagaacccaatcttggaagttgagatctttgatgtatgggggattgattttatgggtccattcccatcttcatacggtaataaatatatactggtcgccgtagactacgtatcgaaatgggtcgaagctattgctagtcctaccaacgatgcaaaagttgtgctgaagttgttcaaaaccataatcttcccaagatttggagttcccagggtagtaatcagtgatggcggaaagcatttcatcaacaaggtttttgagaacctcttgaagaagcatggggtaaagcacaaggtcgccactccttataatccacagacaagcgggcaggttgagatctccaatagggagataaaaacaattctggaaaagactgttgggattacaaggaaagactggtctgcaaagctagatgatgcattatgggcttataggacagccttcaagacccccataggtacaactcctttcaatcttctctatggaaaatcatgtcatctacccgttgagctcgagtacaaagcaatgtgggcggtaaaacttctgaactttgacataaaaactgctgaggagaagcgattgatccaactcagtgacctcgatgagatccgtctagaagcttatgaaagttctaaaatctacaaggagagaaccaagcttttccatgacaagaagatcatcactaaggatttccagtttggtgttcaggtgctgctattcaactctcgcttgaaactctttccaggaaaacttaaatccagatggtctggccccttctgcatcactgaggtccgtccttatggagcagtcactctagctggtaagagtggagattttacagtaaatggtcaaaggctcaagaaatacttagcagaccaaatccttccagaggtgacatcggttcatctccaggagcttcttgatgattaaaggagtaaaggagtcaagctaatgactttaaacaagctcacttgggaggaggtcccatgactatccttgtaaataatttttaccttcttgatatttttgatttgttttagttgtgtttgtggttttcagagacaagagaacaacgcggagatagagtaaaaatttaaaacttttactctatcgaagacctggagatcgagtgtacagcccgttggagtacaaaattttgaaaattttctgttgcacctgagaccctgcactcgtgtacattggtcgagtatatgtgatgtttaaaacccaaaaatttttaaatcatcattttactcgaccaacagaaactacagagacttgcagaaatttcctacagtttacagtaggttttctgcaaagaaattttctcaatcaacagtgtgtggaccacgcgctgaggataagctggagagagaatctaaaactcaacctagaccactcattttgaagcgctactcaaccactccaaatccactcgaccttccacttttcatttcaccgccgacactctaatctctctacaccacaaatcgccgtccaaagagctactcgaacactgagaacttcactcgaccacctccctcgctgccgtcaccagcccatccactccgtcaaccgaccaaaccacttcacttgattccttccatatactcgaccaattcatccgcatcaaccgccgtctctttcaaaagaaaccgatcgacctcgcttcccggtctcgtagaggcactcgaccgacgccgtcctagccgacttcaagaagtcactcgacctcctgaaagcactcgacccctgcaataatctactcggcttcttgttcgtgaattcagtagagccttccaacttcagagaagctactcgaccactagctttcacgattcactctatctctacgattcactcgacctgctgaagcaccccaactcgacctctgagaagatactcgattcatttcatctaagctcaggaacagctcaggttactcgagtacggaattgtactcgaccttttcaatctgtttcattgcctatctttgagactaacctattgacatttgagctttgagttctaaatccctacaggagaatcatgagcaattacagtggcagttcttctgttgatcctgactacaacatggatgagacagaatcgtcatcttcaaagccagagagagaacagagagaatacgaaagtttcagaaggaaagctgagatagcccgaggaaagaaagcgatgacagagaggtatgagcttatagacgaagatgtggaggacgagtacatgcctgaacagactcgcagagctaccaaacttctgcacaagcccgacatattgcctactgaggaatatgttaggcttttcaagctgaatgagttctgtagcacgaggtatccttgctcgacctcacttgcacaactcggattgttggaagatgttcagcacctgtaccaaagttgtcatctggacactttgatggcttatccgtatgtagcatatgaagatgagacaatacaattcctcttcacactgcaagtaaagctctaccaaggtatgacctctgatgagttggattgtgaaggtttgggattcttgcgattttctgtgcatggtcatgagtacaggttatcaatcaagcgattggaaggattgtttggcttccccagtggaacgggatctaagccaaagtatgaaagagaagacttgtggatcaccattggcagctccgtaccgttgaatgcttccaggtcaaagagcaatcagatacgcagccctgtcatcaggtacttccagcgttctgtagccaacgtactctactcccgagagattacagggactgtcactaactctgatatggagatgatcgcaatggccctcaagggaactcttcgccaaactaaaaatggcatgtccctccagggtaaagtcaataacacacctctctctatacttcttctgatccatctgtgtggatacaaaagctgggcggtcagcaataaccgcaagagagcacgaggcgctctgtgcataggtggcgttgtgacaccgattctgatagcttgtggagtcccactcatttctgctggactcgagccgtgagcaatggatatcgagcacctacgtcactgcgaattcctggagtttgcaatggttgacgatttccacaggttcaggtttgagcactctatagacaggagagctaacatccttctccctagccctgaggtcacactgataatcgagggtgataacattgattttaagcctgagattggatgtctctactatgagaacgctccaccattagatgaggatgatcttcttgaagaagctgcttcggatgggatggatgaagatagagcagtgaagttcgacactagcatgtatcactttgctgaacatgtacctccagcgaggcagagcaagagcttgactgaagctcataagaataacagtaaattgcagaagtggtgcaagaagcaggacaagctgatcgccaagtgtttcaagcttctgacagataagctgagttgctcttcctccaccactgctattccacaggtacagcctcctctggagatgccatcgaggagatttaatgaacccgcgcacagacctgagcttagcgagcagagagtcccacatgtccaggctaggcattcgtcattcgaatcccgggaacacaagagaagaaggaaggctacactcactcgatctagcagcagatcacgcctcattcactcgaggagatcactcgaccgcggtgctggccgcagcagaaggagagaggtcgagtttcctcagagcggtgctggccgccacagagctgatgaggtcgagtacccacctgctggagctgatacagaacaaggcggttcgtctatggcctgggagcaatcgcaggcagccattgacgagcaactacgttcattcttcgactgaggtaagcgcctcacttcaccattgtactataccgtatgttgtgatttgtatcttcattttttgtttctgtgattggatttgtcctgagtactctcttccaagtttattcacacagtggactgtgtgatttaagtttgggggagggctcaggaagtgtgtgttgcattgtgtataattttgagtctgcattcatctaaggcatagaaaaaccgaaaaaatttgaaaaatttcagaaaatgatttcacaaaaaaaagagtgttcatgtacttgcatcacatttaggatcgagtctagagtgtttcatttaggattgttgcatatgcataggggatgatgatgagatagccttgtaagcattttgattcaccggataaactcagtgccctcgttgctagttgtctgttgcgtagtcaatgaatttgaaataaaactgaaccatgcctagattgctctactcgacctcactgtcatgatctgataccattccctatcaatttgaacctgaatctgatctttaattatcatgtctgcatcaaatttgaactcatggataccctaaaatacttggattctcttattcattttgatcactcttgttaatccaagtagctgactctccttattagagcagttaacccaaacccaaacctagactttctttcaagccctatatcacttgtgagtgtttgtgaggtcttattccgattaagcttggtagaaagtgttaggttcgtaacgatagagataatgtctcatgtagttctagttcgcatttttcggactagataggactaggtgggtgcttatactttgggttgggatgtgtttaaaagaaaaaaaaagagggggttgattcattgatgagaaaaggtaaaggactctaggtgaagtaagctaaagaagcagaaaaagtctagtaaaggttttgggatttgtaaagaaaagaaagagttcttgttagctattgaagatgggcaaaagcccttggttttaaaatgttaaaaacaggaaccttagttgttaaagaaatccaaatccgctagatatatcaaactgttgaagcttctcctagagttaagagaaaaagaaaagaatgattcgaaaaagggctacaaaaaattcatgaatgcaaagggtagagtttagttcttgtattgagatgggagatgggattaccattagagcttcatttgatatacactgggtagatgggatcttatctctgtatgcatagcttgggacttacctttagcattctactaaagcttaatcattttttgagagatcccttgttactgaagcctattctgtaagggaccatctttgtctcttgaccttttaccttagccaaatgagttctttgatgatgcattgcttgattcacgttccagaactaatgaatgttaaagggattggtagatttgaaaacttgtgtaggtcgagcatatgagtcggattgattgattgatgaggcatggctaacgtttttaagtaaaattcgatcttgcagcttagaacttttaacttggacattgatttcatctggtttatctagtgctttggctctgagtccccgctttcaaacctcacctccagcttgttcttgattgtttgcttgagggcaagcaaagactaagtttgggggagttgataagtgtgtattttgcatgttttgagcatccatttgtcatcattttagcatcatatcatcactgttttataccatttcacaacatttatcatcactttgcgtgtttaggatagttttgcatgcatgttgcatatttgcgttgatttcaggtgatttggagctgttgacgagctatctggaagaagcggacatgatcatgacaaaccactcgaccaccaggtcgagtagaagacatcaccacttcacctcaccagaccgtcactcgatcacttcactcgaccatgaggtcgagtgtcttcacctccatcatcagacaaccactcgacctactcactctaccaagaggtcgagtatctccaccacaccactcgactgcatactcgatgacaagcttcagagccttcttcattctgcactcaaccagacactcgagcacaatgaagaaaagaagactccagctattcactcgacctatcactcgaccatgtgggtcgagtacagttcttaacccgtccaaatacttcgtcgttttgggtattagggtttcgggatatttggctataagtagcatgtatttctcattttcaaaaggaagaagtttttaatctagttttatttccgcagcccttttgttctagactttttgtaatccggatttctctttatctattcagtattcagtttctgttcttgattttcgtttactattgttcattctgttatcatactgctgttacactgctgttatcatgtcttcaacctgtttaacgtttatgctttctgttatgatgtctgagtagtgaataggtttctaaggatgggttagagtaatgtagaattctcagtatgctaggtgattgagtattgattgatagatcccttctggattagttgttcttaatgcctattgctttctgatcaactggaatttgagcccagacatttccgggcccaaaaggtgttcgatgaaatgtctgaaccactaattccagagattcgtgaccctgtaccaaggtattggttgcagggagcgttttggcttcgtaatgcctgttaggttagctctcgtcaatggtgattgagtctgggactaggttagcttgagagtctctgttgcggtggcacttagatttggttaatgaactcgttgtctagggttaatttattgagcatgtcaatcacctgtaaactgaggaaacgaaactactcaattaccccatccttaggaattctttatctgattgattttattgtttactctactgctgtttactgcatcctgtcacctgttgcttagtttctgcaattcttactgttactcgacctggtactcgaccacccagtggtctggcaacagactgtgcaatcgagtacctctgtttcattttctgtctgttactcgacttgtcactcgacctcactcagtgctctgcaaagagctgtgttggtcgagtgttctactgtttctgtttgattttctgttttctgcatgttcacttaggactggtagaacacaccaaaacctgttattgcttggcttgacttagtgacttctgatcacatcttgattgttagcatcacacccatttggattgacaacctaaaatactacaacgacatgattggtgttttaggacaattgacttaaaaacttattatcaatcatcataagtctattgtgtgaacatcgagagctcaatgaaattcgacccttaagtggtaacgacgatctcttttttgagggagtaagcttaaggcaatttgagctatatcatgatacatgcctaatatgacaagaaatctaatatcattgggaacattagaagtcaaagggtgttggtttaaatctcaagatggagttttacagattgtgaaaggttgttctactcttaaaagggcagaaaagagagactcaatacattccagagggagtagcagaagatggggaattgatgcgtgtttcatttcgcctcatacctgaaagaccacacgactactgcaagtgcacattatatcggagtagtactttacgatcgaatccactaggagagaagtagttcagagaaatcctttagaagagagtgaagctaggaccaaataaaagagagggggttgttgtatgcagtgaataagcaaaataaaagacaagtaactaaagtaaacgataagcaataagggagaagtgttaggtcttcgggggtttctccggatgtcatggttcaacaataaggtatagatctcaatctagctgataacatggctaggtttgtttacttccaaattctcggacatatgaaactttatcaagaccagctaaccctaacggctagtcggtgaaagccgactattctcactaatatcttgggtactcagttaccctgacggctagtaggtgctaacatggtttcaaattacaagatcaaagcattaagttcaaattcgattctagtccataagtccctatcactcggcgggcgtgcaacggttagttccttattcagttaaactagttaaggcaattatacaagattctgccaagtataaaatacctaagatcatgtactaggtggcgttccggacatacatgcattaaaattaaactcaactagaaagaatagtgtaaacgatcaaaaaagccatagaaactgccaacctagacttttgatctaaaaatccccatgaattcctctttgaaaccccctcaaacccaactagagttctactcgctcatggcaaaggagcaaatcaaatgttgggttgagtaaaccataacaaaaagatgaataaaacttaaaaagggtttagagattagttctttgaatgtagaacacaagaggcaaagctccaccttatagagtcttatacaaaaagaaagagaaagagaaagagatggtgatcttcaatcttcaataggtgtggcgacgagttggcagctctcggcaacggctagggttcgcttgtgatgaaggcacacctagggttagggcttagaataagtatttatacttgagggccaagaattaggtttaggggtaagaacgtcattccgctagataagtaagtgatcgggccgagtcatgggcttcagggaaggagcctaatgacagtggcacaaagagggaaggacttgggcgtgacctaatggttggtggtgagctactcggagctgctaggattcaagtctccttggccgcatgctttttggacttattatttccaaacggccggttcttgacatatcttcactcttcaggttatatctttcaaacggcttcatggattgcttctattcgacttcgatgttaattttgactcttctagctttccattcataccaaaatatcttctagctttccattataaattactggaatgatcgccttttgatacttttagcttcaaaactctgaaaaccttcttggcacctagaatacgtgtttctcctctaattggctctagaatggcaccaaatgctctctgaaacataagaaaacaatagataaaacgggctaaaaagccgtgttatcaggaatcatatgcctctgtggcgtctaaagatgagacctcttcgtggcacaggtggctcagtcatatgagtcgaaaatgaatggaaattttggttaaaaaaggttgtctacagagagaagctataagggaattgatgttctgtgaagactgtgtatatggtaagaaccatagagttagttttgcaccagctcaacatgttaccaaggagaagttaacgtacgttcacttagactggtggggttcagcctctttaggtaactgccaatatttcatctcagtcgtcgacgattactcaagaaaagtctggatatacttcttaaagaagaaagatgaagcatttgagacgtttgttgagtggaaaagatggtagagaatctgtctcataagaaagtgaagaaactgagaacggataatggtctagagtactgcaaccattatttcaaaaaattttgcaaagacgaaggcattgtaaggcacaagacatgtgcttacacacctcaacagatggaattgcagagagactgaatagaactatcatggataaagttaggagtatgatgagtgaaagtggtatggataagaaattcggggtagaagcagcattcactacaatatatctcataaacagatcaccttttacaccacttgaatttgacttaccagaagagaaatggactggtgcactacctgacttgaaaggtttgaggaagtttggatgtttggtttatatacatgcataccagggaaagctaaatcctaggggcaagaaaagcgtatttacaagctatcctgaaggtgttaaaggatattaagtctggatattggaagaaaggaagtgtgtaataagcgggaatgtgatcttcagagaagaaatgtacaaagacctgaaacatgactcacacacatgtgtgagtgaaaatgacttagaaaacatcagatttaactcttttggtgttatttctgatcacgaaatagcagatcaaggtggagctactttgatggaaaacgattagaatggtacgagtcaagacactggatcacctactagttctcaaacacaagtccataatcagaataatactgaagtttcagaggagaatcattctgaatcagaagaagaagacttaagtgactatcagttagttagagatagagcaagaagagcggttaagtcaaacccaaagtataatgagtcaaacttggttagttttgccttcttcactgaagatggtgatcacttggaaccaaattcttaccaggcggctctaagagaccctgaatgggataaatggagaagagccatgaaagaagaaatgatgtcaatgggaaagaatcacacatgggatcttgtggataaacttgagagtatcaagatcataggctgtagatggattttcaccagaaatgcaagaatacctagagtggaagcaccaagatataaagtgatatggtttaaattgccttaaaacctctacaagagatcgattgcagtatttaagggtcggattctacaaagtccttttgttcacacaatgagctaaatgtcaagattaagctagaagagtgtaagaaaaaaaaaaaataaccaaatagcaggattgataggttgtaagataagatattaaaaacgtcaggtttaggatattctcaggaaacaaatgattagtagatctagtgatagctagattgttattgaaccgttcttaaactcaaactctatcatcagactaaccggtggcgtggtgtgaaattcactatgcctagtgctaagattcccggtggcttttcgtgaaatcctattcctaaacatgcatgctaaacgagttcgataagttcatcttagtagataggccaattcttattacacacctataaaccaggctcatcaaatagttgttctggtaaaagatacctatggcgggtatatacattatctggaatcaagttctagttaattactttagaactagcattaagaactaaagatgaagaatcctactaatcacctagcaaaggggcaatctactaaatcatatgaattcctagtgacaagcagtctactcagacatgaagattggaacaaacaacatgattgagtgagaaagcataaacaaatcaatagagaaaagagttagaaaagatctcttcaatgttattgaaaatctctgaatgaatctctgaatacaggggatgaataacttaatatctcaaaaagaacttgatagaaaactccttcttgtctaacaatgaactttaaaactatatatatgacctaaaaagacgtgcaggaacaattaatgaaaatagggaaatcttctgggcaattttctaattcttcaaacttaaaagcgtgatggacttctctgggccgcaacttggtgtcgatcgactggatctaaaaagtgaattc

SEQ ID NO: 78 - DNA, 129271 bp, Arabidopsis thaliana
gaattcgtttattgttgtttgtattggttccttttcattacttttaagttcttgtacataatcacattttatcttatcaatacatttaacatttcatcaaagaaatgaaaggtaaaggtactagcgcagtggaggtaggtgtgttggatttaaaagctccaaaaagaattaacttaaaaacttacaattgtcaaatacatatcggacatagcccggactaacacctagtagatatgtaaaagtaaatcaaaataattcaggaatgagtaaaaacaaaaattaacaggaacaatattactgtggagaaagatgatcatccccacacttattgcaccattgaaacgaccaaaagaaaagcaattaaccaagtagaatggctctgaccacaacaatgatctcagaaagcaaaagaggcaaaactacataaaacacgccctaatatgcaaatgcacgatcgagggaaacaaggtaaacgaagacaatggcagacactctaaatcctgacttgtgttggcgataaaagaagggtaacaaggatgtatgggactgaattttgagtagtagataaattcgtgaatgtttgttactacatatgttaaaataattcacgattgagcacgacgcgtaaactatctttacacggtatagaggccatacagctattaactaaagtctgttgagaggaaccctgagactgtgttggtgaggagttctgtttgttgtcctgtccacatgagatataacttgcggcattgtcatccccaccgatactatgatctctgttgcatcgaaacaacaaacaacatttgaatctgatgtttctcataaaaagaagtagatgatgaaacgtaaacagctcaagactgacctattccttctcggatcgataaatttggccttatgatttcttcgctactcaccagaaacacatctcctatgtacagatgattcgttggtacatacacactacataactcttcttctccatggtcagtctgttacaacaaaaaaaaagcatgagagcaagtaactaatttgcttacttgggttttaccagttttgttgctgaataactgacctgaagtgtcaccgatgatgtaataaatccaaatgcgtattcaccaatacgagggtgacggatgattgctacctctttaaaggcagtagtgttttggtctgagaacaaaaatcaaaggttcttccattacaaaggacacgaaaaaggcaaacaacatagcaacataaaaaggttacttgtgaattcaaatcattgtgtctgaaaccacacaaatttgcttgcactttttgctagaaccaaagacgagtttctttaggtgctccattacacaaacaatgacatatatttgaagaaaaggagacgaattgagcaaatatatttggatgcgagaaaaagctaaagcagggaactggtgaagacaatgaaacagtacacagtcttacctggagaaatagcagtgctaatttgcttagaagctgaatatatgtgcttgacaaagggcattcgccttataaactgctccccaagccagaaaactgtagaacccaaccacgacgaagcaaatattccgacaaagaaagtgaaaagtacagatgtaatgaacccaagtcctgcaacatacaaaaaggaattaaaagatgtagttcaagataagaaattaatatctgatatttatatctctttggaaatctaggaaactttcagatagagatgaaactaaatgtttcattttaccagatacattgtcacaagtaagagttggactaaagaattaagcaaggaaatctagtaaaactttagaagtccaacaaacttgtacaacattccactaactctagcagtaagaacaaaccctgaatcctaatctattaagatatcttagacttcatagacgaagtttctacatcaagttttacttagtacataacattacgatacaagtcagaagaatttcaattcataccaaatatgtcaacaccaaggttctcgtatatcggactgaagaaaccatcaacgaactggataaaccaccaagtgatgaggaatgtaacagctacaggaaagagtacgacactaccacacaacacccaattagaccccaatgatacaaagatttcaaatcatgagtatgaaaataaaaagggtgctacgagttatttacaatccagtcataaacttcttagacacccaactctgtagaaccccataacaagcctgctcaaatacaaaagagaaaacactgtaagtatctcaaataaattgaatcaaacacaaacatatagaagtgaaaatgcttaaacctctaaatcttaggctccctaagatcaattatacttgtcatttttgccaaactgaaatgctacaataaatttcacaattcggagttctttcacaaaccagaagtagaactataacaacaccagaaccctaaacatctctcaacgaatttcacaaaagtaagtaagatatgacaactcaaaactctcctcaccagcacaaaatttaccatccaaggaccaagatcatcatcttatcgttatttgcaatttttgtcaagaaacgtcaattagttgattcatacaaaatttcacatcgccactcatagtttcgcagtcttcacaagatcatcatcttatcgattctgctatatcattctcctacccagcttaaccttcacaattcagagttgtcttacataaacagaaactataacaacaacactagaagaaccctaaatctctcaacgatttcgcaattgtactcgaatttctatcaattcgacatctaataataattgattcatcaaaatttacaaatcgctactcattgtttcactacgattttaacatttcccactaaagcatcatcagtgatgtataagatcgctataattcaaattcaagagcaacaaaatcgaagaatgcttctaaaattctccgaatccaacccaaacttagcaacgagtaagcacagaaactttagctcacaggctcgataaaatcggcggaggtttcggcagagacagtaccttgcgagtagaagaatttggagagttgggaggagacttgggagcatcgtcggggtcttggtgaggagtgagtccttgactcagcgaactcgtcgtagcttcttttccttccgccatttttgccggcgaggaggttgaaattggttcttcgtctggtttagtcagaccagatctctgattttgtttgaccttagaagatctttttgggtctatgttacccctttacgtaatctatactcagcttaatccaacgactgaaactgcgacacgtcatccatcaaaaactttaaacgccgtttcttcttttccaaatagtgatctattttttttcttttacaaaatattaacatgaatagaaattgtgaccaaaataaattatatagttgactaaaatttctaatacatgcaattcgatgtgaaattttatttttttaaattgctgatctaataaattataagatcttttttatctctatagttttcttacaattattttgtttaattttaatatttgtattacttagttatgacataaatatgtgatgaattttaaagtagctttctttgttactaaatgtatctacgaatgaagtagctttctttgttactaaatgtatcaacgaatggccaagttcggatatgtgaaaaaattctagagacacttgagagacatgaatctctggcctagactcatagagaaactctatatctcagcggaatttatgttgcaaccgataataaccattcaaaacatctacctatagttgcgttagttctcgaagaagctgtaggcttgtttttcgaagttttgtggactgatcgcgattagaattgctcatgacaactaagataaggattccagtgcttaggtactgtggcaaccacgcaaatttccgagttttgcgagttcggaatcggtgttttacctcgcaactatgctttttccaattagaagcgatccaaagctatttaagtagttatgttatatttattttctgtagattgttttgatattttttttgttatctttataattctgtcacaaatcaaaaatggtataaaatttaatcttttaccaaaaaaaaaacatctacctattttattctatatctttttagtcatgtttatcttctaattttaaaatttaattcgtttctagaatttcatatgcgttaaaaaatcaaagaattagtttctgattatttaagtctttgtatgctttgcatctctaaaatttgagtaattttagtctcacaatcgatgagagataggaactaggaaaggcaactacaccagtttctttctgtataataaaataattattattattattatagtttccagatttctacttccttaaaaatgttaattttatgtttcttctactttgactattaaaaaaggattaaaaaaaagtgtatatattttcttaaaagaaaaaaataataactaaatttcaccgcgggttaccaactctatatatacatcttctgtttctctattaggttcccaaagctctccaaaatccctgtgaaatcggattccatagtcttctaaatcttctggtacgtgacaaaattagggtttaagattttcaacgagttagggttagcgtcacgtttctatactcgtttttaaacgagttagggtttacgtcggcttctctgtactttgttgattctccaatttgctttcagtgattattgtgttgcgctttgttttctctcttggggattcatcgccatggctacgtaatatcttgttatcgttgttagtctgattagttttagttttgtgttttgaatgataataacctcttctgttgtagttattttgatatatctcatgtcttagtattactttactgtagaatcttgttcaaggtcataatgatgaaggagttaatcctattggaggaaggatggtctgtcatgaagactggtgttgcaaagctacaaaggattctagaagatttgtctgagccaccgtttgaccccggtcaatatatcaatctgtacacgtatgttttgttataatcatgtttcttgttttttcacgaacttatactaaccactgtggattctcacaggattatctacgatatgtgtctccaacaacctcctaatgattactcacaagagctttataataagtatcgtggagtggttgatcattacaataaagaaactgtgagtaacaactacatatttgtttctttgacttgagcaaagggtctaactaatatttttacatatttggttaggttttgccgtctatgagggagaggcatggtgaatatatgctgagagagcttgttaagagatgggctaaccataaaattctggttagatggttatctcgcttctgcttttatcttgaccgtttctatgttgctcggagaggtcttccaacactgaatgatgttggcttcacatcctttcacgacctagtttatcaagagatacagtccgaggccaaagatgtgctactagcacttgtaagtgtatatgttattaatctctaattgagtagcgatctctggtttagttgttctaacactattttgtatttgccagattcataaagaacgtgaaggcgaacagattgatagaacactagtgaaaaacgtaatagatgtctattgtgggaatggggttggacagatggtaatatacgaagaggattttgaaagcttcttgcttcaagatactgcatcttactattctcgcaaggcctcaaggtggagccaggaggattcttgtcctgattacatgctaaaggctgaagagtgtcttaaattggagaaggaaagagtcactaactaccttcattctaccactgagcccaaactagttgaggtatatataagagttttttgtgagcattttgacttggttacaaccatatacgtaaacactgataattcttgtttttggatgcatgcagaaagtacaaaatgaattgttggtagtggttgcaaaacagcttatagaaaatgagcactctgggtgccttgcattgttaagagatgacaaggtaactaacttttaattcttagggtttgaatggtgacggtggtcggggtggacaaatccgtcagttgtttagtctgctctatttttagggcggataacaaactgttgtggaccaactctatttgtatgtaaaagcggtccagtccttaagcggatttgtccgctttaaccactacagcctcaaacaattctcatctaaaattctctctttgtctgaacattgtgttatgctttcagatgggtgatctctcgaggatgtacaggctttatcgtctaatcccgcaagggttggaacctattgcagacttattcaagcagcatgttactgcagaaggaaatgcccttatcaaacaagccgccgacgcagctactaatcaagatgcaagtgctagtcaggtgcttgtcagaaaagagattgaactacacgataaatacatggtctatgtagatgagtgttttcagaaacacagcctcttccataagctattaaaagaggcgtttgaagtcttctgtaacaaaacagtggctggagcgtccagtgcagaaatacttgcaacctattgtgataatatcctcaagaccagaggtggaagtgagaagcttagtgatgaagctactgaaattacgcttgagaaagtagttaatttgcttgtttatataagtgacaaggatcttttcgccgagttttacaggtacatatctcttgcttccaatatttgtttctctttcaactttgttccttacaccaatgctttgttaacttttctaaatattggttgtttttaggaagaaacaagctcgtcggctcttatttgatcgcagcggaatcatgaaagaagtatacttacaaagttaaaagaactacttggtggacagttaacttctaagatggagggcatggttagtcacatgagttttatttccttagtagtgactaaggtttttactaatgctttgttttgtacatttgttatataggtgacggatataacattggcaagagaactccaaaccaacttcgtggattatttatcagcaaacatgacaacaaagctggggattgattttactgtcactgttcttactactggtttttggccaagttacaaaacaacagaccttaatctacccactgaaatggtaagtaactctttttatttttaggtctttaaacagaatttaagaagaagactttctcagcttccaattttctttttttttttaggtcaactgtgttgaagcttttaaggtcttttatggaacaaaaaccaattccaggagactttcatggatttattctcttggaacttgtcacattcttggaaaattcgagaaaaaaacaatggagttagtcgtttccacgtaccaggctgctgtgcttttgctcttcaacaacgcagagagattaagctacaccgagatttcagagcagctaaacctcagccatgaagatcttgtcaggctgcttcattcactgtcatgcttaaagtacaagattcttataaaggaaccaatgtcgagaaccatctcgaaaaccgatactttcgaattcaactccaagttcacagataagatgcggaagattagggtaaatatgatgagaagcattgtgttataatgtagcctagatcaaaaagactaatgatgtttttttcttttcttaaataggtgcctttgcctccaatggatgagaggaagaaagtagttgaagatgttgataaagatagacgctatgcaatagatgcagctcttgttcggatcatgaagagtagaaaagtgttggcgcatcaacagttagtctctgaatgtgttgagcatcttagcaaaatgttcaaggtaaggatttaatatacaaaaggaaacttgatatataagacaagagaattaaggtaatatttacataatggtttttttttttttttttgttgcagcctgatataaagatgataaagaaacggattgaggacttgatcaatagagattatttggagagggatacagaaaatgccaacactttcaagtatgtagcttagtcaaaaagggtgtttataagttttcgatttttggttttaggttttcggttttgtataatgacttgcattcttttgttggaccattggttattgaaaaagagaaattgtctttttcctttgtttttcagaattatagttaaactaatttaaatatgaaaattgaaaattagttgaagagatatattttaatgtttaaaataatattatttccttaaaactaaaaccgttgaaacttgaacataagtccatctaccacaaaaaggttataattgaaacacactaatatttagaaccaagagagtggagatataccttgaaagcttcaatgagggagaggttgttagtttggacgccaacaatttaatcatcattaagaccaaggctttgaaaagattgtcattgtgacactatataagctaatgtcttattagtcatcaaatctgacggccaagttaaccaaagacaattgaaacccatttccgctatcttcttagccacactgcttccaccggttgcttgcttaattagcccttccgccactagaggtgtgatggccagctcgcacacactagctttacgttgaccgttctcgtctacgatgcaatgggagcttgtcgccggcttgagctttcgagagaccccgagacaaaatggcaaaagcaaaaacagagtcctattatgttaaaagaaaaaaagcgtttacaaaaataaataactaaaaaatagggtgagttaaaaatatatacatggataaacaagaaattaagaatttatacataaaaatttgttatttaggtaaataggaaagagaaataaaatataaaccaaaattatccttcctttttagattaattacaaaaatgccattgattcaaaataactttaatatttgtaaataagtatataactatttgtttaacgagataacatatataataacatgataaatttacatattatatgttaaataaatatttatcgatttaaaattatgaatcagtatttttatttatatatatatcaacacaataaaatacatcatattacataattaacatgagaacgattataacaacatgttgaatagaataataacatgctaacatactaaatatcgaaataatatttgtctcaacacggtaagatagtctatatatgaataataacatggtaacatactaaacatcgaaataatatttgtcttaacatagtaagataatcgatatatggataatatttatttgaacgtattaatgtttcatttaacgtactaatgtttcatcgtcactaatatctcaagttttttaattttctcgagctttttatttttagtttaataatttaggggtatagttgtcataaaattaaaacagtaaaagacaacaatgtttttttctatcagttaattatcaattcttctgggtatagataatttgaaaagcttacagaaacagagtcagggaacttgaactgaattaacaattgaataagatccaaaactaaatcattcatcgttgtgtcttgagtctttatccatattcagtcacatcatagagacgttgtgagaaggtgaaaagttttgtgggatcgttaataatttatggtgtaaattcttgcctttgtgttagaaagtacataaaattttgcttaatatatcaataaagttttataattgttaggctaacgtaaatcaatcttttggtccaatattaagaaaagaatttagttatgtttagaaagaatcaaagaagtgcagaaattttatgggcccttttttattaaatattttttttctacaaaggatatttttttgggtgaactgcaaaactaaccagtttccaacactaaattaagaaaatagcactataattctagaaattaagaaactaacacatgagaattgagaaatatccactttatcctcatcttgttaatataagaccttttttccttaaaaaaagagagacccccaagttctttttttctctcccaggcactacttacgagataactaaaaacagcaaatggtttcaaaaaaagtagattttgaccatttcttttagccattattggtaatttttgttcttctttggtcgaatctttctttttctctgacgatgctcccctgtttgtctttgtttctcctctcttttatgccttctccagtcctctcttttctctgctcagtgcctcttctcagcctcttcatccttaattgagtagaccaaatgatgctctcactctgaagaccttcctgcataagcagagcatctgttcccctgtttttctagctctaagctaagataatttctggtgcttctgaatatctagagatctctcttttctctttttctagcactaagctaagctcttttcaaattcatttgttcactctttaaaccttctcatggcaaaatgagtcaggccaagttggtattgagattctcctcccaaggaagcaccttttgcttttgaacctgaagacgatgatgatgtggtggttcttcctcaggtggataattctgctttgttagcccgcctcaatctcagtctagtgggacgcatgtttcatcaaggaggccggagtattgaagcgcttctctccttcttacccaaagagaacatatgggatgttgaaggaagagtttgaggtgtctctctgaatgattctcggtttcagtttttctttgagactgaagcggatctaaagaaggtcctgaataaacgcccatgtcatttcggtaaatggtcttttgctctcgagagatgggaacctaatcttagagctgctttcccaaactcaatgacgttttggaccagaacggaaggaatacctccagaattttgggaagagcagatcttaacaataaagtggccactctagaagatctgtttctccagctagtgatagaagaataaaggggaatatctaattcattctgagatacttgttacgctggtaatagacagtaccatcagaggtcccctccccctcctctccgttatcaagttccccgtaactcacatttctctcgggccactaacgctgcaagacgtccttctggatccggtaatattaaagagagaattgttgaggatgggagaaaacgtcaatttgaggaatccttttcccaagataagaatggtgaaccctctaataaagatcgttattaccattcccgttttaaacctacctcttcacatcgttccagagagaaacaaggaatggaactgaacagttcacacttatctgactctcaacttacaacctcgaagcctcttgttgcttcctcaagagccaagcaaggaaattcatcccctgctcttgtgcgagaaagactgtttcgcttgaacttgtcaaaaaaggccattctctcggatgaagacaagggcaaggagattgatttacctcgtcattccccagtgatttcttctgaaactggaagctctgcaaataaatccttgacttttgaccgccttaatccacgagaggatgaacccatctctgcaacaaatctcggctctgtgcctttgtgttctcagttggagaaaagaaagagttggtacgagatgaccttggaagaagaagcagaagatcaagacgaagatgaggacactcctgaagaaaaccctgaatctgagcctgcaaattctctggcggtgaagttctctaaatcaataaactttactagtcctgcaaatctttctaacctcccagtgacgataacggcgactcacgacgctgaggatggttgggttgataaccaccatttgatgtcggaggcccttaatctggactggacggtggaggatgacgaagcgtaccacgctcttgaaccttccctccctggagatactgaagatttcgatgttgaaaatgatgatcttctaggagaagatctttaggaaagcatacctttagatgcgaagctgcaatctgagactgaatctctaccggagctcaagtcaatttgaactcgcctacgatggtgaagaagctgtccgagtccgtagcgactcaaaattttggctgtttgatggatcaaggcccatccaactctaagtccaaaaagaaagatttaaaaaaggaagagatgggccaaaaccggaaggtgcagcccaatccagctctcttgcttaattcaaaacaacagggggcgttctcctagcaagaggatttctaatcgagtcaacaagcccaagacatctagaccaaaaaatcgtaggcgagctgcttcggttccacaacttcaaatgttaccatccacaaagatcaagctttcagagtcaactgttatttctgtggggtctacaacctctaccgaaactaacacatgatgattttagcatggaattgtcaacgggcgggtgctgatcttacaactcgtcgactagaggagatgtgtcgtatgtattccctaggttttcttttttatcggaaaccaaaaatgaccttagtcatattcagggtttgcaagtgtcattagtttttgattctttttatattgttgagccgattggcagcagtggcggtcttgcccttatgtaatcgaaagattatctggttaagtttgtttttgttagtgaccggcttattgatattgaaattattattgatggaaatcgagtttttattacctttgtgtatggacatccggtaatccaataccgagaattagtttgggaacgtttgactcgaataggtatcacccgttcgaaaccatggtttatgattggtgattttattgagattattggaaaccacgaaaaaagggagataaaagtagatatgaatcttcttttctcccattccgatgcatgattgaaaattgtgggatgatcgaggtgccctctcacggtaatttgttctcatgggtgggacaccgtagctgtggagttacgaggcggcgtgtccgtcgagtcattaaatctcggttagatagagctttgggcaatgaagaatggcataccattttttcccactcaaatgtggagtatctaaaattatggggttccgaccatagaccccttttagcttcaattcagaatagcccccatcgccttttcaaaccatttatttttttttataaaagatggcttagcaaaccgggctttaaggagtcggttcatggaggttgtgaggtccctcctcaaggaggagttatttttttctcaaaaagtgaaaaattgtaaaaagtctatttctatttgaaaaaagtcaagctcttcaaactcagagaaaaaaattctaaaattacaaaatcaaattgataacgcccaagaagacgagtccatctctgctaaggaattattagctctaaaaaggaagctttgcgatgcttatagagaggaggaaatattttggtgtttgaaaagccgtgaactttggtttaaggaaggggataaaaatacaaagtattttcatgctattgcaaagcaaagacgagcaaagaataagattattaggctcctgaaccaagatggtctgtgggtcgacaaggaggtgggcattgaaggtctagcggttgatttctttaaagacctttttcaacctctaatccacaagatttccattccgcgattcgggatgtgccagtgatgatcacggaaacaatgaatcagaatctcaccaaagagatatctcccgaggaagtcaagcgtgcccttttctctctccattcggataaagctccaggaccggatggtatgacgacactgttttaccgtcatttttaggaattgactaggccagacttagtaaaactagtccaaaatttccattcttcaagcttctttgatgagagactgaatgagacaaatatttgtttaatcccaaaaatagaccgaccaagaaaaatggcagagtttaggccaatcagtctgtgtaatgttagttacaaagttatatcgaaatccttagctctcgatttaagaaaatcctttcagaattaatttccaagacacaatccgcctttgtggctgggagactcattacagataacatccttatagctcaagaaaatttttatgctctccaaacaaactcgacctacaaaaagaagtttatggctataaagactgagatgagcaaagcttatgatcgtgtggaatggtcatttttacgtgctcttatgttaaaatgggtttcgcccagaaatgagtagacttgattagtttttgtatctcctatgtttcatatagagttctcctaaatggggtaccgatgggtttttattaagccaactagaggaatccgtcaaggagattctatttccccttttctctttattttatgttcgaaagctttagtggcgaacctaaaaagtgctgagtggattggaagaattcaaggcctccaaatctctagggcaagcccatctacctctcatctattgttcacagatgatagtctctttttttgtaaagcagaaccttcccaaggccaagaaatcataaatattctccgcctttatggcgaggcttcaggtcaacagttaaatactgctaagtctttggttatgtttggtcatgaagtggacaattctacccgaaatactatataggcaaccctcgacatacataaggagggaggtttgggaacttatctgggccttcctgaaaaaattcatggctccaaaactcaagtcttctcctttgtgagagataggttacagaaacgacttaatacatggtcaacaaaattcttgtcaaaatgtggcaaagaggttcttattaaatctgtaacacaggcccttccgacatatgttatgtcgtgtttcctccttctaaaggctataaactcaaaactgagaagtgccattgcaaatttctggtgggaaactaatgaaaatagcaatggtatccactggataacatgggataaagtttgtaatccacactccgagggaggtttagggtttcgaacaattgaggaatttaacctagctctactagctaaaaaactttggcggcttatcagatttctgaattcccttttgagcagggtgttgagaggaagaaactttcgttttagcgaccccttacataatggtgcttctaacagtccctcatacggatggagaagtatcatggtgctaaacctctgcttgtttcgggtctacgaaggacaataggatctatcatattgactcgagtctaggaagattcttggatccccacggttccagcgcgttctactaagagtcttcttgacataagggatcctcatctctatgttaacgatttaattgatcaaaatacaaaaatgtggaaactggaccggctccaagccttgtttgaccccattgatattccactcattttaggaatctgacctagtcgtacctatttaagtgatggatttagctagtcgtacactaaatctggaaattatactgtcaagtcaggatattaggccgcgcgagatttatttcgtcctacttgtgacccccattttcagggacctcgtgtcttggcacttcaggcacaagtatgaaagcttaaaactacgcgaaagcttatgcatttcgcgtggcaatgtatctccggctgtttagccacgtgttaacgactaacatatcgtcatatgggtacggataaagaatgtcctcgttgcggagcgtctgaggaatcaatcaaccatctcctatttcattgtccaccttcgcgacatatttgggcagtatcgtcgatcccctctgcagggaatattttccctaagaactccctcttttataatttcgactttcttttttgacgaggccgagaattcggaataggagaggaggtgcttgaactcttttcatggatactttggtatatctggaaaagtaggaatcgctttatttttgaaaatatcagggaaccacccccggaaactttggccctagcactccaagaggcaatggtgtggaaacaagctaatctaaaagatgatgagtctttagcctctattacttcttcaattattgaccaaagtccttccattatgtgctttgaatgccagtttgatgtgtcatggcatgcagatgatacactaagcagacatagatgggttttcgttcgaaataactcagttcttcatctaggcctaaagagtggtcgtcggagtttatcgccgctccatgcggaatttgattctttgttatgggcgatggaatgcatgatatctattggcaatacgtctggtgctttcgcttctgattgtgcaaacttgatctctatcctcgagaaccaagatgagtggccgacttttgctgcggagttgacctcctatcgttccttagttctttccttccctttctttcatattagatttcttcctcgtagttctaatactcgagctgattgtttagctaaaaaagctcgggctcgtaatagtctttttttccatgtaagcgcatcggttcctgaatggctctctatagaagagagtctctttccgataacttaatataaatggtgttggagaaaaaaaaagaccttttaaccttcaacatcttcttcgttgcttcttctcttctcctcaatccaaaacatttttccagaaaattaagttttttttttatctcaatccattctaattacaaacacctattgatttaagaaaactaaaccctaaggatggtactatataaggaacccaaacaaaaataattaaactaaataaaatcatctcaattttcagtttttagaaatctgaaaaaatcatgtttagaattttattagacatcattggatgggatcaaaacataatcaaagcagcgattggtgtttgtgattgaatttgatacttcggttttctcaaccctattttgctatttatgttttataattttgttttgttttagttaagtttatgtagacaaaaagagatgagaggcgagaggtgagagggctaaaatggtcttaatatacaaaatagagaaaatatcacaacagatttttttttaggttagtttcttaattattaattttttttggttatagatccaaaattccctacttttttcggttcagttatagaaaaaccataattttgtatagggtattgtaagaactggaactttttggatggtttatagatttaggcatttttaatatgttgcattaacggttttgccctctctttctacctttcccaaacccagaaaaaatcgttcaattacactttaattttgatggcaacgcaatctccggcgtcgttaattatcaatttccaacatcaacaattactcatgccacacatgtctggaatcaagaaggaaaaagatgataaggcgagatctagatcttatgaacgacgatataaatatactacggcggtgatagtgagccggtggcacatctgcgcaaatacgtgtagatacacatatagaagatgaagattgggtttggctggatttgcttgattggatgaatagaaacgtatcgatcatctcatcgtcgccaacaacaacacatctccgatttggtcattgtctaaggttgaaactcttgggttctctatgtagtatcctcttagggtttagtattcttccattaaaaagcaattaattgtttattgggttcattggaacattgtcgttagtggcagatatattgtgaatcatagcaaatggattcatcaaagaaggagatagtattggatttaaagggtattttcgttagtttatctcccaaaaatgcctttttctataagcccatgataaaactgtctaatttttaatttttaatttaaaaagtgtccatttctgtaatagcccttttttttctgttttgctgaaccccaaacaaataaaaattgtgcctcctccgacaaaaataaaataaaaaaaagggcgccttagcttgtgggcctctagtggttgcactgtctgccttcctagttaagccgacaggataagccatgctttggatggttggttgtgcaatgaatgataaaaagaaatagaagaatggaaaaatgtaaaacataagtttctgcttttttgttatcatttgttttatgaaattgtattttattttttattttgtgtgctggagaatcatgttgaccgtagtcttattatatagacatagatggcttgaggagtagaatggcaggttaattcagcatatttagcggattttcatagcgatagggaagaattctctactttttctttataattaatttctcgcagtgcaaatataaaagcggataatttagcacgaaaaattcataccgaaccgcattatattatatatgtaaacaacatttcccataaatggagtttttttaataaaccggtagacaaaagaaaaaagagaggcttgaggagtaagaccaagtccaatggtagtccttgaagggttcttgaagattgatttcttaaaagttatgaaaaaaatttactactaataaaagaaactctttgaggcctctcaagatgtccacctcagcttttaaacaatgtgttctcaagttgccggatcatcaactctcaaaacttctctcactcacaattctatgcaatccacgtcacaattttttttctctttttaacatttcatattatcttatctttcttccgtctaatcattcaacaccatttcaattttaacttttacaatagttttgtttaataaaattcatcaccaaaccctaagaattttacttcatattatttttttctttttctaattttttattattatataataattaatattatcgattaatttaacaaaattattattgagattcatttaacaaaaaaataaaaaaattaaagatacagaaagggtttatttaaagataatagaaaaattataatgtaaaataaaaaaaaattgtgtccaaataaaacaaaaccagtgtcaattaaaatatgatgaattttggtataaaaatctttaaatatcaaatttattattataatggagattgaaaataatagcactaaaaaatttttttcttccaaaaatatagtatctctgttgaaaaatttcacaaatagcactacaaactttaactaaatattaaatataaataactaatttaattaaaataaataaataaaagtaaatatttcccgccaatattttttgtcaaaatattcctgccaaaaatatatccttcaaatttttcccgacaaaaaattcaggaaggttactacgaaatttgggaaaaatttcatggaattcaagaagtatttcacaaaaaagttttggttaaatcctttctgaatttcataaaatccttcctaaatttcagaaaatgattatttgaaagattcaacaaaattgtggaaactttctacagaattccggaaggattttgtgaaattcaggaagggttacaacaaaaaaatattttgaatatcgtaaaacccttcctgaattgcttagaatctttcctaaattttgtaaattccttcctgaatttttttaagtgggaaaatatggacgtaattttttggtggaaaatttttgacggaatcttgtttccctgaaaatattttggcggaaaagtttttaccgaaattttttggcggaaaaatcttgtagagaattttttagcggaacaataatgtcgggaatttttggtaataaatttgtgtattttttgaattttttaaattgttgagccgtgagcaacttcatgctgaggaccttccacgaatgggtgggccgtgagcagcttcatgccgttcctctagcgtccataactagaagagccaccggcgaagcctcacgtatccgtctggaaagcctcgactgcatcaccgacaggaagtatgtcgatgtctaaatcactgcctcactcccgtcttccaatttgcaatccttaccctgtaattaagatcaggaaactcataaactatatctagatcttcgtttttgtcttcaagagtgagagagaaaagcgtcaaaaacgaggcaacgattgtgcccaattccttccccatgtttggaaagtttatttgtccacctcctccatccaaaatgtctctttattcaaaaaaaactgcagattattccaagtctcttaatataaagaatcaatgacaataattttgtttccatcctgtaaacacatatattattaattagattatttttcttcttcttttgagatattatttgctggaatttggttggaaattagattcaacgggattatcaactgaaagtaattaaacatgcatacaaatgcagatatattcaacgacaaaatctcttccaaatatttcttattgatattttggtctatctctttgacagacatttatttataagtgattcataaattatagagttcacatgtatttattttgggacaaatggagaacattatttcagagttgtaatggtatgtgcatccgatcgtttatggctaacaagagaaactcatagtatccaaccataaccatgtttcctctgtcactatacaaattcagatactatgttttgttagttcagttaattcatataatattcatattcgttcagatatttgtaaataattaaatttgatatttgtcatataaaaaaaaagaatactaaaactaagtccttgcataacaggggccataattaggggtgggcattcgggtaagcgggtcgggttcgggtaaaatccgatcgggtaggggtcttttgggtagagaagtttaggaccgaatatggtaaatctaaaatatcggttcggtttctgttcgggtttaggtcggtgtggtatagatttttgggccctattttggaaccgatacccgaatttttgggtaaatacctagatttttcgagtaaatacccggatttttgggtaaactttcgggtctcgggtaaaatttagattttcgattaaaattttgggtattttcgggtttgaattcggtttttcgggtagaggaattttggacccaataaggtaaatcttcagattcggtttcaggtccaattttttgggtcggtttcggtttggattgtcggttccggtttttttgcccagcgctagccataatgccagtaatttctataatttagtaaccatattgtaaacgtgtaattcaatttttagagcttattcaacgatcatgatttgtagaatcctttaagtttttttgcatgaattagaatcctttaagttggtataagaacaaaggtcaaagcagcatgtacacaaggaatttgaagcctctggaatcaaaggtgtcttatattgtattttacttctttgctatttgcttttacatttaatgatccttacaatcatttgttaatacaaagacgaattatttccattgagttttgatttcggttacgaaatgcgaagaagacaattatttccggcaaccctctctctttggttttctcttctccggcttaatattaggtgtaggtgatgcctgcccatatcaacgatggtgtaagtgattcacttaatttcttggtacatatatagcttcaaagaatctttgggagacatgtttttttatggagtatagcattttttaacatacatgaactccataacttccttaaaccgcattgtcgcacagagaattaattatctttgaggtgttagtgtatttcaaagttcaaaatgccatatttcttaaactctccaccaactcatcatcattattcagttttgcgtatttgctatggttaggtcttacttaaacttttattttattttatttttgaaaaattgttaaatttattcaaagaaaagaccgggtttacaatatatgcaaccatttattgacttgatttagacttaagatcaaaagaaaaaaaaacaaaaaaattactaatgatttggcgttaagttgtctctcgctgcaaaccatatgcggaggccatcgatatacttgtgcaagccttgctttgtgactgtgcttaaacggtttcgagtttaccgatcaatgaatttgatgatatgatccgatggtataggcactccatgcctacgcttgtttctttctctccataaatgtgtgtaccgtttattttaacctgcctcctacagtggaaactgaaaagcaaaacagcctggctaattggttgattacaatggaagaaactaataagtctggcttcatctcagttccaaacttacaatggtgaagacatcttatgctggttctctctgggacttttgacgccctttggctcacatgatctggataactaatatttatgtcacctattactcttcggaagttgaaactaactgctggtttccaacatttatcttcttttggcagttcctatacctaaaacttatcggtcttggaaatagaagaattttatggattcaaggtttttggcaaaagtatatgtcaatgtgtgaggtacattcatggatcataaaaatgtttgactgtgtcatatacatatttcattactcatcagtttcatctcatctctctctttgtaggctaattatgatttttatggtatacataaaatatttcacattttactaccatattcgttttgaacagaaaaataaagtttttgagtgatctttaactctattctacaacaacaaaaataagctacaagagtaaggcataagagaaaaaaggtatgatcgagaataccaagataggaataagactgacatgacaaagataggaaacattctcatattcgccaagtaggttagaagaataagacgtttccaagaggtagttcaaggttatgagcatgggaaataatagaaatgacctccacttaaaaacaaccaaacttttccattaaggttaataagagacgacagatgttaattatgtacaaaataaggagtcgtgtacgtttgaatctagaaaaatgcagagagttatgagagtaagagctaatcatcaagataattagagtaatggcctactgggtgggttcgatgagattcagaatcataaatatttgatcatatcaatacatatattaattcgttaaaaatatatatatatttacgtatcgggcaagtgagcaacagaaatctgttttattcatgtaaatcgtagttataataaagtaactcataatttagctcaatatagaagcatacgttctagctttagttataattgtctaaaatctccatcttggattgcaaaccatttgtacaatgatttttcaaaatcaatataagttattctgaaaaaaataaaataatacttttactgagaggaattaactaaatcaacgtacattttaaatataatatcatcttccttaaaagtatttgtaagtcaaatgttgaacttgaaattttgaataatcaatttaaagtttacgtaacaaaatgataatttctaaaatttaaccgcgcgtagcgcagaagaacctaattaaatcataaatcagaataatacataaggatgtttctttgttaagggatattttgagaagtaaaatgatcctacgtgtcagctttctattggttgactctaatgagggaagaaaataaattttctttctcttaccaaaaccgagaaaacggccaattccatcacaaacttagttgctttatcgtattcatacataaaactttgttgtgtgcctaagacttcataaactcaagttaaaattgaatttcatacacgaacaaacgaaatccggtctaaacccacaaatctcaaaacgctgttaatgttccgttaacacgatgctgactagaatgccgcgtgtatgataacacaatacgacgtagttttatttttcaaagaaaaaggttaaaagaatatgaatcattaaatcaaaaacacgaacccgtgacccatgagacataacttcccactcgatattaattgagccaccatatattattatctacaagaggctttgtttcttcctcttaaaaacataaattgtatgggaaaaggtagaaaatcaacgaaagcttatcatccctcaattcatcacacactcttcaattgatcaagcgctgcgattgtttttctaatctccgatttcttgactttttctttgaaagctccgtagtttgatggcaaatcttccccaaaaatacttgagaaactgagttgaggtggggaagaatgtgagtaaaagaaaagcaattagtagagaagaagggataatggagaattggttttgttcttcgcggatttggtttggggaagagacacaaaggaagaaaaagattatcgttatgaataaaaattatttgtttgcaattatattaattgtcatagtggtatagtcggtattagtgtgcttttaggtctaacagggcatgggtttaagtcaggtcattgatttcatctatttctttttttcttttttgttggagatacgtcgttttgtgtacaacgtggcatcctagtcagcgtcgtgttaacggaacatcaaccgcgtttagagatttgtgggtttagaccggagttcgttttgttcgtgtataaaatttaattttaacttgagtttatgtagttttaggcacacaacaaagttttatgtgtggatacgataaagcaactaagtttggggtggaattggccgtttgcctactaaaacctatatgtcctttttttagttaaacttttttttgttaatttgttttacctatgtaattactaattataattttttggaaagtagtttaaattgatataaatctttatatctcgtataggggtgttaaaataggtcaaaatttatgggtcaactcaactcaactcaacccatgaaccctaatgagttaaatttttttgactcaaatgagttaatgggtcaaatgagttattgggtcaattggtttgatgagtcaaatgagttgggttgtaatggttaatggtttcaatggtttactcaattaacccatcaaattttataaaattgaattaaaccaactaaaatctctaaaccaatgtcaatttaagcttaaccaacacatctaaaacaatttaataaaatcaatatttttccaaatttcttaaatatacaagcgatgaaattgagaaaaagtaaactcgtaatttttccaccaaaaaacataaacccgtgattttctcgccaacaacgtaaacccgtgattttcccgccaaaaacgtaaaaccgtgatttttccgcaaaaaacgtaaatccgtaattttcccatcaaaaaacaaaacctgtgatttttccgccaaaaacgtaaactcgtgattttcccgccaaaaaacgtaaactcgtgattttcccgccaaaaacgtaaaaccgtgattttcccgccaaaaacgtaaatccgtaattttcccgccaaaaaccaaaacctgtgattttcccgacaaaaaacgtaaacccatgattttcccgccaaaaacgtaaacccgtgattttcccgctaaaaacgtaaaccggtaattttcccgccaaaaaacaaaacctgtgattttcccgccaaaaacataaacccgtgattttcccatcaaaaacgtaaacccgtgattttcccgccaaaaacgtaaacccgtaatttttccgccaaaaaaggtaaactcgtgatttttccgcataaacgtaaacccatgattttcccaccaaaaaaacgtaaatccgtgatttcctcgccaaaaacgtaaacctgtaaacctgtgattttcccacaaaaaacataaacctgtgattttcccgccaaaaacgtaaacttataattttcccgctgaaaatgtaaatttgtaaaaagtggaatacgtaaatattctaagtttgatgataatgaattaatgattattaataatgataattatttattattgtttcataataataattaattaaattattacttaaatgggttaacccatttaacaactcaacccatcaaattaaatgagttatgggttgacccaacccatttaacactcatttaactctaaactcatttgattatgagttgagttgagttgggttacccattttgacacccctaatctcgtatcttgctttaaagcgatataattcacacaaccaaaatcaatcggctcttcacaagtggatttcaactattttacacatatgccttcaaatctcggtaatattatagcctctcgcgcccgagttcctgatcggtttatgcatcaacaattgaaagatgatttggttgagcatatatgacaaaactttggctgaaatcaagctaacaactaattgttattccggttttcaatattttatatatgcttttatgtcatttatgtttaaaattttaatatttgtattaattattcagttttatgaaatatttctaattttattttaataataaaattttgtttttttaagaaatccacttaaaagctctactattggacaaagaaaaaaatcaagggaacaacaaaaacacctaattttagatttctccaaatttattatttaaaaatttggaagaaccagtgggattgctctaaatgtttgtgtcatagtaatttatttttcctttactttgctaggagtcgtaaaatgggagtcaccaaaacaatttaatatttaacttaatattagttagtttaatttcccttctactataagtctataagttacttttaagtttttgtagaaaacctaaaattattacatatagctaagtttatatctaactactaactatatatgataaatctcataaaactaatatacataactagctagctccatatatcataaacctaaatcatgtcgatatatatataagttgcaaaatacgactaacacgtggttccgtctaaaattcttgtgggtatctaaagatgcaatagccttttcacccacaacaattataggtctcgaaccgccatcaacttgaaaagtcttttcatcatggtctaagcaataaaatcaaatcaaataataataagtaatcattcaaacaataaatcagagttcaattatatgttttgacatgttaatgtttttggtaatccaaagatttaaacgatcttttcaacacgtgagcattattcttccgcatatgtgtgtataataaaattataaaagtaacagtcgatgtaaaaacgatttttttggttttgaataaatgaactttaaggatttaatatgaaaataccgattatcaacaattacagtatccttgtctttatcattgcatacacttctactttcgtatgttgaattgtgaaatcgaatatttattattgttattattagagaattaggttgtgaactcacggtacgtatgggtctatttttataacttttaataaaattttgtgtgactaaaaatatttattaaaaaatttgagatatatgttttaatatgtctacttattgttaataattcaaattttcttgagttttaaaattacaatagcaaataattcaatttgaatacataattacaaataactctaatacaacttttaagttttacaacataaaaagaacattcttttggctcatattttgataaatattgtaaacattttgatattttggatgatcacgtctttttacgtaagacattttaattgaatctaatgaaataaatggttgtatgcgaaaacatttcgacgactttctcattttagtatctccaaattcactattgttttttgtttatcttcactggattagttagtatagcttttctaaaaataagattacatacacaaatatattcataagctaatctatactttctttttaacaactcatgtttttttcacatgcttcatattcaaaaatccattcatttccttattagtaacttttttttcaagctcgtcgagaggtagctaagtcaagtcaataaactcttcgtttgaatttctatgagttttttttttgctctatattgtttttattattctaataataggttttaatttctaaattggttcttaactgtatgatttctctcttttgatgttgcattttagattctcttcaccttcacgtttcttagactaaaagacatcagcttatatctttgggaacttgattcaaattgataggattaagaacaccaccatcaaaccatgccccttgtggctttaacgcttcagagaccaaacacatcttaatccctcatcacttcaccttcatgtgaaaaaatcttttacatacttctttcctatggtgcctctttccatcctcttatgattttgtctaagcagtactatcttccaaaccttgtggctctatattattttttttcttgaaaatctctttctttccttgttagtaatttttttttcaaactcgtcgaaaggtagcttagttaagtcaataaactctttatttgaacttttaagaataaaatctttgttttgctatgttttgtattctattattctaataaaaaaaatttagcttctaaattggttcttaactctatcactttctctcctttgatgttaatgtttaaatcatcttcatcttcacgcttcccaaactgaaagacctcaacttatatattctggaacttgattcaaattgatatgatcaggaacaccaacatcaaaccatgtccttccaaactttaacgctctacagaccaaacacaccttaatccctcttcacttcaccttcgtgtgaaataatctttcaaatacttctttcctactatgtctctttccattctcttatgattttgtttaagcagtacatgttctaccttccaaactttttacatgtttcatatatgttctttgaaatcccttcctcttcttattagtaaaagcctttttcaacctcgtcgagaagtagcttagttaaatcaataaattatttgtttgaactttttagaataaaatctttgatcgactatcaatgatcaatagatgtttatttatatagacatcatttctttattatttaggactttattagtttctttggttgttaaaaagaaggtttcctttactttcattaagctttttcttttcatttaaactttaaattttcaaactttcagaaaacttccactcggttgtttattactctctttttgttaatttttagaaaacttcttatatttgaatattttttttcccaattatctgttttattttagaattaggattttttttctttatttatttggaagctaacatagtgagactaacaatgacattaatatttctatattttaataattgaattatacattttcctttctataaatatcttaatatagaaatttgttaaatttaaaatgttaattaatgacaagtcccaccacaattagttgtttaaaactctatgtggacgccctaagaagcaaatagcctcgacttttctacagtatagatttttaatatataaagtaatttcaaattttggtaattttaattaattatattaaattgcatcaaattttctttttaaaaataatttttgttaaatatattttaatatgttaattaattagttttaaaaatgttaacttatgatgtggctgctttggattatttgtgtaaaatcctataaaaataatattacataattataattacttagcttccttttttataagtttgaatttaatatgttttatttttttttttcttttcaaatagaaagtaattactattttcaaaatattaattaattggatgctaaatatggtaattattgatgtggcaactctcgattagttgttttaaatcccatgtggacggttttagaagcaaatagcttcgacttttatataatatagatttgattcagagtatttcaatttttaggtcattttcctatttacgtttgcacaaaaataatatatacatatgtatattattttgtttaaaatctattatttattgtgacaaaaaaaattctatttttgaaatacctacggaaaatcactaagtaaatatcatcactattttatcttaaatatatgaaaactatcgaaaatgaattttattaaattagaatggaagcaattaacgtagacaattattactgatgatcgatcaatgggtattccaacttgattacctaaccggttgtagtcgacatcggaaccatattaagtaatatggtaaaagaagtgtatgagcaattaagaagaaaaaactgaatatatttttgacggaagatttgagataggattcgcacgtcaacaaaacagagtgctactaaaataaagatcatagtgcgagatttggtcgattctggatttttgattgtaatgttccacctcagatggagcagagttgtctttagatgaaaagggtatgttgatgaaggctactgagtgatcggtccagcgattatagaaattatgaagatataattataagaaaatcaaaagtatccaaaagattgttggtaaatatcaatatgttaacttagaaagtttactatgatttctaaatataataattgatatttttatttatttaggattagaaaattttggttcatcatatcttactatataaaccttagtttcaaagtttcattaacaagatcatgatgtgttagtttatggcatatgttaagaaaaataactttatcttttaatctaataactaaacgaacaaaatgaaaaaaaaaaacatatgaaaaaaataacatatatacatgtgtatctataggggtgttaaaatgggtaacccaactcaactcaactcataatcaaatgagtttagggttaaatgaatgggttgacccaactcattttgttaaatgggttgggtcaacccataactcatttaatttgatgggttgagttgttaaatagattaacccatttaagtaataatttaattaattattattataaaataataataaataattatcattattaataattattaattcattatcatcaaacttagaatatttacggattccactttttacgggtttacgttttcggcgagaaaattatgggtttaggttttttggcgggaaaatcacgagttaacgtttttggcgggaaaattacaagtttacattttcggcgggaaaatcacgggtttacgtttttggcgggaaaatcacgggtttacgtttttggcgggaaaatcatgggtttatgttttttggcgggaaaatcacgagtttacgtttttggcgggaaaattacaatattacgtttttggcggaaaaattacgggttttcgtttttggcgggaaaatcacaggtttacattttttggcgggaaaattacggatttacgtttttggcgggaaaattacggacttacgtttttggcgggacaatcacgggttttcgttttatgcggaaaattcacggatttacgtttttggcgggaaaatcacgagtttatgttttttgttgagaaaatcatgagttttcgtttttggctggaaaatcacgggtttatgtttttggcgggaaaatcacgggtttatgttttttggtgggaaatcacgggtttactttttctcaatttcatcgcttgtatatttaagaaatttggaaatattgattttattaaattggtttagatgtgttggttaaacttaaattagtattggtttagagattttggttggtttaattcaattttacaaaacctgatgggttaattgggtaaaccattgaaacaattaaccattacaacccaaatcattttactcatcaaaccaattgaccctataactcatttgacccatcaactcatttgagtcaaaattttcaactcattagggttcatggattgagttgagttgagttgacccatgaattttgaccaattttcacacccctatgtatctatatatacatttttgcagcacctttttaaagataatgtttgagatttgagccataattcaacaattaattcaaatgggtgagtataacctggataacatgtttaattctgttcggatcttggataacattaattttcggaaaagttacctaaaaataaataatataaaacgaaattaatgatttaattaccaaatttaatataaataatatctctaaactaaccatatttgttatttaccttaactaatttcctaaaatatttgtacctaatttaaacataaatatataattcttctttcacttttatttgatcttacactttaatttatttttaatttatatataatatatatagttaataatataaaaaaattctgtatattatgtaattcaaattttttaaaacaaacatatattattcaatggatgaagaaataatatgtgtacaatgtcccacatcgcttagaaaaattggagaatggttcagagtcatattataaaaagggaaaaatgtcatttaaatcacgatttcgcaaattgtggtgctttaaaacataaactttgtaccttgtgattaaaattatcaattatgtgttgacttcagataaaaatcactaactttcgttgacaaagccaaattagtcacaacatcaactgaataaacggagcaaattagacgctatgatttatccattaatgagtccgtttaagagcaaaacaatgttgtttgcaattgaaacaaaaacagggaaaatgccatttaaatcacgactttgccaattgcggtgctttaaagcatgaactttgttccttgtgattaaaatcatcgattatttttgaatcgatatatcgattttgcaattgaaacaaaaacctccaattcagaaataagaaactctagatcctcaaatctcttcttctattcttcttcgaattcactcctgtattttgaaatcgaagtgaatcacaaggcacaaaattcatgctttaaagcaccgcaaatagcgaagtcgtgatttaaatggcattttcccgtttttgtttccattgtgaacgacgtcgttttgctcttaaacggattcattaacggataaatcacagcgtctaattgctctgtttattcagttgacgttgtgactaattcggcgttgtcaacgaacgttagtgattttttctgaagtcaacacataattgatgattttaatcacaaggtataaagtttatgttttaaagcaccgcaaattgcgaagtcgtgatttaaatgacatttttcccattataaaaaggaccaaaatgattttgattacgaatgagcaggaatcttgatttatcagtcatccaaaattaaaatggttatccggtttactcggattctttattttgaagaattgaaactttaaaatgtttccaaaattataaatattttaacattatgataaagttaaaatctttataattttaaaaactttttctaaagtttatctttaaaaaagatttaaatttttttataattttaaaacttatgaagttttaaaaattatagattgaattttacaagaaatttaaacattataaatatatatatataatatattaatacgggacgatatattacaggagaaatcttaaatataacaatcaaaattcaatgatgaattttgggtcgatattatatttttttgaagtttttcaaattttataatattaaaatttataagaaaatgataaaattatgtttaattttacggaactaggttatatggttggacggatttgggtggataataatatggaatggtatattacgattgtacaatgtccgacgttgcttaaaaaattggacaatggttcaaagccatagtataaaaaggaccaaaatgatttcgattacgaatgagcatgaaatttgatttatgaggtgtccaaaattataatggtttgttaactagggttctttattttaaagaatgaaactttaaaaagtttcaaaaaattataaattgaattttacaagaaatttaaatattataaacaatataaaagatattaatacgggacgatatactacgagagaaatcctagatacatacagcgagagaaatcttagatataacaatcaaaatttaatgatgaagtttgggtcaatattaatcttttttgaagtttctaattttataattgaaatttataataaaatgacaaatttgtatttaatttcacgggatggggttatatggtgggacgggtttgtgtggataataacacatttgattcttttataagaaaattaaatattataaatgtttatattttaaattttatactacaagtgaaattctagaattgactggtttgggttgataataatttgcgatagaactaggagtgaaatcctagaatgacaatcaaaatataattatataattaaatattaccacgggtaaaattctagaattgacggggttgagtcgatattaatatgggatggtgtactacggatgaaatctgaaaaacaacaatcaaaatacaattatacaatattaaatatttaaaaaaataaacaaatacaacttaaaactttaaaatttgagttataaaattttgtctcgcggtgtatcatacatttaaatcaaacaatagcataaatttaaagatcatcctaaaaaaaattcaattattttttatttaatgaaaatataggcctgcggtataccgcggattaatatctagttgtataaaaacaaactgaactatgtttccctaataaataaataaataaaaaaaaactgaaaaaaacaattcctgaacaattttacatccaattcatagtataacgacatatccaataacacaatttgaattctaatagtaatctctaatacacacttttttatttatcggaatatttttaaactaaattttaatagctacacgagataattgatctattgaagtattaactactaacatagattttaaggtctagttatttcacataaaaactaagttgtccaactactaacgcaattgacaaccacaaccaacaccaatattaagtatgattaccgaccaaatttgaattttataaacatatagaattttttttgccaactcataatcatatttttatatgtattttaatataaggtgaatgattatcttttgtttcatgtcatattgggcataacaaaactagtacaacaaagttgtgtgaaccactccttttatatagttttgttgttgtcttttcttccaaggaagattactagacttagacaagtggattatatatatatatatatatatatatatatatatatatatatatatattaactaatctttcaacacttgtggattgataattattcatacttttaataaaaattccatagttcaatgaatctgtaacaaaaccaagaagtgacgtgatatacttttggaactataatcatattgtgagctcaatggataagaattgattgtagtaaatgatgtcggcagttacaagtgtagttagatatatgcaataactcaaatcggacatgaactcattttaacttatctaaagagaccaccgacgaatcattttgggttcacaaaattgtacttcgatttctaagcctgaatgtgaacgcacgtttttgaatatttcaacacgtgtttcatatttcattacatgcattataacataaatattacatctttgagtctttaactagttgaccaacaaaaaaaaaaactttaactaagtctagctagttttgttactacatatataaaaacaaaaccgaaataaatatttaaaatttataatatatttgtgtggctaaatcaatcaacgtgtcatgaaggtctaattcaagttggtaaggaaatcttttgtttatgtccatttcccacgtgtcactatttgtatgacggctagagaaagacatgttgaattaactagtgactccggattatataagcaagcatctactaaaaagataggaacaacacaatttgattacactgagcaacacaaaactggcgaaccaacgtgactctaacgaagaaaccggcaatggccagtatcactacaatgccgaagaaataacaagaatcataaacgagccagaatattatcccccgggttacaacttgtctaccaccgcaatttcaaacatggtgtctatgctgactaatgttgtctctggtgagaccgaaccctcggcatctgcgacatggacgatgggtcataagagagaaagagaagagttttctttgcctcctcaaccattgattaccggttcagctggtatgcatgtttttctaaatcgaatttttttttgttgagaacactatactaaccaataaaacattctttaaccaaaaacaaaaatcaataaaacagtgactaaagaatgtgaaagctcaatgtccttggagaggccaaaaaaatatagaggagtaaggcaacgaccatggggaaaatgggcggcggagattcgagacccacacaaggcgacacgtgtatggcttgggacattcgagacagccgaggccgccgcaagagcctatgatgcggcagcacttcgctttagaggaagcaaagcaaagcttaatttccccgaaaatgttggaactcagacgattcaacgaaattctcatttcttgcaaaactctatgcaaccttctctgacatacatcgatcaatgtccaactctattatcttactctcgatgtatggagcaacaacaaccattagtaggcatgttgcagccaacagaagaggaaaatcactttttcgaaaaaccatggaccgaatatgatcaatacaattactcctcttttggttaactaacatattgtcaacgctttgtatttctacttattcgatctaccaattttttctctcccaatacaacttcagtctgattattgccttcttagatatgtcttcgaatgttatgactatacatgggtgtatataaaatttgtgatcaaagtcttgtaattagcgtgtgattctacatctttttcattagaaaaattgggttttcaaaattactaactcacgtgatcgcaacacatgagtataacataagatgtcgtcactaaccaaatataattttgttaatatatttaaagatagaatcagaaaatttcttaaaaaaagaagtatatacaataaataagaaattattttgtttatatattcaaactctttttattaatatattaaactattaacctctttctattaattttgttgttcttaatatattaaaaaaaagaagttaaaattctttattgtatcggaaataagaaaatgaaatttgttaacaaactattaaactaattttgttattttgttgttgttaatatatactccaaattgaattagttaataagtaaaaggctttagaaatcttttccaaattgtcaagataaatgaactgtaatcttcagaatagagaatagtggcttacaaagagctctcaaaaaagttgcaaaaaaaaaaaacgtaaaaataaaaattaggtctctatgggttttatacccagttaaataaaataagttatgaaactggataaaaaaaatctaatcgtagcatcaagaactggactgatagatctagtaggtggaccgcttgaccccaaggtgtttgaaaaacaatcttcgacgtcgtgacacttagttaatcgatccactctttgggatcaatcaatcccatcccttctagaaatctggtgctcgacgattaaaacccgctctttgtgaatttggcacttagatgggtgaaggttggaccgctcggtcccttataacctctcaaccacaaaggttcagtcttatcgcatgaaatcaattagtaaactacaattcatcctaacaaaaagaaagctatagtagtccatatattatgtagtttttgcttatgagtgcacataatgatgataacacaataaaacatggggtttcatacatgagcggagtaagaggtgttgtactagactaaagattagtttagcgatttagaattagcaaatagtgttaaaaatgacacaaagaaaaattttgaatgtataatctaatacatgattctcaagcctctaaatgagaaatattaaatctagattaagtttaaatatataaaatttagcttaaatctaaatttcaaaatgataggaactactataaaatcatatagtaacaagatacaaaaaaacatccatgtgttaccttaagttatatttattccctttagtaaccaacaaattttaactttctttcacgacaaaacttttgccgtctacaattcacacacacttccaactttgaagcttacatacaatacggtggcagcagtaacacacaccattatactacaaacatcgataaatttttatcaataaccatatcgatcatttgacaaaaccacccacggagtaaccatatcattataagtaaacataatgaaatttttgcttcaagtgaactgtgaacatgtgagtgtgttatcggatttagctgttgtcttttctttttatacgaaacaaaaaataaataaaacctttatcaaatttgtacaaacctctgggctttatttaggcccaataacaaaattcggcccatatttgagaattcacaaaacctagatactcttactataaattggaacatcattgatctaatacaattaattactgtgttaatattatttatactcaatctgaaatgtctttttttagctgtccaccagtttccaatctttgaaatacgaaacaaaaaataaataaaagtataaaacctttatctaatttgtaaaaacatttgttgggctttaggcccaaaacaaaagtcggcccatatttgagtgttcacaaaacctagatactcttactataaattcaaactagggttttaaagctcatttctctcttgcagtcctcatcgttggagcttagaagccgtcggcacaaggttcgtctttctctcatccctttcctcttcctttgcgtgaattcaccagaaaatgtatatctaccttagcgagtctgtctagtttagcgaatctaggataatctccggaagacacttttgaatcatcactgtttttgatctctgtttctttctctaattgtgttgttgtattactgttgatgtagaagaagaagaagaagaatgtctcacaggaagtttgagcacccaagacatggttctcttggtttccttccaaggaagagagctaaccgtcacagaggaaagggtgagtctttttatcaaatgtagattccttgttagtgaaatgattactagggttttcataaagcttctctctttttgctcactcacaaatattgaattcttaagtagtgaatgaaatggttgatttgattcaaaaggttgttcttttattgtttgttttgcttatacgttgttgttggtttatcagtgaaggcgttccctaaggatgaccaaaccaagccttgcaagttcacagctttcatgggttacaaagctggtatgactcacattgtcagagaagtggagaaacctggatccagtaagtgaacttgtgtttttttcattctgatttgttttgtggaggtttttgcgatttaaagtcgtcaactttgtgtttttattgttgtgtagagcttcacaagaaggagacatgtgaggctgttaccatcattgagacacctgctatggtggttgttggagttgttgcctatgtgaagactcctagaggtttgaggtctttgaacactgtctgggcacagcatttgagtgaggaggtcaggagaaggttctacaagaactgggctaagtctaagaagaaggctttcactgggtacgctaagcagtatgacagtgaggatggcaagaagggtattcaggctcagcttgagaagatgaagaagtacgctactgtcatccgtgttttggctcacactcaggtaagtttgcttattgaatggaagtgtatatcataaactcttctgcactacgttcttactgacaattctatgtgacctctaattacagatcaggaagatgaagggattgaagcagaagaaggctcacatgatggagatccagatcaatggtggtaccattgcccagaaggttgactttgcctacagtttctttgagaagcagatcccaattgaagctgtcttccagaaggatgaaatgattgatatcattggtgtgaccaagggtaagggttatgaaggtgttgttactcgttggggtgttacccgtcttcctcgtaagactcacagaggtctgcgtaaggttgcttgtattggtgcgtggcatcctgctagagtgtcctacactgttgctagggctggtcagaacggttaccatcaccgtactgagcttaacaagaagatttacaggttgggtaaggttggtactgaggcacacacagccatgactgaatatgacaggtcagtagaaatttctctgtttcgtttcttttctcctgtctggtcatgattacttctgtggtttatctgagtctgatgataatgttttgtgtatgatgatataggactgagaaggatgtgactccaatgggaggcttcccacactacggtattgtgaaggatgactacttgatgattaaggggtgctgtgttggtcccaagaagagagttgtaactctcagacagtcacttctcactcagacttcccgtcttgccttggaggagatcaaactcaagtttattgacaccgcctccatttttggacatggtcgcttccagacctcccttgagaagatgaggttttacaaccgtgtcacgaagtaagagttgttttatcacaattcttcttagaaagtttcatgtttggttatctgttgctacttatctcagagatgttatcctttaaacaatgttatggagttttcttttgcttttagtttgttacttttttggaagttaaaacgatttgcttctcaagttttgagactttgatgtgttctttatcatttatgaaaaaccaacctggagcataaaaaacaacaaagaatctgtctttggtggtgatattgaaactgcctttaatgcatttcgaattatcatttgaaaattgatacaaaaccacaattgttacattggtgcttccaagcttatcaatcttccctatgatgaaacaagcatgcccacttccacaacttaaatcacatctgctgacaccaataggcagtatcatatcataaatctatatgtcattcactctagggccttatgagtgaacttccaatagaattgtggttggatccttcagcacaaaagtagccaatatgattaactccacagaaaggaaccaaatgatgcaaaccatataatcaagatgtacgaaggtgcaaaaacaagtattggtattgtacccaacagtggtaactctagacctatgtgtgatggatgtagaagccgttgtgtggacactttggtagtcaagacgtctaggaaaaactattactatcatgtgtttcttcgatatatattatccatggtaggacttctccaatggaaagatagtctgaagcagcgacggttaaaggtgtatatgaacaaattagtttgtatttctaaacttcgagatttctaatgtatctgaattgtccctatcgctatagcaagtagtgttgaatttaaacttcggttttaaattaagaaaacatttatggtggcttctaaggaattagagctaaatccataatttacatagaactttgaatgaaactaagagattttgcatggccagtagtacaacctccaaggatctgatggtagttacctcttgaaaggaacttctactctttttctgccatatgactgcgaaatgtatcaatgttcttttctgaagttaagaaaatctcagcttcattttgatgccttgaatcaataactttctttccaagttacaatgctctcttcccattttccgtttcgggagtattaaggaaattattaaacaatctccttttttccgataagaaaaatttctattttgttaacggaagagttggagtccttttctcttgtattttcctttcttcttaggttaagtctcctataaatatgtttacatctaagaacacgagatataaacaaattttctttcaaaagatctagggttaaaattttagcaagatgaattatgctagatgaactagacggggctatgatcatatcaaagactctaacaaagactgacattgttggtaatgtggcattaccaaaagcacaagtgatgtctgtcctcacaaggatgaatggtgtcacagatgagggtttggacaacggttttgaagtgcaagtccacgacataatggaagacgatctatacacagttaccctgaaaagaattgacgacatgaagtattatttcgggactggttggagtactatgaagcattcattagatctcgtagaaggcgatgttctgaagctctattgggatcagtttgaaaacaaattcattgttctcaatttttagcataagactatgggaacaatgattcctgtgtagcttgcttacatctatctccctttccgctttcctatatttaatcgctttagttacttattctagtttaagtgttcgttttttcttctttctattgccctaatttttgttgtagttttattttaactaatttaattggaatgccttgaatttcaagaaagcatgcatacatgtttttttttctttttttcttttgcttgtgttgtctcttactattcctataactaaaagtaacatagaaccgagctaatatatcacaatctcaaagacaacgcaaatactagtcggataagaaaaacagtaagcaccagtattggtctgagaagtcaaaagccttgtatcatcttctcctaagagtataaaaccgttattaagattgacacctttcttcgttgatcacattctacgagcgatcatggaagcaccagtattggtctgagaaggaaactaaatgtgactgatcgggtggttctacacatgtgacgactcttgtgtatagggaattacaattaccataagtattcattcctagggtaacttttaatgcgtgcgttgggcatgacgtctatacatgaaacataccaatgcaagtacacttgctttatgggaaagaatgttgaaatcaatgatttgaggtcttgagacgacgaagaaacttgtggtggttcaatggatagtactttttgattcggatagggcagaggaaaggttttgcttataacctaatgtgtttccattttacttgagagaatctaaaactgaaacaaagaacgtcttatttaggagactacaccgatatcaaacttttatgttttcaaccctgaaagggggaaatctttaacaagatcatatacacctgtaacacccaaattcttaaagttcacagttctcaaaaacaacacaaggcacatgttgaaccttgtagtaatcttcaccaccagagatcagcttgtccttagatgcctttgtcatgtcctcaatctctaattcttgtagatttttcaggaatctcgttccttcgggaactgacttcagtttgttacaacactttaactccatcgagacaagacgcatcatggcaccgtcttctacagtccactcctctagattctcaagctgtgacaatgtcaaagaatgcagttgagtaaaaccacttttggaacaacaaagcttactacctacaaatgatccttcaaacagttggagaatcttcaagtttggaagcttctcgagaaccacaaaagggtcatccactaatccgcattgccacaaacgtagagcaccaagatcagaggagaaactctgttctcctgggagtttttctagtttaaggaacagttccagttcacagagattagtaaatgcagagaccaactgtgttacatctactggtggaagcataggttcgcatggaacgtttattgtcaagccacggagacgtttcaagactttgcttagagaagacaccacctcgaagtctgtgttctgcgaagaaagattgatagacaatcctctaagacttgtcattgctaaaagatcccttggattgcactttccaacaggaaaatcccagagttgctgcaagtttcttagagtactcaagtccagctttgttttgggatcaagatctgaaggcatacacaaatgtttcagccggtgcagcttccataacacgtttggaatatacagttgccccttcacgaacaagtctaaagtaatcatcatcaactttaagtttccaatagatgatgtaagttccttcacgtttgtcaatctcacgctcaggttcctcaaatggatgagatctcctacatcgtctggcaacttccctccctcgatttgcactccctcgagatctagaactcgaagaagtttcatctttctgaaggaaaccttacccaaaagtgcccatgaacttccttgattctttataatatagacaagagatctagatcgaggatttatgtagttcacctgagacagtctctgataacacacctccctcatgagtcatgcatacggcatgtcatgacttccgaagttacaatgtccctcctcccaaccataaccatgcttctctttactaattcctcaagataatcttgcccgacatcttctactgtcgtgctagcctctgtgtgttttacaggcataaccattccctctgcgatccagtaactaactagtgttcccacatgaacctcgtagtcttcaggaacattgctttaaatggggaggcaagtactcgtaactcaagcacaaaacatctgcaactagcatgttcttacttccattgctactaactccatttgaaacatatgatgtgatgttctcgtatactctttgccactcgttccatgtacttttggttgccagaagtcctccaagaactgttatagctagaggtaaacctccacaccttacaatcaaacacattggaagtcaatcatccattagaggattcagtttggtgtatcaatcagtttttttccttgacaaatcttctcctaatgatttcagcatggaaacaacagcctaaaccattttcaggtcttcttgaggtgagaattcagatgagcgttttaatgctcgtgcaacacttttttacggactgccagttctacacaaagcttgagtttttacacctttgaacttcaagatattcagaaagtcaccccatagactatgtacaaagagtctgtaagtccaaaataaattttttggtggcatgtttattgggtttgattttgtgctcattttggaacaatagtcaaaaaaaaaaaatagtttaataatcttgcaagttaggttggctataaggagctgaatagtgaaacgatgagatgtgatactgcacttgctcattattttttaatggcaaaacaacatagaaagttatttaaaaacaaattatgtaacctctttttatttgtcggaaacttttcttgccaaactaagtattcgttctaagaatgaaaattatattttggtaaaattaatgaaccgtgttcaataaaaatattacgggctcacatttttagaaattttttgcaaaataagtactaggagaaataacatggaattgtaggggtgaatccccttcgaccacaaatattatataacgatagttctttaactctttcatgatataagagttcctttagatgactggaatttactagcaccaaacttctaatcattatgcatcaaatcattaaagtcactagcaataaaccaccaagaataatgtttcttgatttttttacccaatatcagatatcatcagtatacgcagaacttcatatacacccataggatcaaagtgtataatttctaattattccccaaaatctaatcaaatatacatactaaacattattaattttcttaaaacacaattttaatgggattacaagaccccttaattttaaagggctcaaagtatctaaagaaaacaaattaataaggaaacaattacaaatgagtaaatgggaattcttaagaaacaaaagatgagaaaaagatgatagataacttgttaggatgcaattggttgtaaacaaaatataagaaactagactaaatcaaatgtttcttcatatttttcttcttagtgttgaaaattataaaatcattgattccactaattaattaataaaatttagagaatgtttttttgtttttactattttgctcaagaataaatagaataaaactatcgtatatatatttaacttattttttttaaagggtatgcagtaaagggtcgtctgacggcgaaggatatgccaccaataggcattgaagattgttaacaagtagacaggaaaaccgagacgagacagatttgagatgttagcaagtccggtggttccagtttagcaggaaaatcaggcagcaacaccggagaaaatctcaggcaaagggaagcgagaggaggagaaagcttccgacaaaccatcaagagagagaaatctcaccgaaaaccgttggaagagctttagtgactgctggaaagctcgagagagttgagactgaaccgattaggagggagggacgccggagaagcttcgccggccagggaatgctattctgaaattcttcaagcgacgcctcgtaaattgtgactgggagaaaactagggcgaacgcaacttgatttctatctccattctgaaattcttcaagcggcgtctcgtaagtctatagaaaagtatctaaggttggtcttgagtatttgaatctcactggttcactcgacgagaatactttgaactaatttcaccgacttaggattcttagagaatttttagtcaacctattttattacattaattgtaaaaaaattgtattttcaaaagttagttatttattaaaattctatacaatataatatactaaaacaacagatctacaggaaaaaaaaatataacttaattttatgagtttgcgacaagaatttgttttttttcttgtagtatctgatttaacaaaaattagatatgattatagacaaatcatatctcaaatatagatacatgcatgccattcatatgcatattgcaagaaatatatgtgcatatcacattacatttatgcagatattacatgtgtgacattaaatttggatctcattaagacaatatatacaactaagaaaaacaataaacttgattcatatagaagaacaatcttttataatctagtaatctgatataataaaaatttatgaacaataacttggaagaaaataaatgagaatatatctaaacataatataaatgagaaaggatacaaaatgaagtttcagaaacactattatacaaccaccactacaattgtctctaccattttttttcttatgtctttattaccattaaatgttaagcccatgaaatcaagacaaacaattaaaaccaacacgttaaaaagaaaaaacagagagaacagaacaaagagcagagagttttaagttaaaagcaacatacattcattaatcctcaccaaaccctaatgttattagaggaaagagagatagagaaagagagagagagagagagaggtctttcgtgattttaaatcgtctgtagctgggagaaggagattctgataattgatccgcctagagaagtcgcgtgcttgcataccaatgcttccgcagcttcctcctcgttctcaaactgtaccagagcttgctttttcccgttcatctcaaacacttttgtgttcactactgcaccgtgttcttggacatggttcatcacttcctcctctgtcacgtcttgaggaagagtcgataagtgaatcatctttgtaggggagcagcaatagcggtaattctttgcagcattgcggttgaagcggttcaggttagagtttacataatcatgagagtctgtgcctggtgttatatttggatgctttgagaagtttacttctaaccgcttaccaaacagcattgctccctgcaaaagaaacaaaactttgcataaattaacaattccatttcacatctttgtaactcggaacttgtcccaagtacaatctcaaatgcacaaataaagggacatggacaaaccttgaggaaatgtactgcaagttcagcttggaaaccatcgcccatttggacaagggcatggtcaggtttgttccgaagaagcttaatccttacaatgttcccgtaaagagaaaatagattgaatagcttatcttcatcaatactctgaaacaaatgaatctggtaagtttggaaaatattgtaagaaaaactaagttatcaaaagcaaaacgggaaatgaccaacttacatctgcattcaggttagagacaaggactgtacacctatcatttgtgccggttatacccggaggcaagcctcctccaaaggcagctgcaatcgctgatgtgtttgccatctagtttttaagtaacagcacaagaatgagattaactatgcacataatcaaaactgttaacgaaaaaagaaattaagaatggacaaggaggttagattctggcgatatcttgaccgatcttgaccaaaaaagagttgctaaaactctgtattacccacctgaggatatgccactggaaaaaagaaaaatatggattagcaaaagacaaaagtgtagaagaacaatgcatagagttactatcatgtaaggcaacatacctcctgtatcaccatagcaaggctgcaagagaagaaaatcagaacattaagacggtataaaagggcacaaaagtgtatgtagttaattcgtaaaacaggtcatacatgcgatgaacggcctttttgttctgcaggcaggtttggatttgtataatccctattcaaaggcaaaacaaatcagctttatgaacaccaagataacatcaattgtataaccgcagagaaatgaaatacctagatcgatcattgttgtaatttacttgcagctcctcaaggctgaagatgaaagaacaggtcaatactgacaacactagagcacaaaagtgtagaaactaacaatgtaacaataaatgtcataaacaacatataaaagcaaacatagcatactttgagaactggatatccaactgacaacacccgtcatatatgttacgaccctgccacaaagaagatgacaaatcttatttcaattattagaaaaataaggcagacctagaaactttttttggtaaaatgttttttaaaaaagtcttaaagacaagtacctgtagagcagttctagcagaggcagcacactgttgtacctgatactgtataagagcttgaaaacctaaatagtcaacaaacaagcttatagttaacaatcatcaaactgttagatggcaaatacaaagttttaacagcaatattattttaaagagaccaataacatgaaacagacaaactttcaaataattctctaagctaaaacgaatagaagagagagagagagagagaaaagaaatgcggagaagctgaccagcagacttctggaaagtgacgagcttctcgacaaatccatagggagaaaaaacttgatgcaggacgtcaacagtaattggatacagcatgtgatggattgtgactaagagaatacggttcggctgtacatccaccatcccacagcaaccaccagttagacaaaagacggaacgaagatagaaagaaaagaaaagaattgaatatagaagtgacggttaagaaccactacgaaatgtaagtacctctataacaagacaataacacaactagcactgctacttatataatcaaacggctaataaaattacaaacctcatcttcccttccatgaatattctgctctatcgttgtcaattcttggtgagaagagaattggacatacacattcctacctctacatcaaagcaaagggttagcaaatagaaggcaaacagaaaaaaaaaagtacattgatgggtcacaaaccttatagttggctgaacattagtaaaaaactgaagagcactaactgcagaagaaacatcttgcatttggagaagagccttcacaaagtacacaagaagcctcatataagccataagtttcctcaaaagaaatagagagacagaacaagaaagtagagttttgtttaagagacctgattctttgccctgagcatcacaagcttagttataacaccaaatggttgaaaaagctgaagcaaatcattctgataaacaaagaagaaactgttaaacttaacaccaaaacataaaagggttaaacacaatcaagagaaggttttatttttaatctttacttcagaaatctcatgaccaacattacgaacatgaacgactttggaagattccgccattacaaaacctgaaacaaagacaaacccattaaactaaattgacagtaggacacatcaatcaatcaatttttcccgctcacagaatcaaaatcaacactttttcaatttctaaattcaaaagaactagattcagaagaaacaaaaaaaaagatttcccttgacactaatcaaaacacaaacatcaatcaaacaacattggaagaaatcgatgacaggaatcgaatcaagggataaaacattttatctccaaatcgctaggaaacagatactcagagacagagatgaaaacagacagagagacagagattttggcttgcctgagagaagacaaagagagaggaaagagagagagagagaatctgagagtgtagatcgaaggaaggaaggaaaggagcttgagatttgagagggtctctcgtctatgtctcgtcgtcaatgctttaaccctatctactaatttatcttatactatcgagtttttttctctctttttcgtgcctcttgtctcttttagccaaacccttttttcattttttcaactttcgttcacaataactatataggctctgattgcaacattgcataatagtataacttttagaataaaatttgttgaatgaaaacttgcagaataaaaaattataaaatacaattatttttaaagtatgttgattagatacattttccagaatgacagaataaaatatattaagttatattttttttattatacttaataaagaaaataatgtttttaatcaattttaataaagtctaagtaatatttgatgataaaatataagattattaaaatttattaaaaagttgtgaaaatgttttcttatatatattattaatgatataatttctatgttaacatttataattgttttcttttataattgctaatatttagtatgtgtagaatattaacaatttattatataaataagcaattatataactatttttttgcataataaatttttaattgtaattttaggcgaaaatgcgaattctgagtttttgcgttttctaatgcaattatgtagattttcctgattgacaaatttactaaataatcacattgtgtcattatgtcattatgcgtgtcagtactttaagaaggttttctattttttatttaatttttaattacttttatttaacgttatttgttttagatgaaaaattccgtgttagctgttgtaatgtggattggaccgcacacaagattgataggaaatcaaagctggtgctattgtatatttgttgatgggaacctcgtcacttagagaagcaaaaaccagaaggtattgtcaaggtgtagtgctaaagatgattaccaatctatggcaaaacagatgagctcatttgggtaaatgcattgatattggatctcggagtcaagacaattcagttcgttatcatgcattgtgacaaccatgttgcttccaattccgtgtggcacgaacgtaccaaacacatcaaagtggattgccatcatattgtcagaaggttaaactcgggatcatctatcatgttttatactaagagttctaattaccagagagtcatcatgtggtttgcctaggtcggtctttgctttccttgaatgtgatctcgtagttgggtccttgcgagggatttctccctccagagatcgaatatacttttcgttagtaggctttgattgaatttactatgttacgaccaagctgtgaacctcccatgataaagtcgactcgttttggttgcgacaattctatggtgtctctgcaaagtttaggtagtcgtaggaggtaatttatgactctccttttaagagttgggtcgttgtgatgactgattttgtcgatcttccccataagtttagttccatggagactaggcctattcacttctttagggctagggaggcgagtttttttgctctttctagggtttggcttcattcaaccaatgcccaagagcattcaacggaacttctgattaggtggtaggagacgtttgtcaggttaggcgtcaaaagttcatgtcagttggtagatcgtgatgtacctctatttgtttccttcatttcggataggataggtaatgcatttagtttcaagtatattgatgtttacaatgtattattagagtattttgcttaagtgttattgtagagctaatagacaattatctcttctaggggttgcctcttttttaattagaccatcgtcattcaaacttcgtccactagtcatgtcaattctctcctcgatcctaggtcttccttgaaatcgtcgaccttcactttgtctcgatctcaactagaggtgacgtcgcattgggctaatgggcctaagtgatgctgttaaagtcccattaaacattttcaactcatggatttaattatgcaaagtcccattaaagtcattaatcttatttttataactaattttttaagatagttaatgccatatgggcatttgaaaatattggttaaaataaaacattaacaaatgcttatagcgtttttttactcatctatgtgtatttacgatctacaaataaaatttatttgataaaattagaatgaaagtttgtatttttctttaataatgaattaacatgaaaaaccaatctaaatcagaaaaaaataaagaatagaaccttttgaccaaatttatgtccaaattaataaataaaaatattaaatgtatctttccttttatggaaaacttatcacatacttttgaatattgattaaataatatggaaatgtattaaaaatatatatggaaatgtatttatgtgtgtatatatataaacacatagacaatatcattaaacttaaatctcagtaagtacaagtatattagaaaaacaaaaggtacatcagttcaaacgatgttagattttatacagattgttggtaatttatacgaagcacacaacaatttgttcatgaaaaagaaacaaatccaccaatgactcaaatatttctttcgatgataaagaaactagtttttgttattaaattttcttcttactacatgatttttctattatatccaaacttcttctaatatcgactctaaatattattctttgataggtatcgaaacttaaccaatggcaaccaaaaattctccaccttttatattactttcattgatgatgtttgctctgatctctctacccataatttcaggtaacataatcatctaattattggtaattcgtatatattaaacaccaaatttttctgaatcttttcaaacatttcatgatttttactactacattctcaaccggacttttatccattatgccatcttctccaaaaaaaaattctattttaccacccctatttttggaatttcgttttcatttatttttaaatcgaaatttgagtacaattactaaataaccttatgttttcagattatttacggcatccaaccgcagatccacgggctgaaccggatccaacccattctaaatgggttttccccaaaattgaaatttttaacctaagtaaaatttcaatttctcactgtcgtcgactctgctccaaacgcgttccgtctctggcgattccaaaaccccaaaatcatcaaaacctaacatcgtctttttcttttctccggcgactgcacacaacccctttctttctcatttccgagtaattcaccgccgtttcctaaccgaacgtcgcgactccacacaaccgttttagttccgccgtcaaaaccgaacgtcgcgactccacacatctattacagttccgttgcagttccgtcgtcgttccaaaccgccgacgttccaaattgtaagtgtagaatagggcatttagtatagaaattggaacggtttttgatttgaaacattagaattggtttttgttgtgttgatttgaacggtttccttgattgttgagtggttttgcaaggtaatcatgggtcgtgtaaggttagtcactcctagttcgagtgaaagtgaagacaagagggtcacgatcatccgtgaagcggatatgaaccgtgaagaagttgcagccgaggaaaacaaatttgaagacgaaaactgtgaacaagagcctccggaaaaccttaacgaaccggaagaagaaaagatttctgaggtatatacaaatttatgaaaattttgtgtgaatattgatgtagtgtttagggacaactagaaaacaatgagtacaagttaacaatggttatttatgtaaattgtgtttgaatattgaaagtagtgtatagggacaactagaaaacaatgagtacaacttaatagtattggtttgtttgattggtgcatgcatggatttatacgtgatcaatcatacattgatttgtattagaaaattggattttgagaaaagtttataatgttggtctgagataacgaaaaatattcattttatggttgtgtatgaatttttaggaaattgatgatgatgaaccaatgcagtctcaggggatggaagaaaaccctgaagaagaggaaaaagaaggggaagaagaagaagaatctgaggtaaatggttatttatgtaaattgtgtttgaatattgaaaatagtgtatagggacaactagaaaacaatgagtacaacttaatagtattggtttgtttgattggtgcatgcatggatttatacgtgatcaatcatacattgatttgcattagaaaattggattctgagaaaagtttataatgttggtctgagataacgagaaatattaattttatggttgtgtatgaattttcaggaaattgatgatgatgaaccaatgccatctcacgggatggaagaaaaccctcaagaagaggaaaaagaaagggaataagaaaaccctgaggtaacattaatttctgaaaattttgtttgaatatccattgaaagtagtgtatagggacaactagaaaacacttaggacaacttaatagtatagtttcaacttatgtgattggtgcatggatttatacgttaacgtgatcatacattggtttgtttgattggtgcatgaatttaattgtatgattggtgcatgaatttaatacgcatagtttcaattctgagaaaagttgataatgttgttatgagataactagtacaagtagtacaacaaaatattaattgtatgtttgtgtatgaaatttcaggaacttgatgatgaggaacaaccaatgcagccagagaggatgttctttagtacaagcgaatacgtgaagacgtgtaagatagggacgagatgcactgtgcaacagacagtgaagtatttggaggagtttaaagaagatttgccatggttcaaggcgcatccacagtttaggcatgtattccacatgcctgaggagaaaaaccacatgacccaaggcttgttgatgcttttgcttcgcacagcacagacatagatggatagggagtgctggtttgtggttaatggagtgcctattaggtactccattaaagagcatgcgttgttatgtggtttcgattatcatgattactcggaggagttgcagccgagtatgaagatcgtggatgcagatttgaagtttgccaaaaagatctttaagaaggtatctgagattaagatcgttgatgttgagaaaaagttggatgaaatgaagaaatgtggagaaaagaagaagacggataggaagaagttggctatcttgcttttttgtgcaaggtgatcgcggccaagtcaaaggttgatggaaacattgacaaattctttctgaagattgttgatgatgtgcgtgcatgtgagacattcccatggggtcgtttcacatttgatggatgtatggaaggtatcaagtcggtaatgaaatcgatgaaagggaaagcaaaattgcagacttgtttctccggatttattcttccattagaggtaacaatttagagtaatatccattataagatgcattagtagacttaaaaataatactaatgtgacttttactttgaatgtgtagattttgccttttgaggctattccacatttgggacaaaagtttagagaccatgtaaggttcgagaatgagtgtccgagaatgtgtaaggccaaattctctagtagtgtcatgaaagggttctcgttggaagagataaacgaggagcttggaagtgtaaaggtacgagttgtcccagttatctctagagttgtcccagttatctatgagctagaatatgattatttttgatgtgtgaatttgtataggttatctctagcattttggaaccggattacgaggagaaagatttgttgaggcggattgtagatggtgatcatgttgatgatgggatagggtttgttgatccggttgtcgatagctggagaaaccgtttgatcaaagagaggaagagaatcttctggaaggatatgtttgaagcggatgtccgggcccgaagcggcgacgagcaaatggaggaagagaatgttctgagacatgttccggatgttccgggcagcagtagctcttgctctttgaaggaagatattgatgaaggctttaagagagtgatggcgatgttggcggaacacaatgaaaggcttgtaaccattgaaaggagacaagccggtgagagtgtgcctccatttgagaagaaggtccattccgatgtgaataaggagaaggaagatggtggtaagaatgagaagaacgtgaatgtggctattgagactgaggctagtgttgagcccgaggctaatgagacccatgatgttgagcctgaggctgttgagaccgatggtgttgagaccgatggtgttgagatcggtggtgttgagacccatgatgttgagaccgatggtgttgagcctgagggttttgtgcccgagtttgttgagcccgatgatccgagttctgccatggttctttatgttccggatgttccaatcggtatggtttgttttgtcaatctttgatctttttaatatatgatgtttgttggttataaatggttgtcttttcttttgaaggtgatgttcaagttgaaagggaaactgaagcggataaaggcgatgatgagacgccgaagaaggaaacgaagaagaaagggaggaagggaaagggaaagtgcaacgataagaagaatgagaagaagaaaagagacgaggatcctgaggacgaggatgaaggtggcaaaaagaaacgtaagataaatccatcgagattccacacgccaccttataccgcggagagaatgagagggaccaagggtccgatttacgtttggagaaaaatgtattgaagacttgtgtttttgtgggaacgatttacttatgtatttcggatgtattgaagacttgtgtttttgttatttaggatgattgatcatgttgttttgggatttatgttacttatgtatttacgatggttgatcttgtttttatggtatttatggtatttaggatgatgttcaaaacaaaaggtacacgtagtttatagtgaggtacaactcaattccaaaagaggtacaactaacaaatcaaaacaagtacaaatgagttcaaaacaagtacaagtgagttcaaaaaagaggtacaagtagtttatagagaggtacaactcaattccgaaagaggtacaagtagtttatagagaggtacaactcaattccgaaagaggtacaaattacttcaaaacaagttaaaaaggtacaaatgactctagaaataggaattcaacatagtttcaaactttaacatacttgttgcaacataaaaaggaaatacaatcacaaagtcaattaaatcattttacttctttccaagtgcatccataagccttgtgatctctgcatctttcttgtccaagcggtctttgaggtcctcaatttcagcacggatttggttaatctggagacgattactatcacctccaaatttgaatgcgttttgaatcaattccctgtgctcgccaaatcgtttgtcgatgcaaaagcactgctcgtgaactacaagatcccaacccttgtctacgtgataattatcatcttgaccactcatcggacatttgagaaatgtcttcttttgatcgccaataagacgctctacaagctcaagctgtttaccacaaaaacagatttggggaacaccaaaatcaccatcgtacttggaaggatcatcggatcgttcctctgataaagaaggtgacgaataactaagtggcattatttgctacatagccaaacacatgaaaatcaaaaggggataaattccaaaatataaatcctaacatccaaaccctagatctttaagaaaatccaaaatccaacccctagatatcaaattatcataaacggcaactctaattcctttgcaaaccataattcaatagaattgggggaaaatcaaaaccctaatttattttctatccaacccgaaacttaccaattaacttggacaaggcggctgatgcgaaagattcagcgtcggcggaggttcgtcgtgttgttcgtcggcggaggttcgttgtgttgttcgtcggcggaggttcgtcgtcagagaagagagaaggagagaagaaaacttttcgagagaagaaaggagaagaaggaaataaagaaagagagagaaaaatttgtaatttaatgagatgagaaagattttttgaattgaaattgaaatacatagtgtgaacacatagtgtgaacgcataatgtgaacacacaatagttattatgataataaaagtgaaatgcgggcccagacaaaatactgcgcattaaccatagttgtgccataagttattcagttgtcccgtactcaatttatttgtactttgtggaagttttagtatttagagttggacttcattaagggaattaacttttagttggacagatgatataatatgtttaataataagatatcatgttttagttatataattttccaaatatatgcgttttgtcatgtttatgtcaagatggtccaacatgatacaatgcataccatataatgtaagaagtgttttctgaattgatgagtataatatgttcaattgttttttagattgtatgataattagtataagtgattaataaatgttcaagaacaatgtataattatgagaaaaattaaaaaattacctcctttttaataatatcatattttagtagataaaataaataaactgtatttgtctcataaatagtaaaaatatattaaaaatacagcttcttaaaaattttcatttaatatattagaaataattatagttttaattaaaagtagagagaggtgtatttttcatacaaaaaccataaactagatagtttttcataaaaaaacccatatttttgatataataaaaatatttaaattaaattaaattgaagcaaatttaagtaaaaaaaacaataataaaattatatttctttcttatatatataggagggattttattgtaagagataaacatgaaagaactagtacatacggtacaagtacaaggtacatacataataacacttaacaaaatttcaaagtacttaaaaatgaagcaataattcagacgacacaagtacacggtacagacataacaacacaatacttaagaaaattccaaagtactgaaaaatgaagacataatacatgaagtaatagtacagacaacacaagtacacggtacagacataacaacacaacagaaaataaaaatttaattatgagtcggactcctcgggctgcaaccacgcgttgatattaatcccaggctgaaacttgttgttagtcctctttcgacgacgttcccctgttgatggaaaccggatttcttgatttctccccggtttagttgtggtatccggcggtaagactattaattgtcttatctcatcaggaataatccaaactgatgaatgcgggactggataaatggttatgtgatatgccaatatccacgtattcatatggtaataatgcgaagttaggtcttccatttcgagaccatctaatatccattcggtccccacaaagttttgggcagcggcaatcgcatgtacacacgggtacttgtcaacatcaaaacgtcggcaagaacaagttttccttagcaagtcaacagaataagacataccaccttcgccaatgacgctgtattgacgttcgaagctgttaagctcggtcaccggcatcgttttcgcaattgggcataaggagtgtatttcgttctccacaaccggcacaagaccccttgtttcagaatatttaacagactccttcctatgtttgttaaaccattctgaaattttctcaattatcgcatcaagcaaaggtaaaaggaagtatttccttgcacgctcaaacgtactgttcaatgattcacacgcattgctcgtgtctatgttatacctatccccttcaaaatagcacctagcccaattttccacaggagcccatcgatccaaatacataccgacattaggaaatcttctcctaaatcgagcatactctctcgtgaactcaaactgagtataaacatgtgcgcatgcaatgaagttagccgccgcttcttccttctcagttttcactcgtactttaacattttgagacaaatgccaaacacaatagccatgtctcgcgtttggaaacacttgcataattgatttgatgatgcctgatgtctatcactcacaaaaaccaaatctggttcatctggtataactgttttcagcttgttaaagaaccacgactaactagcatcgttttccctatcaattacagcagacgcaatgatataattgtgatgattaggatcttgggctgttgcaaaaactagcataccgccgtatacggtcttaagaaaagtggcatccacaataacaactttcctcataactttgaacccttcaatgcaagcacccaaagcaacgaataagtacttgaacttttgttgtgcatccacttccacatatgatattgtcccgggattcacctcctttaatacgtgcagataagagtacaagtcggtgtagctttttcaggactaccacgcacatcactaacgtgttgtcttttccctctccatgcggtagcatacgagcaatgcaaacccattcttccccgaacaatactcattatgcttttaggtggtggagtttgaaactcacctggataatcctcatgcaaaatagacgcgattaatcgtggtgtgccggtatgtttacaattgcctgagttcttattagaccgcttgcatgtgtgcatcttcctgtgaactctaacactaaaacaatctgaactctttacttttgcacatcgtaaataccatcgacaacctgttgttttagattgccgacatcgtaacatgagtcgctgtggatctgacgctatagttgcggtcgcaaaacaatacttatttgcagctctgttaaccaaatcttgcacgacctctttagaaacaaattcttggtgcaattcaatccccgttccatcttcccattccgtaacactctgacttttctcactactctgactgccttcaccaacacatggaagctcataatactcaattctaccatcaacaccattatcttcagcaacatccatccggctatccacatgctccctatcttcaataactacattctccatagcctcttcaaaaacccggctatccgcattctcaatagcctcttctacactattagcctcttcaataatcggttcatcattcacacaattacctcctgcagcttctcctctaaaaaccgtcactacttcaccattctccacatcaaatgcattcaactcctcataattaacaccaactgaacttcttctctctacccttgaaatttgttccaccctctcagattctttatttactacctccacgttcaaagctggtctaattcccttagcattcactaccgttagataacctaaaaagtcatcatcatctacaatagatgtctctctctgagatgtgcatagaatataactaaatttcaccttccttgaggtttcatctattccaatcttcttgcatatcttttctactaacatagagtatgttacctttgacgtcctcaacaatacaccgcttaaagaattgtttgaaatccactcatgctcttctgaataatacccattgtcaaattgtatgaatgtgtgcttgttcttcatcgtctcctgtaattacaaataaattataaaaacacaattatgtaatcattcagatttagacataattgtacctatattataactcactaataccatttgtaccacctgtcctattgtatctcaataaaacacttgtaccgcttatactattatatctcagttttaccatttgtcccagttcgtcaattctgggtttcacaaatcgtaaatttcgattgaacactcactaaactctctgattcaaaacgatacaacagcccagaatgaacaatacaacaattttatgttattaacaactaactccaacaagaaattcacattaatctacaaatcaaaacgagatcggatttacttttgtcgttgaagaggaagctcactttaggagcagattatcggcttggaagctacggcgatctcggaagctaactcgccggtgaaattagagctcaaatcgccgacgaaatcggagctcaagtcgccggtggcgaagtcggagaaaatcacgtcggaagtcggagaaaatcgcgattttggtaacgaccgtttttcttttttttttactaaatgatttactctttattttgaaattctccctcagttattcattaaggagagagatgtaattgcacatgctcgagtggtactcagaataaaagatggtacgccagaatagtttttccaaaatggtggcagaatagaacgtggctctcctcaacccaacctaacccaacctaaccaatccaaactaaccatagtttacaaccattacttcttctctctcttcattcatttttttttctctaatctttacaaaattaaacacaatacacttgaaatattttcttgaaagaaatcgatctatctcttcactttttctctctctttactttttctctactctttactttttctcccttttctctctcttcttagatcttaaaaattggagattttccaatttcgattcagtttctcattctttaatcaatctcataaggttaaaaatttcatttttgctagatttcttcttctcttatggtatccatcattgtcttagtcaaattttgtctctttacaaatcttagattcgcccaccaagtgtttgttgaaattcctcaaagagagagagttgaattaaagaacgcaaacacatattcttactataaatttgtaattcaaaggtagttttatgctattttgattaaaacacataagcaaataataaatggaagaaatacaaaaaaatcataagcatagtgatagggggctagggtttcaaggaaaggatgatctatatacaaattactattttgcctttcttatttgtatgcaaaccacgtggtcagagtttggtggatgtgcattgatggtcgataattcgaaatgattgaaatgaccacacacaaaatggattcaaatatcaatcactccaagtctccaaatattacatgatatcattggcacacacacaaaaagaactaaactaagctaaccaagatacaacgatgcatggatggtcgataattcgaaatgattgaaatgaccacatggtcagagttggtggatgtgtatggttttctgcagttttcatctcttaaaacaatgagcaaatgattaaaaaatgggaaaaaatacaaaaaaatcatatcaaaaaaatgcagagtgataggcggctaggttttcacgaaaaagatgatctatatgcaaattactattttgtccttctcacatgtatgcaaattactattatgcaaactatgtggtcagagtttggtggatgtgcatagatggtcgataattcaaatgattaaaatgaccacatggttagagtttagtggatgtgtgtggacggtcgaaaatttaaaatgatttcgttttaataatattattcataaaacaagcgttacgttatgtaaaagatgttgataaaatttagtatctaatgtttagggtttaggatttagtcttaaggaagtatgattgtttacaatgattatagagtttatggtagatggtgtagggtctaaggttaatggaccatggtcatctacaattatttttgggtttatggtcacatgctttttgttagagattatatatttcattgttgaccatatgaattaatgaatcatatgaattttctattttctcaattggtttatgtttaggggatttatgcttaatatttacgggcaacaataagaaagtttaaagtttagggcttgggatttagggtttatggtatatgggatagggtatatgtatatggttaaaggtttagtgtctatggattaaagtttagggtttagggttaatggaccatggtcatctataattatttttgggtttatgatcgcatgcttcttgttagagattatatattttattgttgaccatatgaattaatgaatcatatgaattttctattttctcaattggcttatgttcaggggatttatgctcaatatttatgggcaacaataagaaggtttaaagtttagggtttatggtatatgatatagggtatatgtatatggttaaaggcttagtgtctatgggttaaagtttagggtttagagtttaggatttagggtatatgtatatggttaaaggcttagtgtctatgggttaatgtttagggtttaggggtttagggtttagggaattagtgtttagggtttagggtttagggtttagggttaagggatttatgcttaacatttataggcaaaaataagaaggtttaaagtttagggtttggggtttagggtttagattttagggttaacatttatgggcaacaataataatggtgatggttttgatgaatcaaagaaaacatggtggttgaataggtcggaggaagaagatgatagcagagtgacaggcggctagggtttcaaggaaaggatgatatgtatacaaattagtattttgtccttctcatttgtatgcaaaccacgtggtcagagtttggtggatgtgtattaattgtcgataattcgaaatgattgaaatgaccacatggtcatagtttggtggatgtgtgttgatggtcgataattcaaaatgattgtgttttgataatactatccataaaacaagtgttacgtaatgtaaaagatgttgataaaatatgatgaaacaagttctataattatttttgggtttatggtcatatgcttctttttagagattatatatttcattgttaaccatatgaattaatgaatcatatgaattttctattttctcaattggtttatgtttaggggattttatgcttaatatttatgagcaacaataagagggtttaaaatttagggcttttggcatttaggatttgtggtatatggtataaggtataagtatatggttaagggcttagtgtctatggattaaagtttagggtttaaggtttagggtttagggtttaggatttaggctttagggtttagggtttagggtttaggatttaggctttagggtttagggtttagggataagagatttatgcttaatatttatgggcaacattaagaaggtttaaagtttagaatttgatttagggtttatggtatatggtatagggtatatgtatatagttaagttagtgtctatggattaaagtttagggtttacggtttaaatttaggagttaaggtttaatgtttagagttaagtatctactgtttagtgtttagaatttagtgttaaggaactatgattgtttataatgattttagagtttatgattacatggttctcactaaagattatatatttcattgttgtccatatgaattagattatatgaattttttattttctgaatttgtttatgttttgatgatacaataaataataatacaaataaacatagtaatatggatttcaaaatgaaggaaaaaatgttattattatatattttacaaaaaaaatggttaaagatattttataaaataaagaatgtgacaaagtaaagaaaaataaaattataaaaagggagagagaaaagaaagtaatcattagatctattctctctcctacatatttaatggctgagaataaacaagttaaccatagttgggttaactgctcacatgatagaaaggtaaattggtattgattattattaaatagtgaaaaaactcaaaaaagtgcctactccctccaaagtgccctaaatacacttaaaaacttggaaagtgcccctaacttataagcatgttaaaaaaaacataaccgcctccaagagttcaatagttttttctttgccctcatcgttcgcaatcatggctttttaaacccaataagaaatatttaatacctgctaacccatatcagccctctcatttaacattcaactagagttatatggttaagagcatcttaatcaatgtctcttgtccatgattgcaaccaaggtgtgtcaagtggggaccacatggaagaatattgtgtcattgtgtgtttatgaaaaggctattcatcattaccattctacataggtattccaaatgataaacgttaagcaatgggttattcgtgaacataccaaattgtttattgttttgcattatgttgatcaaaaaattatgttcgggattggaggtggatagattcaagtttcttatccatgtgtgatcagctctataaaggcgccaatcacttgacgttgttgtagttgaacatgaactaggactcccccttggttcacacattcttgccaatactttcagccacgtgttggtcatgaggttctcgtcttccgagttccgtccattaccttattgaattctcttgtacttctcttcctcttctagctttgcatcttctttttcaatcttctgaaccttggagtaaacacaaatgtttcttccttgcaaaactaaggttcatgttccttgagaatcaaaagtgataaagatatgatcacacaagatactaacttctaataaaaataaaaatgttgtcttaaaaaggtttcgttttcatagagtcgtcttgtgaaggctctatggacgctgatgtttctctctatctcgttgttttgaaaactttgtttaaaaataagtatatataggccttggggagttggtttaggtttaggtctttttattttcataacacgctattttggaccaagaagtttcatggacttctagtcacgacaacgaggcttggaggcatagaaaataggggttgtttctgagacggattgctgcaagccacgattaatgacaatttggcctcggcttgcttctcttcatatgaagctgaacatggcttcgtcattaactttgattggttcatgactttaaggactatgatagtattctaaagtccccacagttttttttttcaccaatcagaattttttggttttaactttttaaaaggttatcacattcatttttttattttttcctctttatttttcgttcttttttgaagtctcaaatagacggctgttaaaaaaaatctgtataaaacttcttttttcttcaccccataataattaaaaagtctctacaagttcataatttgttttacaattgtttttgataaattaattattattttttctatttcttttaagatctattttacaaataatagttttattttcatcattccattactaatggtgtaagagagtttataaaattagtattcttcaaattcatatacagaaataataaacataacagaggttaattgttattacatacatcaatagtagatctctacatcacaagtataaatcaattcttatttatatcattaaattatttcattaactcattcatctgttaggtatttttgttcgtactgaaaaatattttaatgtatttttgactgctcaaaaagactatttttcttagtcataatagttcgatcaaaaatcaaactaaaaagaaagatttgttgatgtgtgaatttgtataggttatctctagagttgtcccagttatctatgagctagaatatgattatttttgatgtgtgaatttgtataggttatctctagcgttttgaaactggattacgaggagaaagatttgttgaggcggattgtagatggtgatcatgttgatgatgggatagggtttgttgatccggttgtcgatagctggagaaaccgtttgatcaaagagaggaagagaatcttctggaaggatatgtttgaagcggatgtccgggcccgaagcggcgacgagcaaatggaggaagagaatgttctgagacatgttccggatgttccaggcagcagtagctcttgctctttgaaggaagctattgatgaaggctttaagagagtgatggcgatgttggcggaacacaatgaaaggcttgtaaccattgaaaggagacaagccggtgagagtgtgcctccatttgagaagaaggtccattccgatgtgaataaggagaaggaagatggtggtaagaatgagaagaacgtgaatgtggctattgagactgaggctagtgttgagcccgaggctaatgagacccatgatgttgagcctgaggctgttgagaccgatggtgttgagaccgatggtgttgagatcggtggtgttgagacccatgatgttgagaccgatggtgttgagcctgagggttttgtgcccgagtttgttgagcccgatgatccgagttctgccatggttctttatgttccggatgttccaatcggtatggtttgttttgtcaatctttgatctttttaatatatgatgtttgttggttataaatggttgtcttttcttttgaaggtgatgttcaagttgaaagggaaactgaagcggataaaggcgatgatgagacgccgaagaaggaaacgaagaagaaagggaggaagggaaagggaaagtgcaacgataagaagaatgagaagaagaaaagagacgaggatcctgaggacgaggatgaaggtggcaaaaagaagcgtaagataaatccatcgagattccacaagccaccttataccgcggagagaatgagagggaccaagggtccggtttacgtttggagaaaaatgtattgaagacttgtgtttttgtgggaacgatttacttatgtatttcggatgtattgaagacttgtgtttttgttatttaggatgattgatcatgttgttttgggatttatgttacttatgtatttacgatggttgatcttgtttttatggtatttatggtatttaggatgatgttcaaaacaaaaggtacacgtagtttatagtgaggtacaactcaattccaaaagaggtacaactaacaaatcaaaacaagtacaaatgagttcaaaacaagtacaagtgagttcaaaacagaggtacaagtagtttatagagaggtacaactcaattccgaaagaggtacaagtagtttatagagaggtacaactcaattccgaaagaggtacaagtagtttatagagaggtacaactcaattccgaaagaggtacaaattacttcaaaacaagttaaaaaggtacaaatgactctagaaataggaattcaacatagtttcaaactttaacatacttgttgcaacataaaaaggaaatacaatcacaaagtcaattaaatcattttacttctttccaagtgcatccataagccttgtgatctctgcatctttcttgtccaagcggtctttgaggtcctcaatttcagcacggatttggttaatctggagacgattactatcacctccaaatttgaatgcgttttgaatcaattccctgtgctcgccaaatcgtttgtcgatgcaaaagcactgctcgtgaactgcaagatcccaacccttgtctacgtgataattatcatcttgaccactcatcagacatttgagaaatgtcttcttttaatcgccaataagacgctctacaaggtcaagctgtttaccacaaaaacagatttggggaacaccaaaatcaccatcgtacttggaaggatcatcggatcgttcctctgatgaagaaggtgacaaataactaagtggcattatttgctacatagccaaacacatgaaaatcaaaaggggataaattccaaaatataaatcctaacatccaaaccctagatctttaagaaaattcaaaatccaacccctagatatcaaattatcataaacggcaactctaattcctttgcaaaccataattcaatagaattgggagaaaatcaaaaccctaatttattttctatccaacccgaaacttaccaattaacttggacaaggcggctgatgcgaaagattcggcgtcggcggaggttcgttgtgttgtttgtcggcggaggttcgtcgtcaaagaagagagaaggagagaagaaaacttttcgagagaagaaaggagaagaaggaaataaagaaagagagagaaaaatttgtaatttaatgagatgagaaagattttttgaattgaaattgaaatacatagtgtgaacacatagtgtgaacgcatagtgtgaacacacaatagttattatgataataaaagtgaaatgcgggcccagacaaaatactgcgcattagccatagttgtgccataagttattcagttgtcccgtactcaatttatttgtactttgtggaagttttagtatttagagttggacttcattaagggaattaacttttagttggacagatgatataatatgtttaataataagatatcatgttttagttatataattttccaaatatatgcgttttgtcatgtttatgtcaagatggtccaacatgatacaatgcataccatataatgtaagaagtgttttttgaattgatgagtataatatgttcaattgtgttttagattgtatgataattagtataagtgattaataaatgttcaagaacaatgtataattatgagaaaaattaaaaaattacctcctttttaataatattatatttttgtagataaaataaataaactgtatttgtctcataaatagtaaaattatattaaaaatacagcttcttaaaaatttttatttaatatattagaaataattatagttttaattaaaagtaaagagaggtgtatatttcatacaaaaaccataaactagatagttttttataaaaaacccatatttttgatataataaaaatatttaaattaaattaaattaaagcaaatttaagtaaaaaaaaacaataaaaattatatttctttcttatatatataggaaggattttattgtaagagataaacatgaaagaactagtacatacggtacaagtacatacggtacaagtacaaggtacatacataataacacttaacaaaattccaaggtacttcaaaatgaagcaataattcagacgacacaagtacacggtacagacataacagcacaatacttaagaaaattgcaaagtacttaaaaatgaagacataatacatgaagcaataatacagacaacacaagtacacggtacagacataacaacacaacacaaaatacacatttaattatgagtcggacttttcgggctgcaaccacgcgttgatattaatcccaggctgaaacttgttgttagtcctctttcgacgacgttcccctgttgatggaaaccgggtatcttgatttctccccggtttagttatggtatccggcggtaagattattaattgtcttatctcatcaggaataatccaaactgatgaatgccaatatccacgtattcatatggtaataatgcgaagttaggtcttccatttcgagaccatctaatatccattcggtccccacaaagttttgggcagcggcaatcgcatgtacacacgggtacttgtcaacatcaaaacgtcggcaagaacaagttttccttagcaagtcaacagaataagacataccaccttcgccaatgacgctgtattgacgttcgaagctgttaagctcggtcaccggcatcgttttcgcaattgggcataaggagtgtatttcgttctccacaaccggcacaagaccccttgtttcagaatatttaacagactccttcctatgtttgttaaaccattctgaaattttctcaattatcgcatcaagcaaaggtaaaaggaagtatttccgtccacgctcaaacgtactgttcaataattcacacgcattgctcgtgtctatgttataccgatccccttcaaaatagcacctagcccaattttcacaggagcccatcgatccaaatacgtaccgacattaggaaatcttctcctaaatcgagcatactctctcgtgaactcaaactgagtataaaaatgtgcgcatgcaatgaagttagccgccgcttcttccttctcagttttcactcgtactttaacgttttgagacaaatgccaaacacaatggccatgtctcgcgtttggaaacacttgcataaattatttgatgatgctctgatgtctatcactcacaaaaaccaaacctggttcatctggtataactgttttcagcttgttaaagaaccacgaccaactagcatcgttttccctatcaattacagcagacgcaatgatataattgtgatgattaggatcttgggctgttgcaaaaactagcataccgccgtatacggtcttaagaaaagtggcatccacaataacaactttcctcataactttgaacccttcaatgcaagcacccaaagcaacgaataagtacttgaacttttgttgtgcatccacttccacatatgatattgtcccgggattcacctcctttaatacgtgcagataagagtacaagtcggtgtagcttttttcaggactaccacgcacatcactaacgtgttgtcttttccctctccatgcggtagcatacgagcaatgcaaacccattcttccccgaacaatactcattatgcttttaggtggtggagtttgaaactcacctggataatcgtcatgcaaaatagacgcgattaatcgtagtgtgccggtatgtttacaaatgcctgagttcttattagaccgcttgcatgtgtgcatcttcctgtgaactctaacactaaaacaatctgaactctttacttttgcacatcgtaaataccatcgacaacctgttgttttagattgccgacatcgtaacatgagtcgctgtggatctgacgctatagttgcggtcgcaaaacaatacttatttgcagctctgttaaccaaatcttgcacgacctctttagaaacaaattcttggtgcaattcaatcctcgttccatattcccattccgtaacactctgacttttctcactactctgacttccttcaccaacacatggaagctcataatactcaattctaccatcaacaccattatcttcagcaacatacatccggctatccacatgctccctatcttcaataactacattctccatagcctcttcaaaaacccggctatccgcattctcaatagcctcttctacactattagcctcttcaataatcggttcatcattcacacaattacctcctgcagcttctcctctaaaaatcgtcactactccaccattctccacatcaaatgcattcaactcctcataattaacaccaactgaacttcttctctctacccttgaaatttgttccaccctctcagattctttatttactacctccacgttcaaagctggtctaattcccttagcattcactaccgttagataacctaaaaagtcatcatcatctacaatagatgtctctctctgagatgtgcatagaatataactaaatttcaccttccttgaggtttcatctattccaatcttcttgcatatcttttctactaacatagagtatgttacctttgacgtcctcaacaatacaccgcttaaagaattgtttgaaatccactcatgctcttctgaataatacccattgtcaaattgtatgaatgtgtgcttgttcttcatcgtctcctgtaattacaaataaattataaaaacacaattacgtaatcattcagatttagacataattgtacctatattataactcactaataccatttgtaccacctgtcctattgtatctcaataaaacacttgtaccgcttatactattatatctcagttttactatttgtcccagttcgtcaattctgggtttcacaaatcgtaaatttcgattgaacactcactaaactctctgattcaaaacgatacaacagcccagaatgaacaatacaacaattttatgttattaacaactaactccaacaagaaattcacattaatctacaaatcaaaacgagatcggatttacttttgtcgttgaagaggaagctcactttaggagcagattatcggcttggaagctacggcgatctcggaagctaactcgccggtgaaattagagctcaaatcgccgacgaaatcggagctcaagtcgccggtggcgaagtcggagaaaatcacgtcggaagtcggagaaaatcgcgattttggtaacgaccgtttttcttttttttttactaaatgatttactctttattttgaaattctccctcagttattcattaaggagagagatgtaattgcacatgctcgagtggtactcagaataaaagatggtacgccagaatagtttttccaaaatggtggcagaatagaacgtggctctcctcaacccaacctaacccaacctaaccaatccaaactaaccatagtttacaaccattacttctcctctctcttcattcatttttttttctctagtctttacaaaattaaacacaatacacttgaaatattttcttgaaagaaatcgatctatctcttcactttttctctctctttactttttctctactctttactttttctcccttttctctctcttcttagatcttaaaaattggagattttccaatttcgattcagtttctcattctttaatcaatctcataaggttaaaaatttcatttttgctagatttcttcttctcttatggtatccatcattgtcttagtcaaattttgtctctttacaaatcttagattcgcccaccaagtgtttgttgaaattcttcaaagagagagagttgaattaaagaacccaaacacatattcttactataaatttgtaattcaaaggtagttttatgctattttgattaaaacacataagcaaataataaatggaagaaatacaaaaaaatcataagcatagtgatagggggctagggtttcaagaaaaggatgatctatatacaaattactattttgcctttcttatttgtatgcaaaccacgtggtcagagtttggtggatgtgcattgatggtcgataattcgaaatgattgaaatgaccacacacaaaatggattcaaatatcaatcactccaagtctccaaatattacatgatatcattggcacacacacaaaaagaactaaactaagctaaccaagatacaacgatgcatggatggtcgataattcgaaatgattgaaataagaaagtttaaagtttagggtttatggtatatgatatagggtatatgtatatggttaaaggcttagtgtctatgggttaaagtttagggtttagagtttaggatttagggtatatgtatatggttaaaggcttagtgtctatgggttaatgtttagggtttaggggtttagggtttagggaattagtgtttagggtttagggtttagggtttagggttaagagatttatgcttaacatttataggcaaaaataagaaggtttaaagtttagggtttggggtttagggtttagattttagggttaacatttatgggcaacaataataatggtgatggttttgatgaatcaaagaaaacatggtggttgaataggtcggaggaagaagatgatagcagagtgacaggcggctagggtttcaaggaaaggatgatatgtatacaaattagtattttgtccttctcatttgtatgcaaaccacgtggtcagagtttggtggatgtgtattaattgtcgataattcgaaatgattgaaatgaccacatggtcatagtttggtggatgtgtgttgatggtcgataattcaaaatgattgtgttttgataatactatccataaaacaagtgttacgtaatgtaaaagatgttgataaaatatgatgaaacaagttctataattatttttgggtttatggtcatatgcttctttttagagattatatatttcattgttaaccatatgaattaatgaatcatatgaattttctattttctcaattggtttatgtttaggggattttatgcttaatatttatgagcaacaataagagggtttaaaatttagggcttttggcatttaggatttgtggtatatggtataaggtataagtatatggttaagggcttagtgtctatggattaaagtttagggtttaaggtttagggtttagggtttaggatttaggctttagggtttagggtttagggtttaggatttaggctttagggtttagggtttagggataagagatttatgcttaatatttatgggcaacattaagaaggtttaaagtttagaatttgatttagggtttatggtatatggtatagggtatatgtatatagttaagttagtgtctatggattaaagtttagggtttacggtttaaatttaggagttaaggtttaatgtttagagttaagtatctactgtttagtgtttagaatttagtgttaaggaactatgattgtttataatgattttagagtttatgattacatggttctcactaaagattatatatttcattgttgtccatatgaattagattatatgaattttttattttctgaatttgtttatgttttgatgatacaataaataataatacaaataaacatagtaatatggatttcaaaatgaaggaaaaaatgttattattatatattttacaaaaaaaatggttaaagatattttataaaataaagaatgtgacaaagtaaagaaaaataaaattataaaaagggagagagaaaagaaagtaatcattagatctattctctctcctacatatttaatggctgagaataaacaagttaaccatagttgggttaactgctcacatgatagaaaggtaaattggtattgattattattaaatagtgaaaaaactcaaaaaagtgcctactccctccaaagtgccctaaatacacttaaaaacttggaaagtgcccctaacttataagcatgttaaaaaaaacataaccgcctccaagagttcaatagttttttctttgccctcatcgttcgcaatcatggctttttaaacccaataagaaatatttaatacctgctaacccatatcagccctctcatttaacattcaactagagttatatggttaagagcatcttaatcaatgtctcttgtccatgattgcaaccaaggtgtgtcaagtggggaccacatggaagaatattgtgtcattgtgtgtttataaaaggctattcatcattaccattctacataggtattccaaatgataaacgttaagcaatgggttattcgtgaacaccaaattgtttattgttttgcattatgttgatcaaaaaattatgttcgggattggaggtggatagattccagtttcttatccatgtgtgatcagctctatagaggcgccaatcacttgacgttgttgtagttgaacatgaactaggactcccccttggttcacacattcttgccaatactttcagccacgtgttggtcatgaggttctcgtcttccgagttccgtccattaccttattgaattctcttgtactcctcttcctcttctagctttgcatcttctttttcaatcttctgaaccttggagtaaacacaaatgtttcttccttgcaaaactaaggttcatgttccttgagaatcaaaagtgataaagatatgatcacacaagatactaacttctaataaaaataaaaatgttgtcttaaaaaggtttcgttttcatagagtcgtcttgtgaaggctctatggacgctgatgtttctctctatctcgttgttttgaaaactttgtttaaaaataagtatatataggccttggggagttggtttaggtttaggtctttttattttcataacacgctattttggaccaagaagtttcatggacttctagtcacgacaacgacgcttggaggcatagaaaataggggttgtttctgagacggattgctgcaagccacgattaatgacaatttggcctcggcttgcttctcttcatatgaagctgaacatggctttgtcattaactttgattggttcatgactttaaggactatgatagtattctaaagtccccacagtttttttttcaccaatcagacttttttggttttaactttttaaaaggttatcacattcattttttattttttcctctttattttccgttcttttttgaagtctcaaatagacggctgttaaaaaaaatctgtataaaacttcttttttcttcaccccatagtaattaaaaagtctctacaagttcataatttgttttacaattgtttttgataaattaattattattttttctatttcttttaagatctattttacaaataataattttattttcatcattccattattaatggtgtaagagagtttataaaattagtatttttcaaattcatatacagaaataataaacataacagaggttaattgttattacatacatctatagtagatctctacatcacaagtataaatcaattcttatttatatcattaaattattttattaactcattcatctgttaggtatttttgttcgcactgaaaaatattttaatgtatttttgactgctcaaaaagactatttttcttagtcataatagtcgatcaaaaatcaaactaaaaaaaaaacaaaaaaaaacaaattaaaacttactaagaaaataattaataagataatctacgatttaaaatattactccctcactatagttgtagtttcactatagttgtagtttgagattttctcacatagattaagaaaacacaaaaatctcatttaatttatctcttttctataaaaagatcattaactacctaattcaatcaataaaaaaatatatgctgtaaaataaaattggccaaaaactattaaatacatttaatttttgcatagataaataaaaacaacacttattttgcaaaaacaaaattccttaaactataaatataatgaaacagagggagtattagtttgttagcaaaattttatatttaaatatcaaatttggttacaattaatatataataattaaaaataaaattcacaactttatacctttatgttgccaatcagattttaaccgccaaaatttttacagccaaaatctctacaaccatagtctttacaaccaaaattgacagttattaccaatcggccctaaacataacttttgaggggctcactggtattgatcagattccttttggaagtgaaaggtgatttttctaacttcctaatgatgtctttactaacttccgtatttttcatatttttaccaagcaatttgcaacgaaactgtaaacttttgaggaagtattgcaaatacgtctgaaatttgggactactttagcgactacaaacagtctttgattcgtcctaatttgcgaccaaaatgatatagtcatctatatattggtatcaaaacaatcacgacaatgggacaattttccgacttccgtttgtggttgtaactatgcgatgtagttacttctgttttctatatagtccttaatttgtcacaaaaaaagtctttgaatagtggctaatatttgagaccgaaaaaataatctcaaaatgctggcccttagcttttaaagttttatttttctcttttaagactttggtttggttttatattagagaatttccataaataaatgaaaaaagatcttaatttttcatctccagtctctactttggatgtttaactattttctaacatattcatgtgcctttttagttatgtaatatttaataaaaaattacagtgtttaactattttctaactattttcatgtgcttttttagttatgcaaacagcaaaccggagtaaaaataaagcagatcttctttgaaacatcaaaccggagttttcttattttaagttgtaacatcaaactggagttttcttatcacttgtggaatctaatggaatgcttcattagctttggacactcttcttcaatcatgaaaatggtacaacattccagtagtagatgctttcagatcaggtagatggctaaggggtaagctctctagtttctcaaatgggatgataatacctacctgcccttcagtagcttcttcttccttgattataacctttagttgctttgaggaacaaacaacagacaagtcaaatcctttagaccattgccacaatactttgatttgcttaattccatttcgtaatcataacccatttcgtaaatttaattgttaatataagaaaaatatatgattttggcattcatctatggccaattttgctgtgaatacatacttccttgtatctatttaacaggtaacacaaatcatataccaccgattcctcaacttaagcaaacggcagatcacaatcggaatcgagacaccaaatgtgatttctgaccgtaacataaatcagtcagaaggtctgcgtatagtaagcagtgagaagagagtaaaagtacgtttaccgtttgatccttactcgattcttctctctcgccattggtcctagtcaagctgaaatcaactggactcctaaacttttccaggtaagggcaaccgcgagtgaggaaactccatgtgacttgtgagatgtctctgacacaactcagaatctgcctagacttttctttgatatctctgtgtgaattagaggtttcaagcataagacatttcgtgcatttgacatcagattctacagataattccatcaaaagcttcggggccaaatcaaacaataattctccagcatttttccagaattttgctgcagatatagcaaaagaacgttccgcacaaaagagatggtgagaaacaccagcaaggaataaagagtaggctgcacttatcctgctcatgtcacaaacaatgccagtttcagaatcaatcgaacggattctgtaagcagtagctagagtaatgtacgcattcagagcaacgtagtgacacgcatgtaaccgcagacaatgaggctgtgagtcttccttgaactggatgccgtgatgcagaacactctcaatcatctcacaacatgttttaggatcgatattgtccgataaaaaatcatctatagcttcttggatataatcattcatctttcccactgcttcatctttgttagtacttccatcaaagtgaccaacggttgtcttttcactctccaacgtaagaactccctaaatggatgcatcatataacgttaactattttaaaccacacacaactaactcaaactcagccattaataaactgaaatttcactagcttttgatgtgagactacaccaaacaacagtcacaattgatacctctaaaatagagtccacataagctggaggtgaagctgcacatcgtccacagttacacataaatcgatatttcgaccacaaatctgactgtctcaatccctaaatggttaaaaaggaatacacttttaataagataaacaatctagagagtgatgatatctctaaagcacaagactttggacatagaacaaaccgtgggttgaagtaagtcaatataagatacagtgatctcttcaccactcttaatcctcttgatacttctaacaatcaactttggtccatttccattaccactgttcaaactagtaccacaaacttgttcctgcaattctaagtttgacgatgtttctgtgttggtgacatgaacatcatgatacgacgtcctgttgttgacgaaacggtaacaagagtttggagagcagctatggttaatccaagagaagcttgaattatagagagcgattccaagagctagtccgttgctatcgtgcacctcaacggcgtttgttagcacagcacatatagctgcttcttccaactctgtgtttttccggtttgatctaataacggtggctatgaagttggcggcgtggtgaatagcgacggagatggaaggatcagccatgaggaggtggtgattagtgagaaggttgttaagacggtggggagatgaggaagtgtcgacggcggtggaattgaggagatggagagatgtacggatgtcggaggggaggattggtgttatctccggtgggaattgaggggaattggtgaatgaatcggtgagggagcatgcggcggagcagtagagaggttgcggcggagatggggggagaagggagaagcaggaggagcagtgagaggagaggaatgagtcgtagagagaggaagcgagtggagagagtggcggaaatagatctgtgcggatttcgatatcctccgccgcgcgtatctccatctccgccgtatgtcaccggtttgatattttgccggttttactatgttagctacgacgtcgtttaaatggagagaaagcaaattaaacgacgtcgttgtagattgtgttggactgttggtaacgttagtccaaattggagtttatgaattttttagatttaaaaaaataaataacgtaatttaatattgttgtactatttcggttgtctccggggaagaagagatgagcggcggtagggttttggcgattggggatcaagatgcgactatggatgaggttgggcggccaccgggggagttatcggcgagctcttcactgtggttggagaaagtgaagggcagtgttggtggtggtctaccggttccagaaagggctattgatgatgagtttgttaagtcgaggatgagagtggagttcccaaatggtgctagaggggagccggtcattaccattgatcaagaggttgtggatgctatgaatgcgttatggaaacactgtatgatcgtaaaagtcttaggtcgacatgttcctatagcagcgctgagtagaaagttacgtgagttgtggaaactggcggatgggatgtatgttgttgatctcccgtgacagttttttatggtgcgttttgacagagaggaggactatatggcggcagtgacaggtggtccatggagattgtttgggagtatcctaatggtccaagcgtggacgccggagttcaatccgttgagagatgaaattgtcactacaccgatatgggtgagagtttcaaatctgccggttaccttctatcaccagttgattctgatgggaatagcaggagggctaggacggccagtcagagttgatatgactactttgaatcgggagagaggaaggttcgcgagggtttgtgtggaggtggatttgaaggagccgttaaaaggaacagtgttggtgaacggggagaggtattttgtttcatatgaaggcttaggtcatatctgtccgacctgtggaatctttggtcatctagtgagtgcgtgtcctcagaagttgtcggaggcaatggctcagatgagtacaccagatggtagaggggtgtcgggtcaaggggagcagagtaatgatgggttcacggccgtaaggagatcgggaagaagaatggagtctccggtgacgccggttattttcgcggcggggggacaggagaaaattacggaacgtactaacggagtaaatgcgcgaatctcgagatcaggggatattgccatatcgaatagcttcagtggcttaatggaggattcggtggaggagataagggaagtgaggggatcgcaggggattgataaggagaatgctaatattaacgtcccgcaggttttggaaagtttggaaaagaacaaggaaggttctaattctaagcgggaatttcgagttcagaaggagaataaagttgcggatttgggcaagaggaatgttgggccgagaagtgggaagagtagtgggccaaggaaaggacccagaacgaatatgcatgtcagggattagtttttggcccattacagggggagagagacatgatttctcgcggaaagaggttgagaacagagtcggactgtgttggcagagctggaggggccttcatgggtagtggtacgaatctgagtctggataagagaccaatgcaagaaaatttaatgtcgagtgacatagagggagagaggctggatatggtgagggagccactctcagagatgcagacggatacggtagaccttggagtcattgggaatgacgaataacaggttgccccggtgtttcaacgaaactataagattatcatcatgaagtgcctattctggaattgccgggggggcgaataaacccagttttcgacgttcaattcgatatatgttaaagaagtatgagacaaacatgattgctctgtttgagacacatgcggagggtgtgcaagcgagtagaatttgtcaaaggttgggattggaaaattcttttcgtgtggatgcgacaggacagagtggtgggttgtggctgctctggagatctagtgtgggtcaagtagatgtggttgcttcatcgaatcaattcatctatgtcaaaataactaatgcggaggaggtcattaatttggttgctgtgtatgcggctccaacggtgactcgtaggagtggtttatggggggagttacgggatatcattggcgggttagaagggcctttgattattggtggtgacttcaatacaattttacggttggatgagcgaacagggggaaatggtagactatcgccagattctttgttctttggtgactggatcaatgaactttctttaattgacatgggatttaaaggcaataagttcacttggaagagaggtcgtgtagagagtaattttgtagcaaaaagacttgatcgagtgttctgttgtgcacatgctagattgaagtggcatgaggctgtggtctcgcacctccctttcttctcttcggatcatgcgcctctctatctccaattggctctgaaccaaactatggatccgagaaggagactgttttgttttaaggcagcttggttgagtcatgagtgcttcaaagagatggttcagatttcgtgggatttgaatctaacgactccagtggcgctgcagaagttgcaggggaagctccggatttggaataaggaagtgtttggtgcgattaatactcggaaagagaagacagtgagacagcttaaggaggtccaagatcttttagatgttacacagtctgatgctttattaatgaaggaggagcagcttttcaaagagtttgatacaattttagagcaagaggagactatttggttccaaaaatcgcgtgaaaagtttatttccttgggggatcgaaatactactttctttcacacctcgacaatcattcggaggaggagaaatcgaattgagagcttgaaagatgatgaggataagtggatctcagacaaagaggagttggagaggttggctgtagcttattatacacggttataccctcttgtggatgttagtgaagtgcgagagaggttaccaactggaggttttacgggtttgtctacattcgagaaggaacagttggataagccgtttactcttgaggaggtagtggtggcagtcaagagtatggggaggtttaaagcgcctggtcctgacggtttccagccggtattttatcaagaatgctgggagatagttggcagttcagttactcgctttgtgctggatttttttgaatccggtatattaccgcagtccactaatgatgctttgttggttctcattccgaaagtgttgaagccggagaagattacacaatttcgaccaataagtctgtgtaatgtattgtttaaagtaataacgaagatgatggtcattaggcttaagagtgtgatctctaagctaattggaccagctcaagcgagtttcatccctgggaggttaagcatcgataatatagtagtcgtgcaagaagcggttcactctatgagacgtaagaaagggcgtaaggggtggatgttgctgaaactggatttggagaaagcatatgaccgaattagatgggattttctcgaagagactctacaggcagcgggtttgtctagtgggtggacgcgacgaataatggaatgtgttgcaaatccggcaatgagtctcttatggaatggtgagaagacagagtctttcaagccagcccgtggactccgccaaggagacccgctctctccgtatttgtttgtgctttgtatggagaggctttgtcaacttattgattttgaggtgggaaataagaactggaaaccaattaatctttcgagaggtggcccgaagatatcccatgtttgttttgcggatgatcttattctttttgcggaggcatcggtagtgcaaataagagtgattagaagggtgttggagaggttctgcctatcttcgggatagaaagtgagtttagagaagtctaaaatctttttctcgagtaatgttagccgtgatatggagaggttaattactgtggagagcggaattgggtcgactagagatttgggcaaatacttaggtatgccaatcttgcaaaaaagaattaacaaggagacttatggagaagtgttggagaaagtaaattcaagactcgcaggatggaagtctcggaccttgagtttggcgggacgaattacattaatgaaagcggtgttatcttcaattccggttcactctatgagttcaattatcttgcctgaatctactttggaaagcttggacaaggtgtcaaggactctcttgtggggagggacgacagataagcgaaagctacacttattagcttggaaaaaaatttgcaaaccaaaggaggaagggggtttgggagtaagaggatcacgggacatgaataaagctctcgttgctaaggttggttggaggttacttggtgatgacaagagtttatgggcacgagtattacggagtaaatacaaagtgggtgaggtgctgaatcattcgtggttggttcctaaaagccattggtcatcgacttggaggagtatcagtaccgggttgagagaggtggttacttgcgggttgggatgggttcctggtgatggtagttctattaatttctggttagacaaatggttgctgaacacgtcattgttgtcgcatgctacacgcacaattccagtggtagaaattaataagaaagtggaggagtattggtgtgatggtgcaggttggaacacacgagttctctctttgtacctgccgatgagtattatacataggttatatgcggtggtgattaaaggttgccctggagtgcgagacacgatttcttggacagggacttccaagggtgagttcacagtgagctcggcctatgcgatgttgacagctgatggggatccgcgaccatgcatggcgaagttctttcaacaggtttgggctgtggtggcacaggagagagtgcgtgttttcctttggcttgttgaaaacaaggttattatgacgaatgttgagagagtccggaggcatatgggggagagtgaattatgtccagtttgtcaaggagcgatggaaacaacgattcatgtacttagggactgcccggcgatgtctggagtttggttacgcttggtaccgagatctcggaggcgcatcttcttcacacaaagccttttggagtggttatatgataatctcagatcacgaggggggttagatggtcaagaatggggctctcttttcagtattgcggtttggtgggcatggaagtggaggtgtgggaatgtgttcggggagcaggggagatgtagagatcgagtacaattcttgaaggagctagccaaagatacgatacgttctcaccacatgagtcggggaagttcacggagaggggtaacgagtgcgcaggtcatacgatggcagctacctagtcttggatgggttaagctttcgactgatggtgcttctcatggcaacccgggtctagcaaccgcgggcggagtgatacgtggagaagaagatgagtggttaggtgggtttgcgttgaacataggcatctgttcggctcccatggcggagttatggggagtgtactatggtttagtcatagcctgggagagaggctttcgacgggtggagctggaggtggactctaagttggttgtggggttcttacaaacaggggtgactgaaatgcatccgctgtcttttctggtacgtttgtgccatggctttatctcacgggactggttagtccgggttactcatgtgtatagggaagctaatcgtcttgccgatggattagcaaactatgcgttctctttagattttggttttctttctcttgatgtttgtcccgaatctgttctttcgatcatgttcgaggatgttaatgggtctggtgtccctcgtactattcgtttgtaatttcttttatttagttcttaataaattgggaggagtttattgactccccttcccacaccaaaaaaaaaaaaattagttttgtatacaaattttaattttaatacttaaaaatatattagatattttcagtgttcagaaaatcattttagacggctgcctaaacgacgcctaggcgccaagcaatggttgtctattccgattttattgtaatcggctttaataggcagacatgttggatgtgcgagtttgactgtggttaggcagaattaatcagtttagtccgcctaattttttttcttttttcaataacttttctaaacgacttcattttttggcttttaatctaatttttcaaattacgtcgtttttggctaacctaaaaggaagaaaaacgcctcccaaaagaccaaaaaattgtagacattatacaagtcgtgttcttctttattgtttttgaattttgtcaattccgtagagagactctggttgcttctcaatcggtgtttatattattatataaagtatgattttcaaagttactaactcataggattgtgctacatgtcaagtcaaactagcaaatgtttacatgtgtccttcaatactttatttattaattttaactcatttaatattaatttacatgatgtaaaattaacttacgagattacggcatatataaaaaatatagtttcaacaatgtttggtttctaaatatttttgtggatttctgtttttttatatatattaattatgctttgttaattgttaattatttttaatactaactaggatatagatttgatatgtcataaatattattttgatatgaaaatgttatcacttaaaatgatgtgtgtagaatttaaatctagtttattatgatgacatagatagttaaactgtattacaaaattgaatgtgtcagatagaattttattttttctttttctagatactaaattaaacatagaataaggatcggttactatttagaattcaaatattattgataagattgagtttgtataattgtggttcgtctcttttatgttgtctggtttcttttctttcacgtctatagattatggcttcatcatcggcaacagctagattctatatcagttgtagagactacaaatttacagagaaaatcaaatgatgttggctgggaatttggaatgttgataaatcccaacaatttggacaaaatgaaatgcaaattatcgtatggggaaaggagttttcaggaggaatctatagactaaagcaacatgttgcgagaatacaagggaatgttgcagcttgtccaaaatcatccaaaaaagaccaaaaaaaatgcaagttagcaattctagaagcacaaaacaaaaagaaaagagttcggatgacagatttagaaactcgaaagatggtaaatgttgatggaaaacgagaggaggatgaagaagtaattgaagtagaaggaatgggagcaaacaaaagtgctcgcatgcttggtcctattgatagatactacatgcatcaatcctgaaattcataaaggtacaatattgacaccacatcaacaacatatcaagaatctccttgcaaaagaaagattacatgtggtacatcaatatgttgctagatgggtgtattctcatggcattccttttaatgctattgcaaatgatgatttaagaagaatgcttgaagtcgctggacagtttggaccaggtgttactcctcctagtcaatatcagttgagggagcctttgttaaaagaagaggttgttcgaatgaaaggtttgatggaagaacaagaagatgagtggagagttaatggatgttccgtaacgacagattcttggtcggatagaaaaagaaggtcaatcatgaatttgtgtatcaactgcaaagaaggtacaatgtttctctcttctaaagattgctttgatgattcccatacgggtgaatatatctttgcatatgtcaatgagtactgcatcaaaaatttaggtggagatcatgttgttcaagtagtaacgaacaatgccactaacaacataactgctgcaaagttgttaaaggaggtaagacccaccatattttggactttttgtgcaactcacacaataaatctgatggtagaaggtatttctaaacttgctatgtctgacgaaatagttaaaatggccaaagcgtttaccatttttatatacgctcatcaccagaccttgtccatgatgaggagttttaccaagagaagagatattgtgaggcctggaataattggatttgcatcggcttttcgtactttgaaaagtttggtagagaaggaagaaaatttaaaggtaaaaagaaaaaaaaagaaaaagctctcgaaggcgacgacgatggtggtactctagggttttgtgacccaacaatgaggggttggatctgggctgattttttttggttttctgtggaattatatcgatttttcattggtttattagaggatagtgctatcctgaaggttctcggactgacagagaagagatttcgtcatgtttccttgggattttcttttaagaggttgcaagtatggaatgttgaatttcaaggccgatctgggttgatgaggaaaagattacgatatcttttttgggcttttcttcagattggatctgtctttgattggcgatttggattgatggattttatcttttttccctttttcttcttcgttggtgtgtggattcttaggagatggtttaggcaatgttcctgctagttgattcttcggagttgtgcgaatcttaatttggtatctccattggcttcttttgattttgtttccatggtctttcagagtcagattgcgttttttatgattctccgcgattcgttcagagatatgattgcaagtttgaaatcctgctctttgtgttcacggggattttcagaacgttttttttgggattgtgatttggggagttatgatggtgtcgtggagaggctgtataaaaggggagaggtcttctcgtttctaagacatctcacatcccagtttttttcttctcttgttttaaacagctttcagtttacgatttctgttttctcttggagagtggattggttaagaagatttactatgtctcaatcgggtcttgtgagcaatgtccaaattccaaggaggaagatcaagatttctcactttgataactcggccttgattgcgggttactcaaaaaccctcattgggcgctgtatgaatcctcaaaggcaagacatgaagacactgttgttcatgcttcctcgtatctagcagttggaggggaaggttgtgggtgcagatttggggctaggccggtttcaattcgactttgaaacagaggaggatattgttgatgttttaaaaatggaacctctccattttgaccatttgatggtttctctggtgcgttggagaccttctatagatccagcttatccatcctctttaactttctggatccgtgttcttggtgttccgattcaatattgggcggaaacaacttttaatgacattggtgcagcgttgggtgaggtcaaagcagtggatgttgatggtggccgcgttcaggtggagctaaatgggttcatgccgttgtgttttgatacggaggtggagtttagcagtggagagaaaaccactatgttcttgtgttacgaaagattgtttgggtttgtaagagtttgtttcatgatgagtcaaagtgtgccttcaacatggttccaaatccagcagtgatgtctcaagctccaagacaaaaggcagagctacataaagagagtcaaaatttgagctttaggggagcggtaacaaatgagttaggggctgaaacacgtcaagtttagagggttcaaggcagttctttaaggaagcctgccgcaggtcatcacaaggaggttcgaaatcggtatcaaaatggttcacataatggggcaggctcctctcgtcaaccaaggtttctcaattatctgaagtatgctgaatttagggacgctcgagctggagctcaggaaaggaaggggaagcatacagaggtgttatctgagcaggtgctttctgagcttccagtggctgtggagagaggaaattcaaagcaggtccagaaagctctttttacgtccgaggtgtcggagatttctggttgcttggagtcagaaccggcgattcaagagtggcaggatccatcaaaggcttcagaggaggtggcagttttggcttctgcagggctggagcagatttcttctgggggtgttgtttcagtttcagaacctcttgaggtctccaatttgcagggggttttgaagagcaaatggcagaagatgaggtcgatgaagatgatctgttattggaggatggattagtgaatccggctgatcatgtggatgctatggaggagtatgaaagtgaagagtttagagggtccgaggtgaaagatgacggccagctagatcaagaagttgaggattgtgttgatcatgttggggaagtgtattaggaggatgctgtggatatggagtatgaggaaaaagaaggagatgttgggaaagggcgcaacctgaaaggtgttgcagctatgaaaggaataagttccaaaaagaggaatgttcaattgttctcatcgtcacggaagcggtttgcaccgaaagggagtgatcaattaattgagggagctgagccgaagaaccgggtcacggggaaggctgtgcgtggtggtgctaaaccaccaaaaccaacggttgataaatgaagattttaagctggaattgtcaagggctcgagaataaagcaacaatcggttatcttagggatttatggaaacagcatcggccggattttttgtttttaatggaaacaaagcaatcttctttatatatggaaaaatttgtcggtcattttggttataaaaatttaaaaacggttgatcctattggttgtagtggcggtttagcacttttttataataatgattttaatgtttcaattcttttcgaaagtaatcgtctaattgatgttgcgaccaattataaaggaaaaactattcaccttacctttgtttatggggatccggttccaaaaaaagagattacgtatgggaacgattaacaagaattggtgtcactcgggatactccttggcttttaataggtgattttaatgagttaagaaataataatgaaaaaagaggtggtaagttaagacttgcttcaacgtttattccttttaattcaatgattcaagattgtggtattctggaatttccataccttggagattggttatcgtggaggggttggcgagacaagaaaccaatacggtgtcggttagatagggctttagcaaatgaagaatgacatgatttattttgcaattcttttattgaatatctaacaatgttagcttcagatcattcaccagtaattgcaacaatagcagataagataccacgtggcaaacaaaatttctggtttgagaaaagatggattggtaaagaagggttattagaggcaatttcaaatggctgaaatttagataccggatcacgagagggatgttttgttgaaaaaattacaaattgtaggcgggctatttctaaatggcaaaaagatttatctccttacggacgaaaaacaatagaggaactaaaggcggaattagatgcggcacaaagggatgatacaggagcgcgagaggagattacggaattaacgttacgattgcaagaagcttatcgtgatgaagaacaatattggtatcaaaagagccggagtttgtggatgaaattaggggataataattcaaaatattttcatgcgataaccaaacagagacgagctaggaatagaattaccggcctccatgatgaacatggggcctggaatgtggaagatgatgatatccaaatggttgcggtttcttattttcaaaatttgtttttaacttcaaatcctcaggcttttgatgaagctttgggtgaaattcaacctcggataactgagcaaattaataattttctcaaagcctctgcgacggaaatcgaggtgagaacggctttatttatgatacatccggagaaggctcccggtcctgatggtatgacagctttgtttattcaaaaagcatgggctactattaaaacggatttgttgactttggttaactcgtttttagaagatggattttttgataaacggttaaatacgactaatatatgtttgattccaaaaacggaacgtccaacacggatgacagagttaaggccgatcagcctttgtaatgttggttataaagttatttccaagattatctgtcaaagactgaagacagtcctgccaaatcttatttcggaaacacaatccgcttttgtcgaaggacgactgatttcagataatattcttattgcacaggagatgtttcatgggttacgaactaacccatcctgtaaaggaaagtttatggctattaaaacagatatgagtaaagcttatgaccgggtggaatggaaatttattgaggttttgttaagaaagatgggtttctgcgataaatggatttcttggattatgtggtgtataacaacagttcaatataaggtattaattaatggacaacctaaatgactgataattccggagaggggtttaagacaaggggatccgttctccccatatttatttattctatgtacggaggttttaatagcgaatattcgaaaagctgaacatggaaaattaattacgggcataaaggtagccgcaccaagtcccccagtttctcatcttctgtttgcggatgatagtttatttttttgtaaagctaataaagaacaatgtgaaacaattctaggtattttaaagcaatatgaagcggtttcgggtcaacagataaatttttcaaaatcttcaattcagtttggtcataaggttgatgagtccattaaagcggaaattcatttaattttgggcattactaacctaggtgggatgggttctaaaactaaaattttctcttttgttagagaacgattgcagactagaataaatggatggtcagccaaatttctatccaaaggcgggaaagaagttatgatcaaatcggtagccgtggctttaccaacttacgttatgtcttgttttcgacttccgaaaacaattacgtccaaacttacaagtgcggttgctaagttttggtggagttcaaatggtgattcaagaggtatgcattggctggcttggaataaaatgtgtagtagtaaagcggaaggagggttaggatttcagaatgtagatgattttaattcggcactattggcgaaacagttatggcggctgataacggttccaaactctctttttgcaaaggtattcaaaggaagatattttcgacaatccaatccactggataatataaaatcatattccccatcttatggttggagaagtatgatttcagctagatctctggttcataaagggcttatcaaaagagtcggttctggggcttattatttttataaggattcgaatatccaattcgaccgagatgtcattactgctactttcaaatatgtggatgtcttttttccaaatgatcttaatactcagacgtatcgcatcaacactgaacttacaaagtatacaaaaaaaaagaggggaactttggacatccaaccgccattataggatgttctaagaatgaagagaattatgatccaggtttgttttgttattatttttaattctaaatatgttccatgtacaatttactaataaattaaacttatgtttgttcagttcaatggtgaaatttttatggagttgaaattccctaactacaaacaatggcaaaaaagattttgtctttgaggactagttcatcagatgtgagcgtaattggagtacttttgaaggggtatttacttcaaactacataagaaatgttttttaatatattaacaaatatagtggatttatctctcatttgttaaattttattaggtgcacaccaaaaagcaaaacagacttgatactaaagggatgaacaatcttgttaaatgtccaattcaatatgaaattgttggccaaacgaaagaagcaaaaggaaaagaatgtggatatactagttgcagattgtgctactcatgctcaagattggattgttgaagatgctgaagtggaagaaaacgtacccataaatgaagatttagttagggagcttgatgaatctgatgatgacgatgacgttaacattgattttgaatctgatgatgaccatggtttttagaaggagattgggtgatgacgattagaacatcattagattttatttatttctttaaaactcaaatttattacttacaagctatcacggtatcaaaataaaatcaacctaggatcatacggatgaaatgtatatatcacctatattttctttaaaaggacatttaagggccttcctagaagaacttatggccttttacaaacttaacttatgactatattcaaagtacacatgccccatcatatttatgagctgagcctgaatataataattgttattattattagaatataaatactctttatcctactatattatttgggaagtacattttaaatataaccttaatttttgtaagaaattacataagtatgccattagaaataaaattttaaagagtaaattaatttatctctttaaggattaaaaaatcaaatactaatttaattaattaaatttaattaaaaaacgaaatacatttttaattttcaaaaataataaccaatcaatataaacatataagatttgatatctaaattttaattaatttaatttaattagaaaaacgaaatacattattaatttccaaaagagtaacctattaaaatcaacaaattagatttgatatctaaattatcatattaattttttattaattattatagttcacttctcatctttatatgattctatttttgcaaaaaataatatcatcattataaaaaataattagagttttttcgcatatgtcataatttgaatttttgaaaattgtgaatataaactgttcaatacatgaaaaatattataacgggtgaaaaataaatttaagaaaactttctactgagtaacgcgtcatatttgaaatatttatattcaatttcatacatattatattgaaaatttataatcttatatactacaataattaataacatattagatttttttctgtgtatgatgtgattcaatttttaatacaagatagaaaatcctagaattgacgggtttagatcgatattaatacaagatggtatactacatgtgaaactcttaaattaacaatcaaactacaagtgtataatcttaaacactaaacaatatagataatatcaacaaaacatatacaactcacagtttacttttaatattttatatacaaaatcaattaaatcttaattaaatcttaatcacataaaaattagcacaaaaaaaatattcaacaattaaattttttatcaaatctctgtgttatataagttttgatactatattcgaataaagtgtaatataccttttcaatttgtattctttaactaattcaagctaactaatatatttgctaatcttatacctatcaaaaccgactatcgtttcttatttctatagtatttttgcaagacttttttggtggattggggtaaaagtgcattcgggtcatatggtacattcccctattaaataaaaatggtatactcatatgttattagctaaaatgtttagattataattcagagtcatatcattaataaaattaatattaataaaataaatggctttttggcaagacggatttggagtgacgggtttttgaatcaacattaataaaaaagtaaaatataattaatacaccgtttcaatatgggttaaatctttaatttattattttttaagaccactaatattaaacatatcaaatcatcctaatttagaaaagattatataaaaccaaaaatgttatgtggtatgtataatgttactatatataaaatataaatgtattagagaatgatataatttgcaaaacttttatctataaaaaataattcttaaattttaaaaattactactttaaaaaaaaatttcacgggagggataaagaaattatagaacgagttttattttggaattgggttatatggtggatgtatttgaaaatcaatatttataaaattttaaaatattattaatatgctgttttaatagaggttacaacttcagttttttaacaattgtctcatagattcgtggtatagccttacttaataacaattataaagtgtaaaatataaatattttataaaaataaaatttgcaaattttaatatatattacttttaaaaaataaatcgtcccgcggtataccgcgggttaaaatctagtctttgataatattataatatcaaaatcgaaagatgaaattgatagggagatcaaacatttggtggaatggtggtcaccataactgttgggtaaaacctaagtcatgaataataattttatggttgtcatttgcgtacagaattctgataatgtttttttgtttaaataattaaatgcaatttacttgccaatccacttcaatcgataccagccacacctgagttaaactgaagtcggcccgtggttgaactatcagatcccaaacacaaatggtggctttggtcccatagatgtgtggttggctatccacataggcgattacataccgttccaccaaaagtattaacccgattattttacgatacatgttatgtatattcttaatggtttttagtgtataactcatatctaattaatcttttgtacacaactttgcaacatatagtaaggctttttttatatataattggattattgtgagttatgttactgtcattataatgtgtcggattattcttaatctgatttttaataaattaaaaggtcatgtatattatcttttctaattaagtttttaaaattcataggtgataatgtgatactatccttttgcgtttatatttcgtaaggaaaataaataaatagatatactgtcaccaaacgtttttgcttgttaattttataaaactatgtattgtagttgttgttcgtaaaataataatgtgtactaaataaaaacagtttaaatttgagagaccaacgtataaataaaaaagttcaactctaaaatagagtagagaataaagttactctatatataaagcaattatgcagaaatctctattttagagtcaaatatagagtagggttggaaaagaattcggagttttactctaaaatatagtagagttagagatgtccttaattaggacacctctatccagttgaatgcaaaacttgccaaccatatccttcttctttttgtaccatatcggttggtgtttcctgcatacgtatatgattatataaagtaagacatataaatttcattattgagtttattagtaattttggtgtgtcgtttaaaataaattttgaaatagttaaaaaagacaaaaaaagacctgaagcttgaagtaaaaaataataatatgcttggccaccatacaaattattctaaaagcggtgatgtaatcattgaaaaacttagaagtgcatatttttcttgtgatttctaaatgttaaaatttttctctagtttcgattttgatggaagtggctgttttatagatatatttttatatatatttaagcaaaacataagaagaaaattaagcaacagttaagcaaaatataacaatttttttttaatatcaaattcatgatatttaaaaaaatagaaatgataaaattaaaaaaacacaactattgactaattaagacactaaataaaggtaacaatacaaattaaataactcaaacaactctcgatcttggtctcaaatttacttaatttattttatatcactattagctgatcttcaatatgtatagataaatatttatggtggaaattaatggaatatgtattatattctcttgtgaatttggtcaaagagaatgtatatttcaaacataaactgtaagttgactaaatgcaaagctttttgaaccaaaagaaaaaccttgacccagtggttttaatgaaaaaatatattttaacagtatctaacatacatattgtttcatgcactgctcacataatttggtgtattgattacttttttactaaactatatcttctaaattataagagactagataaggcccgccttattgataatatttttttatcgataatatttaaaaaataataatcaataatattgttcttgacatataattttgaatagtaaattagtagtcttatgcattttattttagagataagttggagagtaggcagtttttgcaaaaataatttgaggaatgagtactttttttagaaataggaggaataagtacttttatctctcctctctaatagaactccccctctaatacagcttttagtaaagtactattttacccttctgttgttttgatgaaataaactgggcctcattaaaacgagcccaatatcatctccaattttgaattgctcatgggcttgacatcaactaaaacccatattttcttaagtcattgaaaccaaacacactcataaaccctcgtcgtcgacatcttcatttgtacggtaaagacctcgtcgttgtcatagaaggataaaccctcgtcgtttgccaaattcatagatacattgtcaatttcataccagatggaaggtatgtttatcataaaatgctttaaagtgtatgattttttgccttcagccaactattaactatgactctgttttcgttttttcaggggacgaatcatgcgtctccatggtcggctgctggatttgctactcgaatggttggtgggacttcaaagttgataaaactaggccaagaaagtgtattaactgcggaaaaattgacactttcaaatcccttgaagaagttatccggcgaagattctcgatggttgttaacgacgtgtttgttgagatgtcatactcggctgatgacgttttggtgaggctcaatggtcaggaaacagctccgacggaaatccaagatgattggtcttttataatgttcaagtctcttctaaggtctgacagttctgtgaatctttttgtcacctttaagagagtggtagacaataagcttgagttcctagatccccttgaaattgttgttccgccttacaacagaggcttcccactgatacaaggtgataacactgtgaaggagttgcaaccctttatttttggtgttcctgataaaacgagcgtacaccatgaaaatgggtttgacgtacaccaggaacttgaacattctgttcgagaaccaaatccagtttcagacatcagtagcccaactggagatgtccgagacctggtcatttgggatggtactgttgataactcactaatagctcacattgaagaaattgaagctcagttaaaagatgaaaatccacaaaaagacgttgttgatgatagtgaaagcaatgatgattttaatgagttcagtgaagaagacgatgatccagactatcaatctggatcagaagaggatgaagatgatgatgtctggactgagaaagttttagacgagaatgtggcgttggatgatgatttcacagatccccctctaaggaaggtacaaaactatagttaccttcttcgtgaaatggatgattttgtcaaccctcctctgttggtagacaaccctcttctgtctcctatccaagttaagaggagaaaagtctcactaaaagagttgtcctccaattagaagaaagaacaggcggcagccttaaagagagggataacattgtgtgaaatatatgactttgaagacattgaaccaatgttcattgacagtgactcacccgatttcagaggtcataacattgatctttctaaagaagacaatgttatatttaaaggaagggtttttgaaaccaaggacgagttcaaagtgtcactgtctatttatgcaatcaatcaaatttttcggtttagtttgtgagatacaccaagtgttatcttgtagcacaatgtgttgacaagaaatgagactggcgggtgtacgcgcataagattggtgatatcgatgagtacgaggttaggaaagtgaagcttgagcatgtctgtgatgtggaaacctgaggtcaatttaccaaatacaccacttctaagataatcgctgctttattacggtcgaagtatgtcaatgttacaactggtcctagagcgagagatctaccccaagctgttttagacgagcataatgtgacagcttcttattggaaatgctggaaagccaaggaattggcaaaatcttctactcaagggacagaggagacttcttacttacttttgcccctatatttgtatttattgcaacttgcaaatccagggacagtttattatatagagacagaagatgatgatgtcggagatgaaaggtttaagtatgcctttgtttcactgggtgcaagtatatagggtatgaaattcattcagcgtgtagttgttgtggatgggactcatcttcaggggaaataccatgggtgcttgttaactgcaagtgaacatgatgcaaattttcaggtatttccaatagcttttgctatagtggacaacgagaatcataattcttggacgtggttcatggagaaactgagagatattgttccggatgggtctgatctaattatcatatctgatcgccaccagtcaatataccatgctaagtctctggtgtacactcaggcgcaccacgtttgttgtcttgtacacctgaggcgcaatgtgagaagcttgtataaaggaatgtccggacttgtatggaaagctggggaaatgttcagagttaaagattttaagtaaggcctatgcacgtattaaacgaaggaagcctgaatgttgggagtaccttgaggtgattggtgttgaacattggacccgtgcacacttcaaaggggagcggtataacctaatgtctagcaacattgcagttaaacaatgccttactaccggctagagacagcccagttgttgctcttattgaattttttcggaagatacttagtaggtggtttgaagcccgaaggaagaaagtttctaacactctgggattgatcccgtagaagttgagaaaatcttattgaaacagctgccatactcaataggtgtaagtattcgaactgcatcggcttgggattatgaaataacaacaaaagatggaggaaaattccatgtctcattagagaaacgtacctgcacttgtcgctcatttcagctgttataaatttcttgcccacacgcaatggctgctgcccatagcagggagatggaataccgatcacttgttggctgcattcataagaatgacatatgggctccaacgtttgatggtgttatcctaccggttcaagacccatcagaggtgggagtacttgatagcgtcaggatccgctgcattcttccacctaagactaaacgtccttccgggaggccccctaaagttaggataccaacaaccggagagtttgaggttaacattcttgctcttcatttatattatgatgtaactaattcatactcacaacaaagtatgattatttatgcatggagaaacaaaatactggtacaagaaagaacaaatgcggaaggtgcaatagtttaggacacaacagggttcggtgctctgttccgctgaaatgaagtgcatttgtttggggaatggtgtacaaccagacagtcttcactggtagtctgtacactcgtttttatttttttcggctttaagaaggggatgtgatttttgatactttaagagctgaagaactatagcacaatctattttttggattgacataccccttatttgatacttttcattaaaggtgtacaattgttttgctatgcagtgtacacccgtcgtagttgattcaatggattatattattataagatgttgtgatacattttgtgtttgaatatctatttttgcaattattttttgttatttttttgcgaattaagttacatatgtatccataatttgttgttatcaaaaaggtaaattatttgaaactgagaatgaaatgtttgaaactgagaatgaatgttttcctccttcctttttatctttggcttatcctaactatttaaaaaaaattgaaatgtgattccaatgtcggattgaaatgtttcactccttccttttgtcctcactatttgtgtttggcatatcctaactattatagatctttgtaaatgtttttgaaaacattgcgtgtatttttgtttacacaaaaattataagaagacaaactaggtgtttaaataaagctgtcaaactaggtgccaaactaggtgtcattgcgtgtatatttgtttaaatatagttgtccccctttcactaaactagtctcctcactaacatgtagggtacgattaaaaaatcaagagccaatactttcccaaaacaaacttctaggccatcaaaaaaatagtaacaaaacacattatgttctattttgtttgtaatcttacatatagctgtccaacctatctcatattttaatattttaatactttaatatgaggacggtgtcagccttttactagactagttcttttaggttaattaaatcaacatatgttttctcaccaccaacatgtacggtataattaaatcaatacaagggccaatacaatccggaaaaaatattgcagtaggttaacaatttattattattattttaaaacaagcaaacaattcaacaagggctctcgttcaactaacataaacaagacaaattaggtgtacacaactacaacaattctcttatgcgaagtaaacaccagaataggtagcagtcgtcacaattaattcgataatagtgccactgagcgcactcagtgaagctgagtgtgtcggtatttagataaacctacttatctccgaacgtgtcttgtgaaggagggaagaatcctttgaggtcttcaaataatttctccccaatttctcgaattttctccgtagttcacgagcatgtacagcaaagaaggtattgaaaatctcatctgcaatttcaaacttccctgcacaaagcaagaacattgcatatgcaaatgttgggactgaataataaggcacaagagaagcgaccattgccaaagccccatctagatcttgttctcttgtaagtaatctaagcgattcaaagtagactgccgttgggttttcgtaatgtaaaaacttctcgaagaaagatctacccggtccagcttcgaagataaacccattgattgggtttatcgatttgctgaaaatttgaggaggctcaacgcacaactcatccagtttagcttccatcaacatttccttactgtgtacttgcgccagacctctacttcccgctcttagaattgcccctaggtgtaaatacgacgccttgtccactcttctcacgatatctaccaatatctcattaggcagctcggcatgaccataacatgatttttcttagatctgtcttgtttattgccaataagaaagtcaaatatataggcgtttctctctcatgaatttacaacttactttttttcctacaagtatagatatatgtatcttacatagaaaaggtgtacaaaaaatattatggtgtacatactgtctaccttgaaagtgtacagacacgaatgtggtgtactcaacctattataaagtcatagtatcacatgaaaattcgaacacaatccatttcaattcaagtgttatgaaccataaaaaccaatcaacggttatgatgttgatatagaaacttactcattgacttggaatttcaatgagtttagccatgtatcttagcttttagggtatagttttttaattaacttcattgctaaaattgtttttcccttgggattagtaatctatcttggcttttagggtatagtttttaatttcattgcatttcttaattgggtttagtaatttgtacttatgtggtgtactattctagtgtacgaatgtggtttactattctagtctactattataaagtcatagtatcaatgaaaattcgattaaaatacatttcaattaaagtgttatgaaccatcaaaaccagttgagggttatgattttgaaatataaatttactcattgtcttgaaatttctatgagtaatctaagactttagggtctagttttaaactttattgcatatgttaaatggtttctcttgggtttagtcttctatctttggcttttagtgtatagttttgaatttcattgcatttcaataatggtttttccctaggggtttattaatctatcttggcttttagggtatcgttttaaatttcattgcatttcttaatctatcttggctggtgtacaattatagtgtacctatatggtgtacagttctagtgtacttatgtgatgtacaaatttagtgtatgtatgtggtgtattattctactctacttatgtggtgtacaattctagtgtatgatgtagtacatacttggtgtacttataccagtgtacaaaagagtatacgtttagagattatcgtgtactacttatagaagcaacaaatttaaaagtcataaaaagcataacatttcaatatccataaaaacaggtacatccaaagtttaaagtcaacaaaagatgaaaacaccagcaatgtctcgattaacgtttttaaagaaggtaaacaaaagaactttagattcatttgcaactccagtcaagtttttgtagcttcagcactctcaatgaactcagcgtattcatccagcgcgtaccctttccttaactcgtcgaccacctcctccgtatactcacccatatcatctatgtcaagctcaaacgagtgcatttcaatgtattttgttgcaaggggtccagtgtcacctcctctctggttctggtatactcctataaccctctccaatgttagtgggtttgttgagaatttctttgtatacttcttacctacaacctctttaaccaaccatgaaatcatctctaaaacaggcgccatcaaaccttgtacttcctcgtccgacgttgcttcaattaaagggtcaaaaacctgaactgtatgcaacctcaagttaattaccagacttacccagtgtgatgtgtaccatttcatagggatgtacaccaggtgagcatattgcagaaaagttgttggtgcccgtccttttgccctgcctgtaacaaacgctctgatgttcactccccaattgaacttcctcttattcttgctggctttgaaatctgtgtacttctcatttagaagggtcagaaaccatgtatcaatgaaaacagctcatgccgtgttgtacaaaccatgccttttgcgccacaacatagccattattacctgcacatgctgtttaccaattgcaccatgtgagatattatcctgtatggtgttcatactaagtattcaagaggttttagtgtacacgttctttacctcaatctccaaaggtttgttggcttcagctatgtctaggaaaaaccgatagctggcgatgtgtttagttacaatcttaaaagtcctgtaaaaacgaacgttttgttagatagcgttaaaaaaaatagctatacttttaatcatagaacttacagctcctcattgtccaccatcagttatctgagctcgtcaaactccttcaagtttacactggacatggggtggtatagtgggtttttttctttacttgcaaacagagcttttaacttgggatcacttgtatactcccctcccttgacaaaccctgaagcacaaggcactctattacagtcatttaccatctcttcaggagtcttacagtcattaaccaactcttgaggagccaaactttcatgtccaaaatcattttaatctaagagacaatgataccttttaataatcactgaataatgtagctgtggacttacctcttcatttctattctctaaacccctacatgtttcttcatgtccaatctttaaactggagggaacaatggcaagtgcattatgttcagcaaagggtgaatcataaccagattcaaattcgttatcatattctattccctgctagtatagaacacaatgagatcacacattcagttgtacaccaattactaagctagtacaccaaacaataactatacacctaaccaaaaacacacagttttttacgtgggaactattgtcttttgctgtctcttcgttaggtgacagatctacattatcaactttctcaatgatgtcttccacacctttgtaagcatattccattccatgttagtataaaacataatgagatcacacattcagtttgtacaccaattactaaaatcagtaatgtagtacaccaaacaataactctacaccacaaaccaaaaacacagtttttacctgggaactattgtcttttgcagtatcttggttaggtggcagatcaacattatcaactctctcaatgatgtcttccacacctttgtaagcctcgtcccatctgtttctctcatagagagcaaagtcctctccttttcctcttcttcttgcccctcgacgttgtacccatctctaaactaatgacctcatcatgattctgattctgctccattgtggtgttagcttttccatcttcattcggttccattgtggtgttgtctttcccgtcttcctgctacttctccattgtgctatcttttgtagatcgcagtccaccacagtcacatttgatcagaccctcgaataactgaactatctctctcttcaacgtgcttgatgtttctttgtgttgctccacaatgaatttcttcaacatctctatagtgtctccgtcatctttaattacagcaacatcttcttggttcttctctgcatgtcctcctcgcctagctggctctttcttgactccccctctcctagctggttctttttttactccacctcgccttgtaggcgctttcttaacacaccctggggtaagaggcaccagtccactagtctatgtgtctccacctggccattctgactcagtaaactcatgtccttcaattagtagcttctccatataatccaccttctcatctacaacatcgtcatcccacccaaaatccatgcattccacgccctcatcaccctcaagcgtgtaagcaaccttcaactgaacaatacaggtcttaaaacaatgtacaaaattgtgataaattggtgtacaacattaaagttttcactaacaaagttgtacaccatatggttaagagtattgtacatgttcatcggattcaacctggatgatttctttttgatgtaggatcagttttttgtgcccagatcgtcatatgtcatctgagtataaccacgcttgtcatctggatccggtagcttagagacaataagtgggattgcctcaaacgccagcatttggagtgccaatggaaatccataacaacagctacttcgttgtcttagacgggctttaagctctatgatgggatcagtgtcgttgagtgtaggaggtccaaacctctccatcgttgtcttgaaggctactctcccccacaagtatgataagaagaacctaacatcatcaagcatcttaacatattctggtgttatgttgaggtacttgttactacagactatcacaccatccaccaggagaatcaaaactagacaaaaccgcttccagcaagacatcttctcatcatcgggcatcttgacatcttttcttaccatatccaaaacatcggtaactgtgacatcttctcctaagagctcaggtgaagaataaatgttcaaccttgcttccttgggaaaaaaactcttgcaaagactctctctggaagcccatggtccacgccgtcctcactttccgaatccttcgaagttgttgacatatctggccattagaataagagatggttcagagatttaattctcactaaaacaattttaccgacaccagtaaaaaaacatttggattgaacaccaacaaccttgaacgactttgaaacgacaaacattattcgggactaaaacaacaactcacatgttttgccaatatattctttcctccgttttgcaccactacgagttgtactaaaatcatcctccctgctagttgacgccataagaatctgggtttctctcaaacgtctctcttctcaaactggttctctctcgatttgttgtacaccacagtcggctagggttcgtgataaacgaagaagagtaaagtaaaacaatcccaacaattaactcgggttcaataattttctgaataaaatcgaaatgtaacattcgggctcaataattgggctcacttaacacgaaatagagtaaatgggccacgaataaattagtatacccattagtctttattttttcgaacccagacgaaatttgtgtttttaaaacacaaggctacaatagtatttgacacctcttttagattttagccacattttttctcatctcacatgctctccatctcacaagcccaacaaaaactacccattcctcatatttctaaaagaagtacctagtttccaaattattttctaaaaagtgtctacttctctaataagccctttattttcttgtaccctattaattttattgatgatatttgaagtctaaataataacctacacactttttctttattataatttagtatttagaagaaaaagacaaatttttatcttacacattcaattttgtaatacaatttaactatctatttcataaaaaactcgattttaattctacacaattcatcttacttaataatgatttcatgtcaaaataatatttatatgagatcaaatatatatcttatttaatatttaaaattattaacaattaacaaaacataattaataataaactttttttgttaataacatatatattaaaaaattgatcaataacatatagggaaaaaacctgaaaaaatcctcatctaatttgtttttgcccgtttaatacctgcattattaaatttgcccgaaaaatacctaagttaattttattttctttaaaaaccttcgttttttaaaaattttagtaaaatcagccatccgagttaacggccgttaacagtggtaacagaatcgctaactgcagttaaaactaacctatagtgtataatacgtatatatacaatttcttctcaattattttgaaactgtagtcctggtctggtcgttaaatatccgttgattaccaaaaccctggttcgaatcccccttatacctttttagacgttttttttactttttatttttatttttagttgttatttttaacacgaaacacattaaaacaagagcaatacacgaccaagagattcatagaaactattctcatcggaaaaatatattttttttttgttttgaatcgctgaaagtgtgatgagatgtagagaaacaccaagccatgatcctaatttatatccagattgtccgaatcttcagatattgattactctctagaaggaaatcacactgttctcagatctatatcccgatgaagaaccataaacataaccacaatctctttatgagatcgaaaaccatatatagatgaaaaaccatctcaaatctaaaaaagttgaaaaattgtttcatctgcgttgaagaatgatggtcgtcgtgaggagagagagagagtcgaattaagaaagaaaaaataaggtagagggtgggttcgatctagagaatattcaagccatacataaccactacactaagacaatatatacataactattagaaaaacaattgcatataaatagtaagaaccatcgaattaagttttcactacagttaacgatttcgttatcatagttaacggtcgttaactggattttttattttaccaaaatttataagacatgaaagtttttaaaggaaataaaattaatttaagtattttttgggctaatttaataatgtagacattaaacggacaaataaaaattaaatggggatttttgggttttttttctatagcatatataaaaacaaatttgttaattttccttttggttaagaaaaataaaatgtaatattttttagatatagacatataaattagtatatgttaatatgattgatttttagtatttctatttctttaggaagaaaaaagttaattgatttcttttttaatatttttatttctttaagaagaaaaaagttaattattttctgacacgtgtcaacattcgatcgatagacttgacacgtggcataatcctaagagttagtaactttttctaaaaagtgtctacttctctaataagccctttattttattgtacccatttaatcttattgatgatatttgaagtctaaatagtaacctacacactttttccttattataatttagtatttagaagaaaaagacaaatttttatcttacacattcaattttgtaatacaatttaactatatatttcataaaaaactcgattttaattctacacacttcatcttacttgataatgattcatgtcaaaataatatttatatgagatcaaatctatatcttagttaatattaaaaattattaacaattaacaaaacataattaataataaacttttttttgttaacaacatatatattaaaaaattgatcaataacatatagggaaaaaacctgaaaaaattctcatctaatttgtttttgcccgtttaatacctgcattattaaatttgcctgaaaaataccaaagttaattttatttcctttaaaaacatttgtttttaaaaattttggtaaaatcagccatccgagttaacggccgtaaacagtgataacggaatcgctaactacagttaaaactaacctgtagtgtataatacgtatatatacaatttcttttcaattattttgaaactgtactcttgatctggtggttaaatttccgttgattaccaaaattaaccctggttcgaatcccccttatacctttttagacgttttttactttatttttatttttaacacagaacacattaaaacaagaacaatacacgatcaaaagattcatagaaactattctcatcggaaaaccagattatttttttgttttgaatcgctgaaagtgtgatgagatgtagagaaacaccaagccatgatcctaatttatatccagattgtttgaatcttcagatattgattactctctagaagaaaatcccactgttctcagatctatatccagatgaagaaccataaacataaccaaaatctctttatgagatcaaaaaccatctcaaatctaaaaaagttaaaaaattgtttcgtctgcgttgaagaatgatggtcgtcgtgaggagagagagagagagagagagtcaaattaagaaagaaaaaataaggtagagggtgggtttgatctagagaatattcaagccatacataactactacactaagacaatatatacgtaactattagaaaaacaattgcatataaatagtaaaaaccatcgaattaagttttcactacagttaacgattccgttaccatagttaacggctgttaactcggattttttattttaccaaaattaataaaaaatgaagatttttaaaggaaataaaattaacttaagtattttttgggtaaatttaataaagtaggtattaaacggaaaaataaaaattaaatgaggattttttggggttttttccataccatatataaaaacaaatttgttaattttccttttggttaagaaaaataaaatgtaatattttttagatatagacatatgaattagtatatgttaataataatttattttttagtatttctatttctttaagaagaaaaaagttaattgatttctttttagtatttctatttctttaagaagaaaaaagttaattattttctgacacgtgtcaacatctgatcgatagacttgacacgtggcataatcttatgagttagtaactttgaaaaccatactttatataataagattctattttattttatgttttacctttttactagtaaacataaattattattttaatattttagaagcacttttattcagattattttattatgctatgttatatatatatatactagaggagttacccgcgcccttgcgcggccaaaaattttctctcaaataaatttttaattttcattgatagaacatagctatgagatttggaaattcttcataatattacaaaagatcaaacaaactgcctaaaacaaagtatttaaacattctttaaaacccataacaacataatactcatcgatcatttttgtagaaaattttattatctgtagaaaattttaggaaatgtagcataatgaggcacttttaaagaaagtttttacgtttgaggcactttataaggagagggcactttttgtgttgtttgtgttttttttggacttatatccctgggatgaaataaacgctaaccaaaagtcagttatcaaattgtctttaaccgaacacttgaaaacaaaccaattaagttatatggggtttcatatcgatcgttggattaaaatctactataattaagatgaagttatcagatctaagaatagtcgctctctacaaagagcaatttctttctctctccaacacgacaatggcgagagccaagaaggtgttaattctcactatactaatcaaattctcctattaacgttctcaatttttcattttctttctcccttgcctttgcattatctagatctaaagagcacggagtcgttgatgacgacaaattgatgacgagtttgttcttctaatggccttctctctcttcctcgtcggtcctagttgctcacctgaagtaagattcacgtcagttatggtcagatcttagagccagtgcagattcacgatgagtcatcgatggataacgaacgcaaatccagaaaaaaatcggtgaataaacgatctaaagcggcgataaaatgcttctccggtgactcactgaaggtgacggaaatttcgaaaaagtggtgatgatagtctaaggaaagtggatctgtgaataaaactaaagattggacttgcgcaagatatcaatatttgaagaagcagtttcttaagcatctagctagtaagcttgggagatggaaaacaatggctttggaattcgtaggaaggtacaagacatagaatgtgattaagaaggcgaaagagattggtggaagaaaatcaacgagagtgattctatcttggtaaattgatgctttgttggacatctaaactaagagaattagactttgtagatgatagtcaatttcctagtgttatatatattatacttgtaagagattgttcttgggttttggagttttgttgttttagctttgtcgttcctatgcaagaaaatgatggatgagactcacagatattgctttgaaagaggaagtgatgatcaacaattctgatattactgttactccaaccctcttgggattaaccagttctttatctaggtgtgtagcctaaactccttttatatatcaaatgctaaactctgtgttcataatttcacattagtgttataaacttcacattagttacatggctgccaatatcattaccacacaactctgttttgtttttttactctacatgtctcttctcattaaaaatgagctttaaaagataaggtaatgattgtttaattagcttatcttgttttaaaaaataagagtaatggtctacttaaatctgcttatgttaacagaatattgtatcattttttcatgtgttttggtaactttcttttgttttctatgaacaaatgcttatggtcaaatggacaagtgtttatggttgaatcttaatggataatctgaaagtgtttatatcccttaatccattgtggtgatgatggtgtccaaagcctgcaacaagtcttgatgattcaaataaatgtaaaactagatgaactccaaatccttatccactaaatttgaaaccgtaaaacaaaactctaaaccatatagtatatcataaccataaaaaatgataattttacagagcgataaaacacattgacagtagatcaaagacataggtgtccattaatgattgtccaagcggtctaatccatatttaatgattcaccaggtagtatatcatatcaatacacaagtttatacatgaatgataattgtcaattcaaagtacatcgttcatttttctttgaccatttattcatttgtgtatggacacttccatcattatatagtattagtcattctttcttaagaagtatctaaatgaaaattacatggcttttataaagatttaaaaactcgcaaaaatggagtgacaaataaacagattttgaaaaatggtttcatgtacctatataaaaccaataatcaataagttggtttctattaaagttttataatttgcaatatatggagtgataaatgaataaatttgagaaatggttccatatcttcgacgtatatacgaccaataatcaacaatttggccagatcttcaaaatcttacaaaaaccgtctacttaatctataattcatgcaaacaaaaggtatggttgtccattagttattgtccaaatgttataatccaaacgttacagtccatgtgttcatcttctttccgatagatgacctcaattactgaatttcaaacaaatggggcaaatagttcttgaactttatcacagaattatgaaaaagatctccaaacacttgtaagctttttgtatcaaaactaaagagagaaatgtatcccatttaaacaatatatgtgtctaaattgacgctagtactctccactagcaaaatcaaactctggcttaatcgttcaaagctataagattaagcgactataacatccactctcgacaatgaaacagaaatcgagataagaagaaatcaaaaagtttacgacaaaagtaacccaaacgtttgcaacatttcacaacaaaagtaaatcaaactccaaaactaaaactcgaatatgtaattgtttggtgattggttagtcaagtttgatgccattgcactcgaaaatccagccctaccacaaaacaagtaatcatagtaaatatctgagagttatcagaagaatagataaccaccgacttaaatgtcacaatactagtcaacaaactaaccagttgaatgagacctccgaaattgaagcaagtgcaactccaccaacaattggtacaatggcactgagtacatatggagtaggtttctaaaaaaggttaataaacaaattatgcttacacaaatcaaacaaaagcgatgactaatatagactatcattaacatgccgttagaaacaagaatcaaatagcaacttagtccagacaggaacatttggagacatgtttagatcgcttgaagaagcggcggttataggatggtggcggagagagagccgccgttgttgtaggagagggatcaacggagagaggggaaatacggcggagctttgcatcgtttagatctgaaatcaaaagttgttggtgagagtggagaacgaggaagaaggcgtttttagaataaagatccggagtcgagaaactgtaatttaagattttttattggatttatatttcttatagaattatgaaaataaactttgatggtaactgtaaagtcgccgtgtacgtaaaccaaatttggtttagggaatacgaatttggtttgatttatagataaaaaacagttttagggtataatggtaactttgattggacaaagtgccttgtctttttaaagtgttgtatcacgttaatggttttgaaaaagtgcctcagaggacaaatatctcaaaattttattatccctcaatcatcggaaccagaacatcttgaattcgtagcagcccaaacataagaggtggagtgtactatatatataggtcattaccggttttctatttcctcaagttcgtaaaactccgggtcaaaataaaatctagagcatccaactcttgatcatctgagtgaaatcatcgaaaaaaataaaaaatttccaacatttatttttcatttagataaatatatctacaaaaacgatgtcatataaacctgcaatttatatatatgcattcttcgagaccaaatctttaagatcaaagactaattctaccacattattcaaatataccataaacgacatcaaaagacaaaaaaggtttgtaaacgaatttgtaatttcaatgagatcaaaattgaagaaatacaaaataatacaataacctttaaagttataatgcaaatgttgaattttagggagatcagctgacctcatttaatcttttttttggtctgcctatgcggcagacccataaatacattttacataatcaaaatataacttaacataataagtaattaaaaacttaaaaaatcttcatttcattaaaaataccaaaatatgtatggttgaaccaacttaaaaacatgtaagtaataaagtcaaaacacaaagtaagaaaaacacgataaaacttaaaaaatttacatgggaacttgtaattttaaaagggtaaaaaaaaatataaataatatcatgaattttacaggggtataatacaaatataaaattttaggaggaccagatgacctcctttaatcttctttggatctgcctatgttgtggatccaaaaatactttttacatgatcaaaatataactttaaataataagtaattaaaaaaaatttaaaaaactaaaaaaaatcttcatttcttttaaaaatactaaaatttgttcaatgtttatgagtgaatcaaacaaaaaaatttaaaacatgaaagaaaagtgtcaaaacataaggtagaagaaaaacaagataaaacttcgaaggtttacatacgaatttgtaattttaaaagggtaaacaaaagaaatataagtaatatcataaattttaaagctacaatgcaaatatgcattaagagttttatcttaggatttttatttttatttacaatttaaaattcaaataatctttagacgttaccgccacaaatacttccatgagagcaaaccagtctagtgtgcactttctcatcttgtttcaatgtagtttttccatctttagtcttcacaataggagaatcccattttagatttgttgtagtccatgcatgctctctaaggccacaaatgagtgctcgcatcttcaccttccagtgactatagttagctttttcaagaatgattggacgttatacaattatattttttttgggttagtctatcctttctgcaagatcttcatctgttgttaagagacaatttggttaagatgctcgttctgataccaaatgaaattcctcataaactcaagttcagttccccaaaattcaacaacaatgagcttatacatttgttagaaatcttataaagaacttgcaactctcttaattggttttacataaagcttaaactagttcaacttgtcacctgagatttcctacatacaagaacacgatctcttatcttctggtgcgctaaaacatagtaaaccttactctcttaaaataaaaaagcttatatattacttagcacccctttatattcatgagacctctaaaccttaaaccctagcccctacacccaaattagtgattccattagtctaaatgtataatactaaaccctaacatatttttaacttcgtctaattatacaacactataacctaactcctattttttaaacccaaccttatatttagcttggtctaaatgtaaattactataccctaacccctaacaaataaacacaaacaatgtactccatctgttcctttttaattgattttttagaaaaacacacaaattaagaaaatatattaaaactgattattaatgtattaatttttatgatttacaatttctataattctataccaatgaaattcaattatttgtcttgaagtttaaaaattcatcaataagaactaataaatagtttatagaaaaacaaaagaatcaacctttttcaaacaattttgttttctaaaagatcaagtaattaggaacagatggagtagttaaagtcataaatcattttaaatgtaatctaatgaggtttcccattgcccaaccacttagaaaggacaatttctcgacatttgatggcatatatgtagaatatgtgaaatctacttgtgaacttcttgttgattccgtttgtacgaattaagatagatcaaagtgagtttatccatctcgttcgtcttctactatcatattgtgaagtattatacacgctcgcgtaatgtatcctatttttaccttatcccaaataagagctggattttttacaatggcaaatcgagcttgcaaaactccaaaagcacgctcgacatctttacggcaagcttattgagttgttgcaaataaagatgctttccgagtttgcggaactagaatagattggataaaagtagcccatttagggtcaatttcatctgtgagatagtaacccaaatgatactcgttccccttgactaaataattcacagttggagctcgacctcgtaagatatcatcaaaaacaggagaacaatcaagaatattgattcgtttaaggtacttagaggtccaaaaaatgtgtgccacatccaaagatcttgagaagctacagcctctaaaacgatcattggttttccagatccacgtgcacattgtcctttctaagcggttgggcaattattccactctcaatgcatacagtcgatgctttccatcatcccgggaaaacctcgaatctctccaatcatgtgtaaccaatcaatatcttgagcagtcggttttcgtaggtactcatctctggaaaaaaaaactatcgcttcaacaaaattatggatgcatgatagtgaggggtttcaccaatatggaggtattcgtcaaccgcatcagccgcacaaccatatgtcagtatacgaattgatgttgtagtcttctatagtgtagagaattctaaccttccggttgcagctcttctctgttgaaagaatgaaatttcattgaaaaatctatcaacaatacacatgaacaaaggcttgttcactcaaaaacgacgttgaaattgattagtagagaaagctgcattgtcattaaaataatgtttcataacttgatgtgtcattcttcacgatgtgtttcaatatacttttgttttttccttggtttggttgatgcttgacattcatcatatgaataaattttatttttaaatgcttcatcaaagagattatcaaattctttgttcaatttttcatgaaaattatcacgagaagaagacgctatcttggtttagaagaaatgatggagtataataaaaagtatgagaagagaaatttgggcttttggtataaaattttggtacaataaaaatttacgagaatgattacaatgataagtttagcatggagaatgtttgaagaatattaagacatcatgagaagtggtgtgcatcactgcctactaaagtgattgtcattagtaaaaaaaaaaaggctgaggcaaatgcgtgtccaatctggtgtaaagcttgacgatcaccatggaaaggctgaagctcatccacctggtgtgaagaccgccaagtgtaaaggtaaaataaaggttaacacaattcagcagcaatggaaggagatgagaagccaatagagagattccaaagtatgtggaaaataaagaaaaaaatatttggctttgaaagacaagctcatcaaaaaaaaaaaatgctaaacaaccttctaggaaaacaacctcttagtgaaatagaggaagagttgaagaacaagctaattagagacttgttgtcaagctaattagcttttgtttctgttttcagtttatgttccacttatctctgcttgtttaagtttatgttacacttatctctacttgtttctgcttggttataactttaatttttttgtaatgagtttgtgtcattgtgtttatgtaatgaaaagttatgatttgtgtttccgtttatgtcaaacacatccgcgcgtttcagtttgtgtcaaacattgtgatacatgtctttgaaagtttatgtctttgtgttggtgcaatggatcaagaagtagccacaagtggtggacgaaacagacacaagtggtggaagaaacagagaaaagtggtgaaacaaacagacatatagagctgtcaattgggtgggaggcctgtgagtttgcgcagtctaaatagacatgggcagactatggtccatatcaaaaaaataaatagtctaattgagcatagaaataattttgtccgtgaataatatgggcttgaccatatggacagtgggcatcccaattataggaattgacatattttcattttattcatatttcttataattttaattacagttacaagtaaataattttcaaattatataattttacatttataattatttttaaaaaaattatatattattttttattaattatttacaattttgaaagaaagatggtagttcaaaatatttggaaaacgcgactttatggttttggcagaaaaacgcaactctgtagttttcaccaaaattgtgattttattatattggcgagaacacaattttacagttttggcggaaaacacaactttcagattttacgattttggcggaaaaacacgattctccgattttaaggttttggcaggaaaacggaaattccacgctaaaatcgttttttcgttgtattggcggaaaaaaataattttacgattttacggtttttggcggaaaaaggtaattctctaatttttctgctaaaattgtgattttattgtattggtcagaaaattacatttaaccgttttggcggaaaaacgcaattctctaatttaacgttttttcagaaaaatgaaattcatctattttctctaaaattatggtttttgtttttttcatattgaaataaaaaaaatgggacaaccatggatttaccatttgaacttggtgtttattgggcattgacattttttggaccgttgtccattaaggaccgcccaatatcagtcggaaaaaaaaatgtccgcatggacacgcccaatagtctatggacggaccattttgacagctctacagacacaaataggcacgagactacagtgaaaaccgagcaaaccgaaccgaacaaaccgatattttcggattttgaaccgatgatatttgaaatgggtttcggtttttgggtcaattcggttaggcaatccataaccgagcggtttcttcgtttctcttctaatcatcatgttttcaccataacccctatgaagataccctctgcaactacgatagcagaaacaggatgatggagaatctccattgaaaatgttagaatgttagatacgacaacgataaattttttaactaaaacgctaggtttgttgcatttgatgtttctgctaatatggacttgtttgataaaaaaaatatgtgtttgaaaatcacggcccacaaaatcaaaacccttatcctattattaattattcgcggcccacaaaattaaaacctttatcctattattattcatttattcctgtaacatattttcttctccatcgttggtttctcattttctttccatctcatccaataatatttatttctcaaatcaaataaaatctttgaggcttggtttcttgtcaagtagagagagagggtggatcattcgattcttcttgtttcaatcatgaggcttgatttcttgtagctttttgttgtaattatcttctcatctttcttcttttgatatctccattttcaatctcacttctagtcctctacctttttttctttttccagtttccaattggttttactaggcctcttttctggattttaaggtcaaatattgcccatggaagaggctgattttgaagaaaaagatcctaggttaaacgaatacatcaaaaaaattaatttcggtctattacgaaactgatttaaaagccaataaccgaaccgaaaaaaccaagtaccgaaccaaaattttgttcggttcaattcggcagaatttgttataaccgaagaaaccaaaaaaccgaataaattaaaccaattaaaccgactaaaccgaatgtccaggtctagacacaaatggtggaagtagacaaagcaaagttgaaattagaagacaagcataggcatctctttttaaaactatgtcaaccacatattttacttttttttttgctttgctatataatttgtaatgtagaacacaagcatactcattcttctcttgttcttgtatcgttttttttcttcttttcttaccaataaaacgcaacaggcaatattgaacgcaacagccaaaacacattatttcttacctcttctcatacttcagcaaaacaaattttatacgaaaagcccaaattttacttctcatacttttttttattatacttcatcatttcttctaaactaagatgacgtcttcttctcgtgataattttcatgaagagttggatgaataatttgataatctttttgatgaagcatttgaaaataaattttatttatatggtgactgtcaagaaccaaccaaaccaaggaaaaatgagagtatgttgaaagagattgtgaagaaggacacatcaagttatggaacgattattttagtgaaaatacaactttgtctattaattaattttgatgacgttttctaacgaataagtccttgtttacgcgtattgcatcactccaatgaaatttcattctttcaacacagaagatatgcaactggaaggttagggttctctacactatataaggctacaacatcaatttgtatgctggaatatggtcgtgcggctgatgtggttgatgaatacctccgtattggtgaaaacacttcactttcttgcatgcataattttgttgaagcaatagttatttcgttcggagatgagtacctacaaaaactcgaaaatatttttatttgcaaccactcaagaaacttgccgtaaagatgtcgtgcatgtataatacttcacaatatgatagtagaagacaaacgagatgggtacacttactttgatgtatctcaattcgaacaaccggaatcaacaagaatttcacaagtagatttcacatattctacatataatctttcaaatctcaagaatatgttggatactcgaactcaaattcgtgatcgaaatgcacatcaacaactgaaatctgatcttgttgaatatatatggaataaatttagcaaaaattaatataattaaaagaaataaatagtttaactatatgttttcatgtttgtttttaaaaaaattatgtcatctatgtatcaaattttatgaattcaatcatcaataaattttctaaaattaagtttttatatattttatttttatattactttctattttaaaaactcgaacttcaaaactttgccaaaaaattaaaaacttatcaaaattcttaacaaaaaaatgtcaaaactttattcattaaatatagttaagaaccttgactaatatctcatcattgaggatggtctaaatgaactaagttgattttttttataaaccacaaacatacatatttacatttttaatatataaaattttttaaattaaaaaattaggattaaattaaatcactatagtgtaattgagttactttctcatcatgtatactttagattatctttaaaagttagtttttgaaatatttaatttcatccttccccacaatcacaaaggtttcgaatggagaaagcgagtcaaacatatcaagcggaacaagagcggatcaagcggttttatcgaaacaagtgcggatcaagcagttctggcggttcaaataaatgtttgaatggtgaaagcgaatcaaatattacagatcatattatacaatctttgattatgattttattttcaaatatatttattgtgataactattaaaatgttttatttttttttaattcaaatacaacatcaaaaaaataatttctagtatttaattttttccataatatatttgcaatatgttctctcatattggtcataagaccgccatcaactatctttgtagcttcgatattccctaaactagttcaaaattcgggtcctccatctttatctcccccattacctctgcaaaatcttcatctgaaaattttaaaatctgagaaaattaggtagtcctattgtagtcattactatttttttttgcacatgagtattatatataagaaattcataaagaatccttctttttttttcgaaactccaaatatcctcctaataagagaacgtaaagatgcatgacatcgattaaacagttcctgtttattcctaggaggagaaccattttctaaattgtgacatatgataccgaacaaccttatttcgtgaagatctatatggagcaagattttttttttgttcggatagcctgaatcaactacataatatttttctattagaggcaaaagaaattcagaatcactatcttgtgcgactatgagaactgatgtatcctgacaagatcatggtgctgcattccaaacaaatgtgaacaacatatttaaatcacatattgccatgacgttgaatgataatctactatgtcgatcccaatacattccttttaatttgggttgaatcttaacgcaaacatgaactccatccattgcttcaacaaatccactaaaatatggccaatatctctgatctacttgcaatcgttcaggaattcggagtagttcttgtcttgttggagtcttgatataatcacaagcaagtaactcattcgctataaggacctcaaaatatttcttcttcattgtctcttggtttcgtccaaatcgcattccaacatgtctttgaacttcattgtgaccacatatccgtaaaaataaccaaaacagtggttagggtttagaattttttcatgaaaagaaaaaagacaaagaaggggcatcgaactcgtcaccatgattatgcatggggcacttccttgccagttgagctagatgactattcaatatcttttaaattaattttaataatcagtgtagggcacatgccctacttgctatgagtatagagccgccactgataatgttctgaaggaactaagacacattcataataattatagacaagcagcatcatcttcttgcagacgacgctaaatgttgtgtcatccccaaaccaccatctgtttgggctggtgctctttgaaaatattaattgtattaattaaatgttggttgaattattaattcttcaaaattctcatttttcaaattctacagctttattctttccttgtcgctaagaaattggactcctcgtacttgcaattggcatatacgaaacctataatttgtaagcaaaaattaaaaaaatatcgattaaaataaaactaaatagcgaatattacaatatacgtaacagacattaaaaaaaaaacataaaattatcgcttataataaaatacatgcctcataattaatcttcatcttccaaaatattttgatgagtttcatttaaattaggtgcccgtttccttctccaaatattgaataatccccctggtttttgtgttcatcgtatttggtgcggtttcatcttcagttcctagtgaaaatctacgttgaacatttaccagaggaacctattgtgaagaatttggtgaatttttcattgtgaaacatttgatgatgagcaccatagttgatatgtattctactgtggagcaaatggtggtgagttccattgtggaccatttgatggtgaactccaatttggatcatttgatgatgaaccccattctccattctgaaacatttggtgatgaacccaattgcagaacatttgatggtgaactccatcgtggagcagttgatgatgaacctcactgcagaccatttgacagtcaatcagagcagttgatgatgaaccccactgcggaccatttgatggtgaactccaatttgcattatttgatgatgaatcccatttctaagcatttggtgatatgctcaattgttgaacacttggtgatgaactccattgtggcccatttgaaagagtacccattctgcagcacttggtgaagtaccccattatggagcatttggggatgtatcccacgaattaccatcaacataaggattcatgtaaggaaaaccgccagacattggactaccataaggaaaacaaccagaacttggactctcaaaatgatgacctgtgttgaattc

SEQ ID NO: 79 - DNA, 95190 bp, Arabidopsis thaliana
aagcttgacgatcaccatggaaaggctgaagctcatccacctggtgtgaagaccgccaagtgtaaaggtaaaataaaggttaacacaattcagcagcaatggaaggagatgagaagccaatagagagattccaaagtatgtggaaaataaagaaaaaaatatttggctttgaaagacaagctcatcaaaaaaaaaaaatgctaaacaaccttctaggaaaacaacctcttagtgaaatagaggaagagttgaagaacaagctaattagagacttgttgtcaagctaattagcttttgtttctgttttcagtttatgttccacttatctctgcttgtttaagtttatgttacacttatctctacttgtttctgcttggttataactttaatttttttgtaatgagtttgtgtcattgtgtttatgtaatgaaaagttatgatttgtgtttccgtttatgtcaaacacatccgcgcgtttcagtttgtgtcaaacattgtgatacatgtctttgaaagtttatgtctttgtgttggtgcaatggatcaagaagtagccacaagtggtggacgaaacagacacaagtggtggaagaaacagagaaaagtggtgaaacaaacagacatatagagctgtcaattgggtgggaggcctgtgagtttgcgcagtctaaatagacatgggcagactatggtccatatcaaaaaaataaatagtctaattgagcatagaaataattttgtccgtgaataatatgggcttgaccatatggacagtgggcatcccaattataggaattgacatattttcattttattcatatttcttataattttaattacagttacaagtaaataattttcaaattatataattttacatttataattatttttaaaaaaattatatattattttttattaattatttacaattttgaaagaaagatggtagttcaaaatatttggaaaacgcgactttatggttttggcagaaaaacgcaactctgtagttttcaccaaaattgtgattttattatattggcgagaacacaattttacagttttggcggaaaacacaactttcagattttacgattttggcggaaaaacacgattctccgattttaaggttttggcaggaaaacggaaattccacgctaaaatcgttttttcgttgtattggcggaaaaaaataattttacgattttacggtttttggcggaaaaaggtaattctctaatttttctgctaaaattgtgattttattgtattggtcagaaaattacatttaaccgttttggcggaaaaacgcaattctctaatttaacgttttttcagaaaaatgaaattcatctattttctctaaaattatggtttttgtttttttcatattgaaataaaaaaaatgggacaaccatggatttaccatttgaacttggtgtttattgggcattgacattttttggaccgttgtccattaaggaccgcccaatatcagtcggaaaaaaaaatgtccgcatggacacgcccaatagtctatggacggaccattttgacagctctacagacacaaataggcacgagactacagtgaaaaccgagcaaaccgaaccgaacaaaccgatattttcggattttgaaccgatgatatttgaaatgggtttcggtttttgggtcaattcggttaggcaatccataaccgagcggtttcttcgtttctcttctaatcatcatgttttcaccataacccctatgaagataccctctgcaactacgatagcagaaacaggatgatggagaatctccattgaaaatgttagaatgttagatacgacaacgataaattttttaactaaaacgctaggtttgttgcatttgatgtttctgctaatatggacttgtttgataaaaaaaatatgtgtttgaaaatcacggcccacaaaatcaaaacccttatcctattattaattattcgcggcccacaaaattaaaacctttatcctattattattcatttattcctgtaacatattttcttctccatcgttggtttctcattttctttccatctcatccaataatatttatttctcaaatcaaataaaatctttgaggcttggtttcttgtcaagtagagagagagggtggatcattcgattcttcttgtttcaatcatgaggcttgatttcttgtagctttttgttgtaattatcttctcatctttcttcttttgatatctccattttcaatctcacttctagtcctctacctttttttctttttccagtttccaattggttttactaggcctcttttctggattttaaggtcaaatattgcccatggaagaggctgattttgaagaaaaagatcctaggttaaacgaatacatcaaaaaaattaatttcggtctattacgaaactgatttaaaagccaataaccgaaccgaaaaaaccaagtaccgaaccaaaattttgttcggttcaattcggcagaatttgttataaccgaagaaaccaaaaaaccgaataaattaaaccaattaaaccgactaaaccgaatgtccaggtctagacacaaatggtggaagtagacaaagcaaagttgaaattagaagacaagcataggcatctctttttaaaactatgtcaaccacatattttacttttttttttgctttgctatataatttgtaatgtagaacacaagcatactcattcttctcttgttcttgtatcgttttttttcttcttttcttaccaataaaacgcaacaggcaatattgaacgcaacagccaaaacacattatttcttacctcttctcatacttcagcaaaacaaattttatacgaaaagcccaaattttacttctcatacttttttttattatacttcatcatttcttctaaactaagatgacgtcttcttctcgtgataattttcatgaagagttggatgaataatttgataatctttttgatgaagcatttgaaaataaattttatttatatggtgactgtcaagaaccaaccaaaccaaggaaaaatgagagtatgttgaaagagattgtgaagaaggacacatcaagttatggaacgattattttagtgaaaatacaactttgtctattaattaattttgatgacgttttctaacgaataagtccttgtttacgcgtattgcatcactccaatgaaatttcattctttcaacacagaagatatgcaactggaaggttagggttctctacactatataaggctacaacatcaatttgtatgctggaatatggtcgtgcggctgatgtggttgatgaatacctccgtattggtgaaaacacttcactttcttgcatgcataattttgttgaagcaatagttatttcgttcggagatgagtacctacaaaaactcgaaaatatttttatttgcaaccactcaagaaacttgccgtaaagatgtcgtgcatgtataatacttcacaatatgatagtagaagacaaacgagatgggtacacttactttgatgtatctcaattcgaacaaccggaatcaacaagaatttcacaagtagatttcacatattctacatataatctttcaaatctcaagaatatgttggatactcgaactcaaattcgtgatcgaaatgcacatcaacaactgaaatctgatcttgttgaatatatatggaataaatttagcaaaaattaatataattaaaagaaataaatagtttaactatatgttttcatgtttgtttttaaaaaaattatgtcatctatgtatcaaattttatgaattcaatcatcaataaattttctaaaattaagtttttatatattttatttttatattactttctattttaaaaactcgaacttcaaaactttgccaaaaaattaaaaacttatcaaaattcttaacaaaaaaatgtcaaaactttattcattaaatatagttaagaaccttgactaatatctcatcattgaggatggtctaaatgaactaagttgattttttttataaaccacaaacatacatatttacatttttaatatataaaattttttaaattaaaaaattaggattaaattaaatcactatagtgtaattgagttactttctcatcatgtatactttagattatctttaaaagttagtttttgaaatatttaatttcatccttccccacaatcacaaaggtttcgaatggagaaagcgagtcaaacatatcaagcggaacaagagcggatcaagcggttttatcgaaacaagtgcggatcaagcagttctggcggttcaaataaatgtttgaatggtgaaagcgaatcaaatattacagatcatattatacaatctttgattatgattttattttcaaatatatttattgtgataactattaaaatgttttatttttttttaattcaaatacaacatcaaaaaaataatttctagtatttaattttttccataatatatttgcaatatgttctctcatattggtcataagaccgccatcaactatctttgtagcttcgatattccctaaactagttcaaaattcgggtcctccatctttatctcccccattacctctgcaaaatcttcatctgaaaattttaaaatctgagaaaattaggtagtcctattgtagtcattactatttttttttgcacatgagtattatatataagaaattcataaagaatccttctttttttttcgaaactccaaatatcctcctaataagagaacgtaaagatgcatgacatcgattaaacagttcctgtttattcctaggaggagaaccattttctaaattgtgacatatgataccgaacaaccttatttcgtgaagatctatatggagcaagattttttttttgttcggatagcctgaatcaactacataatatttttctattagaggcaaaagaaattcagaatcactatcttgtgcgactatgagaactgatgtatcctgacaagatcatggtgctgcattccaaacaaatgtgaacaacatatttaaatcacatattgccatgacgttgaatgataatctactatgtcgatcccaatacattccttttaatttgggttgaatcttaacgcaaacatgaactccatccattgcttcaacaaatccactaaaatatggccaatatctctgatctacttgcaatcgttcaggaattcggagtagttcttgtcttgttggagtcttgatataatcacaagcaagtaactcattcgctataaggacctcaaaatatttcttcttcattgtctcttggtttcgtccaaatcgcattccaacatgtctttgaacttcattgtgaccacatatccgtaaaaataaccaaaacagtggttagggtttagaattttttcatgaaaagaaaaaagacaaagaaggggcatcgaactcgtcaccatgattatgcatggggcacttccttgccagttgagctagatgactattcaatatcttttaaattaattttaataatcagtgtagggcacatgccctacttgctatgagtatagagccgccactgataatgttctgaaggaactaagacacattcataataattatagacaagcagcatcatcttcttgcagacgacgctaaatgttgtgtcatccccaaaccaccatctgtttgggctggtgctctttgaaaatattaattgtattaattaaatgttggttgaattattaattcttcaaaattctcatttttcaaattctacagctttattctttccttgtcgctaagaaattggactcctcgtacttgcaattggcatatacgaaacctataatttgtaagcaaaaattaaaaaaatatcgattaaaataaaactaaatagcgaatattacaatatacgtaacagacattaaaaaaaaaacataaaattatcgcttataataaaatacatgcctcataattaatcttcatcttccaaaatattttgatgagtttcatttaaattaggtgcccgtttccttctccaaatattgaataatccccctggtttttgtgttcatcgtatttggtgcggtttcatcttcagttcctagtgaaaatctacgttgaacatttaccagaggaacctattgtgaagaatttggtgaatttttcattgtgaaacatttgatgatgagcaccatagttgatatgtattctactgtggagcaaatggtggtgagttccattgtggaccatttgatggtgaactccaatttggatcatttgatgatgaaccccattctccattctgaaacatttggtgatgaacccaattgcagaacatttgatggtgaactccatcgtggagcagttgatgatgaacctcactgcagaccatttgacagtcaatcagagcagttgatgatgaaccccactgcggaccatttgatggtgaactccaatttgcattatttgatgatgaatcccatttctaagcatttggtgatatgctcaattgttgaacacttggtgatgaactccattgtggcccatttgaaagagtacccattctgcagcacttggtgaagtaccccattatggagcatttggggatgtatcccacgaattaccatcaacataaggattcatgtaaggaaaaccgccagacattggactaccataaggaaaacaaccagaacttggactctcaaaatgatgacctgtgttgaattctttctgacaagttcatcatcgcgtgtatatcttaatagagttggtaaaaactgtattttatcttcgtaaggtttgtcagctctagcaataaaatacttacgccaaaatttgtcttctttaaattccttaatgaatgaccaataagattatgttggatggaaaatccatttcttcaaatatcttcacagctagatcacactcgtcgaaatccttttggtcgaatgaagttgggcgtaaactttggcgttgaaactcacaaaaaccagtcatcatatctgttagcgttctctcaaaagattgctttctttgacttccttgtgaaacacttgcaatgtcacacatgaatatcccacaagtctttgtaaagtacttccacgtcttccacaacctcgttgtgaactctttaagcaaaaatctggattggataaaactgatggagaattttggcgagtatattcgttgatgatctcatttgtagtgcgtgtttcatcatcaatattaacgcgatacacctcttcactttcttgtgtctttagaacttgactttcaagcatttaatcataatatgtttctgagtaagtttaccttggttattagttgtgctttcgttaataatctcttctcttcacttgtttacagagtatagagattgggattcaattttatataatctgaaacaacgttgcatcacatcccaaagttttggcgattttcgttgaaaggaatgtataatcttacatacatgttattgaaaaaaaaatgaaatacatattctgaacataaaatttagtaatcatatttaggtagtgagagatatcctaaatacttatttctttctctctccactatgaattacttgtatttatttgatatgtgataggataaatcttgatacttgtgttatccctgagttgtaaatacttcttgtatttttgttttcaactggtcaagattttctttgaagaaacgatagtttatattgagattaaatttcttattaaaattttcaaccaaaaactctttaccaaggggtgtaggatcttttaaaaggtaattattcatggaaattgcttaatcatataactcaagaaatattctttctcggctaggttctatttgaaattatctcgactctacaagttttttttcagtgagtttatttaataaaaaaagcttacttattcttgttagattttctaaaaattctcttctttattctttcaataattgaatttgatttcatagacaattaatgttaaggatacattttagagatttattaccatgtaattctcgtgatgatatataataatttacgcactaatggtttcacttttctctctaattaaagatcttgtgaatcttttctattttgcctaatacttttgtttttattatttaaaagataatataaaatcttaaccccacaaaaaaaaacatttaccaagaaaaaaaagtaattaaatattaatattttagagagagaaaatggacctagagaatctctctatgcataaaaaaaattttttggatagccgttactgaaagacaaatccttttcagtctctcctctttctcttgacaaggcgatttcaagtctttctctcataaattaggactttttgcgattgaaaaaactcttctccgttcgatttatagtttaagatagttatgtagtttagtatctcgtggttttcttctatattctcgttagttgtggctgttatttagggttttaggttttgtccatttctgaaggaattatgacagagtctattgatttgaatcgattagagtccgagtctgataacaacaccgacgacgttactcctatttttgcaattgatgactctgcaaaagggtatttttctcttgttcgttccttaattatattgtgtggtttggtgtatatttgttgcaacttgatgaatttgggggtgagttgtgtgtgattaaggtttttatgtgtgatgattaagattaatggaaataaaataatgttgggaaatttgtaatatcagttttaagtatatatgtttatatgttattagggtttgatcttatgattgctttgtgatgtttgttttgtgcttaaagatacagaagagtgagtggtcctactagaagatcaactaaaggatgatggacatccgaagaggtatatatattgctcttgttcagtcttgtcttttgcaagttacataaatgtgtcactgaaatcttttttccatcatatgcaggacaaaattttgacgaatgctgtgaagaagtaccaagggaggaactgaaaaaggattggtaaataatattttgatttgttagccatcaatatttgccataaaaccaatatacactatatagtgtttttttttttctcttgtctttggtttagctgaatgccttcctcggtcggaagagaataggaggaatgatgtccaatgccaacaccgttggttaaaggttcttgatccaagcctccaaaaaggagcttggaaaaaagaggtaactacttttgcattcccttcttgatatatgctatgttacgttgtttcattaccgagtaatcatatatgtatatatatatcttaatattcaggaagataaactcttaagtgagttggttaaaaattatatatgtaattatgtatatatattcctttcgatactatttaactataataaaaaatcaaatattaatagttatttttttggtacatcaaaaaggataaaatttattatatttctattttataaatgaaacaacccgacccatttttaaaaaaaatataattaaatattcccataaatatctaattaaaccaaccaacaaaataacaattaaaccgcaagtcaaaaatactattttatgaataaataaataattcgaccaacaaaaccaagaataactaacaatcctaaccgggttccaataaccaaaaacaccaaaataaaacaaacgagttcctacatcatcctctcttccttgccatgattccacgatcacactttatctttacctgcatcaacaacacaatgagatgcgtaagtattatcataaatacttagtgaggcgatcctcccatctacgagctatacacacaagcaaatacaaaggtataatcacgaatacaatacaaacaaaccagtcattgaacaattcacccaaaacacattcaccacacctacatatcatcacacaaaacaaatcacacaacccaatcgctcagataagctcatggtcacgcactcaccttaacaaattgattctaatagcaattaaacccaggagagactctccttgcgtctgaaacagtccagaaacgtcctgcaacaagtccacaaccaaaagcaaccttgaagcaaagtggacaggaaaaaccagaaacaaaccgtctcaaagacgaaaccctaaaatacaagctaaacgttaactattcaatcgctccggtgaaatcctagctgcagacgtcacaaagctgcccacaaaatctcgtgccgatcaaaaaacagacgagaccacgatctcagtttcaatttccgctggtcctaattcgcgtctgagaaaacgtgtctcacgaaactgcgaataactcaaccaattttaatccaaatccaattctgtaaactggagaataactataaaggacttgggaataactctaccaaatttcgttaccttttaccacgatttgatatgacgaaactgatttctcccaaaccctaacgattgtgctccttctccttttctctctttttctcatttataaaacgaaaagtggctaactaaaccctaatttcgagtttccttcttttataggcacactatagggtttccaattaacccaaccaattaaaccggatgatttaaaaacaaaccctaaccgattttccggttcacgggcgttacaataaacagctaagaaaaataattaagattttggggatttgcaaactaccatttttttatactcttttgtaataataccctctaatgttgtccatttttaaaaataccattttccttaaacataatgacctaattactctcatctaataagaacatgtaattggaaactgaaaattttccaccaagtttatttttcccacaaaaaaaaaaaaattcgccaaactttttttccgccaaaacaaaaagggtttctcgccaaaattttttttaaaaatccttgtaatttttttaaaaactccttgtaaggttttttaaaaactttggtagttgttaaaaacccttgtaaatcattttaaaacctcttaaatctttataaaatctttaaaaacatatgtaaatattttaaaatctctttctaaatctttgtaaatcatttaaaaatcttttacaatagttttacaagatttacaagagttttttttagagttttaaaaggatttacaaggatttttaaacctttgtaaatccttttaaaattcttataaagtctctacaagcattttttaactcttataaacaaattgtaagttttgaaaatatttataactctttttgaaccattttaaaactcttttgaacctttacaaaagttttttaaatgattttaaaactcttgtaaatctttcaaaaatcttttaaaaactattgtaaatcctttaaaacccttgtaaagcatttaaaaatctttgaaaaattcttttaaatcctttaataatttttgaaccattttaaaacatttgtgaacctttaaaaaaggttttaaaaagatttacaagagtttttaaagggtctgcttgtaaattctttaagaatcttttaaaaacccttgtacatcttttaaaacattttaaaaccatttaaacatctcttgtaaatcttttaaaacacttttaaaatccattgtaaatcttttaagaaacttttaaaccctttaaaaatctttaaaaaacacttgtaaatcttttaaagccctttaaaatcccttgtaaatattttaaaaccttttaaaatctgttgtaaatgttttaaaacccttttaaaatcctttgtaattctttgtcgtacatgttttatatatacccttgtacatctttaaaaacatttttaaaccttttaaaaaaaatcttttaaaatctcttgtaaatcttttaaaacccgtttaaaatcccttttaaatctatttcccgccaatttgtttttttgctggtaaaatgtttttgaaaaaacaaatttggcgggaattttgtttttgaaaactttttggcggataattgtttttcgaaattttttgacgggaaaatattttgacgggaaaattttggtgggaaatttattttcgattattttgggtgaaaaaatattaatatttcattatgttaacctaaatttttttccaaataggggttaaatggtcattaaaaatttaaagagggtataaatgaaaatggcaaagagaaaatggtagaattgaaaaggagtagtgtgaaaagggcattttcagcaattattataaactttttggtaacatatatcaaattattgttttatttcatggaaagtttacattacaaaacaaaattttaatagttcataaattgtaattattaataaatatgtttgtatttcaataatttatacaaaatttgaatctataaataaattaatcaataaaattactttattttaagttaattgatatgtataaaattataatgaaatatttttaatacatacatatattatatataaactaaaaacatcccttgattttaaaaatgatatataacattcagatttttgttttgtgtaaaaagttttagtttttttgtgtaagtacgggaaagaatttttttttggtgtgtgcaaaagtttttttttccaatatattatatagtcatacatgatattaaaaataaataaataaaattgttcttgaattgtgtgttgtctctttatatatgattcaccccatttcttatgtatatgtggttcattcactttttttttgctaaaagacaaaattaaacccatgaaatgacgtttctcttgtcaatgtataacctcaaacaattaaaaagtgaatggaagctaaaagcagataaatttgtccgcattttatccttcacccattcaaggctaaaataatggaagaacataacaaaagcggatattatgcagagcaagagaaacgtttatgtgtttttcattgaagataataaaatggattttcagtgtttcattaataaaataataaaagaacagtctgcccaaaggcagttcaattttgagaagaaaacaactgatctacatgctacgatacaaaaaccactattttgttgtgtttataatttggtgtgtttttttttcttttctttctttcttaattttttttaaaatatgcaaaattgcattatttaataaaagtttacccatttcaaaattttaaaaatggcttgatcaatattatttttattaaagatgcttattagcttgtacaatattgttcaatacataaattatctagttttgttttagttttaacattttctattattatattttatctaaaacaataaaaaataataattatagcaatatcatataaatatttgtacatttagtagcaaagaaatatatgttgaagaataaggtatgctattacaatttttttaatatagtctattattattttattataaatttacaatacaaaattcaaaataaagcaaatcagatttataaaactaatataatgttcagattaaaaaggtttcaataatatatatgtttgatatatatttgatctgcaaaacgttatcgatgtcaccattcaacatatattttgaagcgttcaaaccacttgatccgcatttgtaccgctatatacgcttgatctacttttgttctacttgatccgcctgatatgtttgatacactcagcccgataagcttttttcatctagagtcaatgtttctttatgtcaccattggcgtatctatggatttatccaagaggtaaagagtctagtcttattttttaattttatttataaacaaaactataagttgtttaacatatgtattgaatagagatttaattcgattagttaattaaactatatgattaatttagtaaagttaacagaaattagcgattaaaaagggaagttaataaaaaaaagtctataaaaggtagcacagataaagttggaatctttttgcattttatatagtcaaagattttttattggataacttttccattgtttttacttttttttttctcgtataatacattagtaaattttattaatttttaagagacatttaatcgtgttctattttgttattatataaaaatactccttaatatttatgtttcggtaagatactcttccataatgagtgttggagtcggattcccccaccagcaagaccgtcagattcccccacaagcaagaccgagccaaacagttgaagactaatagtcgcgttcagtacaaaaaaattaagtatctttagcggccgaataacgctatctaatgagacaatagcggagtagaaagcgctatatatgcacccatgataataggtcgatgatttccgatagcatttttttattgttatatgttatgcaatgttatacgctttaatagcgagtatattttgttattaatcatctaataacaacgttgttttactgttacgtttactattataatagcaaccttatcttgcaatttttctacctaaatagcatttataatatgcaattaattgtttatttgtgtagcaatttttcggagtttttttttaatttttggataaattaacaaattcaataataatataaatgacatattttattatatttttatgaaaccatgatacaaaatacctatatattaccaagtaaaatacaaattaaaagatagtttcatactactcttgtacttataactttgtgaattcttcacactctttagacctccaacttttgaaacttcttctccttcatcatcaacacatgaacaagaaaaagaaaacatcatatcattggatataaagtctatgcttacttcatcacttttacaaattcgactaaccatgtaatttttaatgttgtataatatcaccgatgacgtattcttgtatcacatggatgtaaacctacatcacaacaacattcacaacatcacaaattgtttaatgtacaagaaataaataaataaatgttaagcaaagagtacagagaaattgaaattgacaagaaaagttggtttgtgtacctatgttttgtccccaaatcttcttctcctaactcctagtttaaagttctgtcacttgaaaagattttatagattataaccttaaacaaaataaacatatgcaatcgattttttcatatatttgcttacaaaagcatcaaattttggcttttattcaggactaacaatatccaatcgtccttaggaaacacatcaaacaaaaaaacataagtgacagatacaacttagctccttcgcgaatcaagtacaaaggcaagcaaaagacttccacttgataactactcccaaacaagtaacaagattaaactcgaatctgatttcacctcaacttgattcgtcaccgtgacagattcctcccttctactgtccaagagcctcagatccaacgctccgacgaaaaaattgtatccatttcccaacaatccctccctttcatctctgagaacatgaattccttcaaagatcgaaccaaagacattcttagcatcattgtggctcaattaatcgaattagaaaaataaacacacatgaaaattaacaaactcgttagaatcatggatgaaaacacaaatcagtgaactctaaatcaaaatctcaaacactaataataagtcggaaaaaacttaccaactgagatatagaaacggcgacagatctaagagacggtgacgaagacgacgcggctaaaaaagatgacacggacataggagatcccttggaaccgtcagagaattagtaattcagctccgttagagcatgagcgacgacgagatctggataaataaaattagatctgaaaaaagaaattgggagaagaaaaggaatgaagaagaagaggtgaagaagatgagaaaatagaagaattaacgaaacaattgagttggaggaagaagaggaagaggtgagtgaaatctaaagaaaactagacctaaacttcattggtaaatatttttaatgtattaaaagattttattggagcccaatttttacttaggcgggcaaatgaattatcttttccgtgtggacaatgaatatcgtttaaaatataccaatactatgaatactacgggttggaaaggtaaccgcgatttttattgtgcaggaaaagcgttattgtagtgcggtacggttcaactacggtacgtgagggaaaaatatatttgtcggataagtgcggtttgtacaaaataagtggtacagaaaaatgtttgattggtgaaaaaactatttgcggtgcagattatatatatctatatatattaataattaattaataattaattttgttttgtgttaataaataaataataagagatatttgtaaactagtaatacaaaaattgatcaaaagaaaatttttaagttttttaacatacatattgtcaaatgcattgaatattttcatcataaaaaagtacaacacgttaaaaaagtattatctattactttgatttttccataacatatttacaatattatctcttatttgcgtcatatattctccatctgttatctttgttgtttctatttcatctaaatcacgatcaaaatctttgttgtttatatttgtctctgtcagtacatctgcaaaatgtgcatctgagaagtttgaaattcttatgaaattaggtttaaccttggattgttaaaatttgatgaacagacccgtaaaagatgaatgaaaaacaattagtagaatatagctaaagtaaatataaagagagaataatatagaaagtttggtttttccttttcttaccaagtatgagaatctattatctaacggagaagagatgtttatggctacgagaaatttttttatgatagaagagtatcagggaaaagactgagagaagatatatatatatatatatatatatatggtaaaaaagtatatatatacataatgatttataacattaaaaaaatcaatagtaaataaatggttattgcccactgcagttttcggttggaccgcagggtaaggacgtgacttcactttgaaacgcggtccatgcctttttatcccttttttaaaatccacatttccattcttttttaaaataataaacacacagatttttaaaaaggtgttgaatggtgacatatgtacagttttcaataataaaaaatgaaaaatgccaaaacgctttccccattcactacctatatttctgaaaaacgttccgaacataaaaatctaaccaaccaaataaagcgtttttattttggtcaacacaatctaaaattaaagggtatgttaaccataggaaaaatgtataaaacgttatattatactgctatcaatactcaaatttcttgtagttttggggtaaaatatgtgttttccccgagctatgtcaaaacacatcgagtcatttgtctgttcaaccgcctcgggggtaagtttacaaaacgcctagggtgctaacttcaccacgtaacctgagccaattatgataacgcttcggaaaaagccaatgtcgcttcgggagatagtcagctacacgcagtcatcgtcacacccgccggataccccaaagccacctctcgaacgatcaccgaaccaagaggaagtaccctgaggaaaaacatcaggaacactagaggcaaagacttgtaaaatattgtctcgctcaaaggatcatttccagagaaaccgaatcattttcgagattttcggaaatgatatggaagaatcttcaagaataatatcaaatcaggaaatatttttgaagtccccaaaaaataaaaaatatttccttaaggcaaagatactcttgaaccgatgtaaggatatattcaaatcttccaagaatatcgctggagaggcggtttatcaactctatataacgcgactcaaatatttcgcataaaagggagacacacaaattatgccctcatcttcagacgactcaagagctctaaatttaaaggcaaacacttctcttttcataatctaatcacttgtacgatcaaacacatctttttatcaataatattaagaaaatcatccgtggttagacatcggcgttttcatgaaagagatcgtgtgctccgcgaggttttccagaacactgccgagctaaacgcataaaagttgggagctaagtaggaaggcccatacctaattttgagagtcgtctgttccggcgtctacgagctcgccaatgtaaacggcagagcagttccaagatcccggaacgccatgcaccttaggaaatactactactaacaccgaaagtgcgcatgaacttgacatacgaggtgacttgaaccctgaaatggctacgtaggcagctcatgtttggatgagttctgctactgctcccccctccccccaaacaaaaagggggggtgggggggagggggagtggggtccatatgtccatactctcacttcagtttttacatagatgttttttaagtgtcctttacttgggatgtcttaagtatctcactccttatcaatgatattcggtttgtcatattttcaagtttcaattgcaccgcctcagttacaacgcgctatacaaatattcaagataagaatttgattagaagttctccgagaaagctataaattctatcttctgaaattcaggttatacctaacaccggtgccacacctcgtttctacacactggtaaatgactgaatcggattgaatcccaaccatgagaattcttgtcactataaacccaattatcccgaatacacaggttccagccaatcaccttgggaacgaaattccttatcaaattttgactcgggaaatttgaaagacaatttatgctaaaactcgatcatttcggatatatcggcattgagccaatcacctcagctgcgaaatttattatctactattgacttgggaattttgtaagtcaagcgccactcaaaagaagaaatgtctgaaaatgcttcattatattcattcaaaatatagataaagccatataggcataagtgtttacatcaacagggaaaaaaaaaacagaaacaagaagcaaagtgccacctagggatcacacagcaggctcctcttcggaagggcacatctcatcttcgcgcaggtttgagcttgcatgatcagtaacgccaacctcatctgcaaggccctcggccgatctgttcccgaggctattgggaatcaagttaggaaaaacaggagggatcttcaactcctcttttagctctacaacgagcttgttgtatgtcgcctcggcatcatcgtattcctttttccatgccagcacttgcttcttctcctcttcaaggcttcccccgccttcaagcttggtaatcaactcattgttggctttcgcctagacaaagagcatataccggtcgctaacttgttcgaagagaagcgtcttcgcctcgactctctcagcaaaagttgccgaatgtttgatactagacaccgaatgttcttgttaggttttgatcctcaagaacactgatcgatctcactttctctcacgctcgtttgatactagacaccgagaaacttagaacggacaaaagagaattttacgagttttgattccgatttggaatcctacgtctcgccgtagatttctccagaatccactaaacttcttagctcaaaatcgagctctctctctctaaaattgttctgctcttctctctctaacctctcgattcaacaactctgaatcgtgatgatgcgaaacaaaaattaaaaagcaacttaaacagaatgaaagaagacgagaaacggataagattcttccgttagagatgaacgactgagattgagctacgtgtcgcgatctcctcagctcgacttgaaaccttctgattctcaaagagtctttcacagacttagcatatagatcacttcttttcaattctcaccttgatctttttgcactttctgtcttagtttagtattggattcctctcctgtccctgaaccaacttgttcagcctcttctccctgaataaacccactcagcttcttctccctgaataaacccactcagctgttatccggaacacaagctccaccttagttgtgagacactttgagtatcaatcttcagtacttgtatttcaccattactcaccaactctctaatgaaatgatacttaacatcaatgtgtttggttctctcgtggtaaactgcattctttgctaaagcaatcacactttgtgagtcacaatgaatgtttactgatctctgtgtgaagcctaactcattcacgagaccttttaaccacactgtttcattagtcgcatcagtcaatgccatgtattcagctttagtactcgataaagctactaccttctgcagactagatctccagcttattgtgttcccaccaaacgtgaatactactcctgaagtagaccttcttttctctttgtctgctgcataatatgaatcacaataaccttctagagcaagccctccctcattcttatagcaaagctttcgatccatagtacccacaatacacctgagtatccacttcacagcctgccagtgatcttttagaggttttctcataaacatgcatagcaacccaacagaatgagctagatctggtcttgtgcctatcatagaatacatgagactcccaactgcacttcgataggggactgttctcataacttttgactgcttttgtacttcttcatatgtagcaggtcttaacttgaaatgaattcccataggagtgttaactgacttagcttgatccattccaaaatctcttcaaacctttagtagataaccctcttgtgatatagtgagtgtaccaccttctttgtctcttatgatctccattcccagtatcttctttgcatcgcctaagtccttcatttcaaactccgagtttaataagacctttaactcacatacatgcttcttatccttagaagctatcagtatatcatctacgtacaaaagtagatatatatactctccattctgtaaacccttaaagtacacacaactatcatacttgcttctctcataactgatcttctgcatgaattcattaaacctgttattccactctcggagactatatcaacccatacaaatatctcttcagcaaacacaccctctttggatatttctcatgaacatatccctctggctgatccatgaaaatcatttcatccaagtacccatgtaagaatgccgtcttaaaatccatttgctgaagctccatatccaagtgaaaaacaattgacagtagtagacgtatggagacatattttaccacaggtgaaaaaatttcttgaaaatatattccctctttctgtgagtagccttttgttactagtctagctttaaacctcggcttttctactcctgcaatgcctgctttcctcttgaatacccacttacatccgattggtttctgtgacttgtttctttctactaatacccatgtcttgttcttgataagtgattgtatttcctcatcagcagcttctaaccatttaccactatcagaatcttgaagtgcttcttgaaagctagcaggctcaggatttcctccatcttctgttatgaggtaagcatagcctgctatctcatctaacacttcctcatccatctcataatcctttagtcttgatggtagtataacttgtcttcttggtcgatctcttgctatctgtcgagttctctgattctcttctgattctgtgtctacatgacctgtagcaaaagactatagagattcatctaaagctttctctgtagctccactttgaactgagctgtctccatctttgttggaacctgcacattcaaaactagaaactttattagtaacagaagaaagttcaagattcatacctgagaccaagttcttgatgatgtctttgtacatcacatcttctctgaacacaacattccgacttatagcacattttcttcatcaatcagccaaactctaaagccttttacaccactagggtatccaacaaacactcctttcttagccttgggatctaactttccttcttgtgagtgtacatacacaatacacccgaacctccttagaccttctaagcttggaattactgaagtccacagctcttcagggatcttgttctcgactgcagatgatggagacctattgatcagatacactgaagtcgatgctgcttcacccttaaattacttgtcaagaccactttcactgaacatgcttctaactttgttcattatggtcctgtttaatctttctgcaactccattcttctatggagtataagtacacgttctgtgccttactatttcttctttcttgtagaagccatcaaacttctgattacaggactccaatccattatcggttctcagctttttcaattttctttcactttgtgtttccaccatctttttccattcagtgaatgatgtgaacgcttcatctttggtgttaaggaagtttatccaaacttttcttgaccaatcatccgtaaatgatatgaagtactgacacttactgagactatacggtacatttgaagatccccataagtcagaatgcacataatcaagcttctctttcgtaacatgttgagctgttccaaaactggtcctacgtgttttcccaacaacgaaattctcacagaactttatcttagatattctatcgtttccaaaacaacctttcttactcaacattccatggcatgttgcccaatatgtcccattctgctgtgccataattgagtccgatcaatctctcctgaaactgccattagagattcagtagtatcagctgtgcttgtaagatatacaaggaggctctcctagtttcttccatgaagatgtttgagccttgtctaactcttaaagttccgttagtacaacttgtatccttctacttctaccgttcccatggatatgagatttcttgacatctctggtatgtatctcactcaaaggaggatgatactcgttccatcttgattagtaaacctgactttaccaatacctttaacttctaaaaacgagttattaggcatcctcacttttccagactttgcttcaaagtctatatgatactcctttcttggtgtcatgtggaaagaacactcagtatcgattatccactccccatgatctcctttactttctcctagattaacctctgaagctaccaaaccgaccaaatcttgagcatcatcctataccagtgttgtttctcctgcaccattacctttcttcttctcaagccacttataacactgcctcttgaagtgtccttcctttccacatatccaacaaaccttcttcccttctatttaccggattggtaattctcacttcccttagcctgagtctttcctcggacgtatagaccttctcctacgggtctttatccacttgaactatctcttagttccagttcttttgatatagctgcactaatcacatcatcaagcttaatgccctctcttccatacttcagcgtttccttaagcatatcacaactatcaggtaatgcacttaatatcaagattgcttgaactgcttgaacttcatcaggaacttgaatctgaagattattcaaatctgaaatcatcttttgaaattcatctacattctcttcaagcgtctttgagttttgcattctgtagttatagaccttaagttgaaggtagacacgatttggaagtgactttaccaaatacaatatgtcgagagttccccaagcctcagctgcagtctttgagttttcgatttttcttcgaaccttatcaccgacgtttatgaagatcatatccatcgccttctcatctatatcgatcctcgctcattcttcctcgatccgttgtttcttcttggctggatctgattcttcttctgctttcattggtggtaatggagcttgttccaccaaagcgtctgttaaccccattactcttgggtgagagaacattcgcgtcttccaaagagagaagccgccggatccgtcgaactgagatatcttgagcttattgttcaacatctttgattcgatctaaaaccttagcactacctggctctactaccaatttgtgagcttttgatcctcaagaacaccgatcaatctcactttctctcacactcgtttgatactagacaccgagaaacttagaatggagacaagagaattttacgagttcagattctaatttggaatcctacgtctcgtcggagatttctccggaatccactaaacttcttagctcaaaactgagctctctctctttacaattgttctactctctctctctctaacctctcgattcaaaaactctgaatcatgatgatacgaaacaaaaattacaaagcaacttaaacaaaatgaaaaaaccgagaaagataagattcttccgttagagatgaacgactgagattgagccacgtgcgcgatctcctcagctcgacttgaaaccttctgattctttgagagtctttcacagacttagcatatagatcacttctcttcaccgagacttcccgctttgtggccttgcgtgtctgagctactttgttttctcaaaacgatttctcctctctgagcatatgcttaaggtgctcaaggtcggcggcctacttatcctttctttttaaggttgtgcgcggctacctttcctgccttaatcgtatgatcgatcacgtcctcctcggccttctcctttgtcaaactcgcctcagttgccttcgctctagccacgacttaaacgcgcttagcaacggccagcttttccttggccaacttctggtatgtatctaagcaactccaaatcacagagtcgtaagctcggaccattttgttcattgaggaaaaagcctattgaaaactaaaacaaagggatgtcataacagaaattcaccctagtataattcagttcaggaacaagaagaacatgttttaccttcagaaaacatgacgatgtttcgtcgtatcgcacaacctctagaagattctctgtaggggaagaagatgccccgtacagaaggcgataaaattcaccgaggcgatcctatcctcgtaaattggcaggccttcctcctagctcttcttctttttattttttttcttcgcctcacgatctttgctcctttggcgcttcccggaagccttggcctgcgatcaaccggcaaggccatcaccatcgacgcatccgttccttcgggggtgacgatcggcaacacacctgcttcaagggcgatagttttagaaacttgacgtttctcattcgcctcggtatgacttggttcagtggccaaggaaggaggattcacaaccttgtttccctctacagaagtcgcctcaggtgcgactttttgaatttaattgtcgcctcgtgagcaactgtctacgtcccaacatccgtctcaagaagccgctttgcctcggcctcctttttcttcttctgggatttcaacccccaaagcatcaactttgtcttctgcatctcgacaaagaatctggattgatgatcagaggatgctgagctggatgaacaggaaacgccatgtgataactttatagccctcttaaccctttctcgacaaaaatgcttctgccaattgcacttctgagcagataattccttttgagcttgaatgaggtcggcaaggcagtattcaaggaacttgaaggtacgatctgtagaaaataaataaaatagggttagtattaagagtaggaggctcggtgacaaaccatctaccaagtattccccatctcgacatgattttcccgagaaggtcctcatgaagagaagagtcgtcgggggccacaaataagaagtggtcaatatatggctcattcttggcaagcgaggcgtagtacctatcaatcggactcggagttcagtgaatctctaagtagttcttcaggtgcccgagcataacatttgtctttgtttcatagctccgcacaataatccccatacaatgccttagggcgcgcataggaaactgagaaagggcaatcttgtatgaggtcacgtactcgaggaacaacctcaagatcggaaacaacatgaagcagaagtagaagaacccctcgtacaatgttaaaaatccctcggggggatcgtttgctctttggcttagggtaggaaggcgaagggtgactccatcagcgaagggtgactccatcagtgaagtcgagacgagccctcaagtccattaggtggcttgggtttcttttgagcctttgccatttaaagcgcttgcgcagcctgcagaagcttcttcgtcttatccggttcgaagtaaatatctttaagcttcacctcggagagagctaaaagctagggcgcttccttccagttagaagcccaagcttcgacgactactagaggacgacttttctttctgaagaggcttcggctcgacatcctcaagcaatctaattactgagccatgtatgctagggtatcctaccgagccacaaaactgctcagttcctatgggacatgtgacgaggattctgcatcgctatctaacctcgagatgttcgcctcggtgtcgtcggatggactccaaaccattttttgcttgtgaataggaggaagatcatcgcggtgtgctaagttgatggagtttgaaaggctcataaaatgcctcgggagatcactaaagagatggagatcagaaaactaattttttctaaccggcaaaatcacaacctatcaaaatcacgggggaattgtgacggaaaagaaaataaagtaagagaaatcaagatcagagagaagagagcaaacctaagatttttcttcaaaaacttcaaagtgaatttttgaaggggtagctcgttatttgatagagtttcaagcgcatcaaatgcgcgtgagctcagtgaaacgcgtcacatccgctgaaaattcgagaatacgcgagacgcttcctcttctcaagaaacaaacgtcacacgcaacataaatttgaccgtcagggaagatgaagcgttaggagacaacgatcaatcagtttcaaagaagaagttgttggctcggctgaaccatccatgaagctcgtcgcattaactcttaaaccaacgagctgggggctaattgttggggtcgaattcccccacaggcaagaccgagccagacagttgaagactaatagtctcctcggggtaaaatatgtgtttgccccgagccatgtcaaaacgccttgggtcctttgtctgttcaaccgcctcggggtaagttcacaaaatgggtaggtgctaacttcacaacgtaactgatacggttcaaattatcctaagaactactctctcaaataagagatcagttgcagtatttaaggatcgaattcacaaaatgcttttgttcaaacaatgagttcaatgtcaagattaagctagcaggtgatgattgaaataataagtaaataaagtaaaaagagagcaagttgattgtgttgtaaacgattatgaaaagagctaggatcagggtattctaaggaaactattggttagtagatctaatgaaagataggttgttatcgaaccattcttaaactcaaactctaataatggaataaccggtggtgttccgcgaaactccctatatctatagctaagaataacccgagaagccgaaagattattaacctaaatatgcattcttaacgagttcgattgttcaccttagtagataggctgattcttattacacacctataaacaaggctcatcaaataatagatccaactacagatacctatggtgggcatatctattgtctggattcaagatctagttaatttctctagatctagcattaagcataattaaagatgaagaactctacagataacctagcagaggaggcaatctactaaaccatatgaatccctaatgagaaaccctattcctgacaagcagattactcagacatattgattgaagcaaacaacataattgagtatgaaaacataaacacatcaataaggatgagagaaagaaagaatctcttcactgtattcaaaactgaatgaatctctgaaaacaatggatgaatagcttatgtctctctataacagggttttgcaaaaaagattgataatcgaaactagggtctaaaaaaatgtatataaaccctataaaacgtccagggactaataatgcaaataaggaagtcttctggggcaaattttctcttctgtaaacttgaaagcgtcatggactttgttgggccgaaactggtgtcgaacgacactcctcttgattcttgagtccaaaatcatcattagcttcccttttccttagcttttgctgcaaaatgtatcctcatttccattgttgtcccactgcatagaatacctgaaaagacactaaaaatactcgagaatcaacataaagactcaaaatcttatacttaaaacttagataaaatcagtgaaaatagggatatatcagtaacccaagccgattatgagaacgctacggggaaagcctacatcgccttgggagatagtttgctacatgcagtcgtcaccgcacccgagccaaaacacgccggataccccgaagccacctctcgaacgatcaccgaacatagaggaagtatcctgagggaaaacatcaagaacacccaaggcaaagacttgtaaaatattgtctcgctcaaaggataatttccagggaaaccggatcatttacgagaatcacagaaatgatatggaagaatcttcaaggattatatcaaatcagaaaatcttcccgaagtccctgaagaataaggaatatttccttaaggcagaaaggttctggaaccgacttaaggatatattcaaatcttccgagaatattgcaggagaggcgatttatcaagtctatatgaagcgactcaaggacttcgcataaaagagagacacacaaataacgccctcaacttcagacgactcaagagctctgactttgaaggcaaaacacttttcttttcataatctaatcacttgtacaatcaaacacatctatttatcaataatatcaagaacactatctgttgtttgcaatcacttttctttaaaatctcgcaaagtatcatcccacagacgtaccctaaatataatttcgattgtgtaagttttgacttccacaatcagtgttttattaatatagagaaacacatgagttgagcaacaaaatacacatggttttccatgggagaagccacctaatgaaaaagtaggcaatgttgaacattttgagtcctatattatctcgtgtgtgtgtgccaattttgttaactaaaatgcattgcttcctctacatgttatgcgtcaaattctcaatcttgccatctaagacctccttccattgcattctctgcaaaacatgtttgctaatttccagatactctactccaacaatgtagctcgagttccaaattcgaagaagataaaagtttatatttccatttgaaagtcaatataaaagggataacaaatccgatctaactctagaacaatatctattcttctaatacaaaacactttaaagaacataagcagttaaactcactaaagcacaagcaaccttaaattagctcttttaacatagagtttgtgaaacaaccagacccattttttcttaaacataattaaatattctcataaatatctaattaaactaacaaataaaacaacaattaaacagcaagtcaaaaatacaattttatgaatgaataaataaataaatcgaccaacaaaaccaagaataactaacaatcctaaccgggttccaataaccaaaacacaaaaataaaacaaacgagttcatagatcatcctctcttctttgccatgattccacgatcatactttatctttaccttcatcaacaatacaataaaatgcgtaagtattatcataaatacttaatgaggcgatcctcccatctacgagctgtacacacaagcaaataaaagggtataaacacaaatacaacacaaacacactagtcattgaacaattcacccaaaaacacattcaccgcacatatatattatcacacaaaataaatcatacaacccaatcgctcagataagctcatggtcatgcacttaccttaacaaattgattctaacaataaataaactcaggagagactctccttgcctctgaaacagtccagaaacgtcctacaacaagtcacaaccaaaagcaaccttgaagcaaactggacatgaaaaacagaaacaaacaacctcaaagacgaaactctaaaatacagaccaacggttaactatcaaattcctccggtgaaaagctagccgtagacgtcatgaagcttcccacaaaatctcgtgccgatcggaaaacagacgagaccacgatcttagtttcaatttctgctggtcctaattcgcgtatgagaaaacgtgtcttacaaatctacgaataactcaaccaatttaaatccaaaagcacttctgaaaactggagaataacgataaaagacttggaaataactctaccaaatttcgttacctttgaccacgatttgatatgacgaaactgatttctcccaaaccctaacgattttgctcattctccttctctctctttttctcctttataaaaccctaatttcgagtttccttcttttatagacacactctagggtttccaattaacctaaccaattaaaccggaggatttaaaaacaaacccgaacccattttccggttcacgggcgttataactctcccccactaacatagattcgtcctcgaatctagcttcacccttccattcagaggaactccgtgcaaccatcactacggtccgcactccctccaaccagaccccctctaggtctctctatccagtcgatatactcacgatttactagtcattgttgctcacaactcactctccattctcataccgcaatattcgagcataaatcgtcactctcaggcctcgacctatggtatctcgggtatcacacgtattatcttccccactcaaagtcaaaccctaagttgtgtcagctcactctcagccacaaagtcatcgagttacgacacttggagaaaataatacctcaaaactcgctctcaggtcatcaccctaaagcgtgctctcggatcgtcacccgaagacaccgtacccctcacactctaaagacaccaagtccctcgagttaccggtacctcaggagcataccccgctcctcacgagtcgttgggaccctcatgtccctcgaggaaacaatactaaacgcttccgagcatatctccagactctctcatggattcgcgtaagacacctttatgcctcaccatccatcatatcctctcgggaatatccttatgaccaactcccggccatttcgtaaacacacctctctcttaggttgtttactcaaactttccaaaaatagacaagtcctttctggaaaactttccatttctggaaaccgcacaacacattcttaaataagacaactctagtcaaatcaaagaaaaatactcatcttattaatcatcaaatgtcatgatcgttacaactccaaacaaaaatacaaatgaaagagaaataagaacaacaactcaaaagctcaaaaactcaacaacactaaaactggaaaccaaggataggcaaactcatgcagtaaccttcttctcgaaccacttctagaaccttgccttcatcctcacctctggctcccaagtctcctctgtcacaccatcgcagtcccacaggactttgatcaaaggaatcttcttccgccgaagttctttaatcctcctctcgagaaccctccctggtctcgcctccaaagtcatgttgggctgaagatcctctggaatcttagccaacacctcatcatccttgtgaagacacttcctcagcatcgacacatgaaagaccttgtgaaacgcacgcataacatctgtcaactctaacctgtatgccactggtaccaccctctcaacaatcctgaacggacccatgtacctcggactcaacttagtctctgagatagacctgttcggaccacgtaacatggccatcttgagatacactctttccccaacctcaaactcaagctctctcctcctcttgtcagcataactccgatgtcgatcctgaacttccttcatgttcagcttaagaactccgatcctctccgtggtctcctgaacataatttgcaccatatatgctcctctcccccacttgggtccagcataattgtgtcctgcatggcctcccgtacaacacctcgaaaggagtcatcccaatactcgcctgatagttgttgttataagcaaactctatcagactcaactgatccgcccaatgacctccccaatccaagacacacatccgcaacatatcctcaagcgtctggatagtcctctcagattgcccatctgtctgtggatgataagccgtgctcatctgtaccttagtgcccatctctgcctgaaaggctctccaaaacgcagaagtaaacttggaatccctgtctgacacaatactcacaggtactccatgcaacttcacgatctcgctcacatatttcttagtcaacaccgccgctccatcggtttttctgatcgccagaaaatgtgctgacttagttagacggtccacgatcacccaaatagcatcaagttctgctctggctgagtgaagatatacttcagagtcttatgatccgtgaacaccagaacttttctgccataaagataagacctccaaatctttaaggcaaagattaccgcagccatctccaaatcgtgagtaggatagtttccctcatgcttcctcaactaccgcgatgcatatgctataaccttcccacgctgcattagaacaaaacccaaaccaactctcgaggcatcaatatacaccatgtaaggctctccatgctctagcaatgctaacactggtgtactcgtcaacatctcctttaggctcacgaaaccctcctcgcactccgttgaccacacaaaaggaatatccttccctgtcagcttagtcatcgactgtaccatactcgcaaaccccttaacgaacctcctgtaataccctaccaacccaagaaaactcctgatctcagtggcattcgtcggtctaggccagtctctgatagcctcaatcttctctggatccactgagactccctctgccagaaaactgcacttgctcaacttagcgaacaacttctgctcccgtagcttctccatcactcttctaagatgtacctcatgctcctcaagactcttagaatacaccagaatgtcatcaataaagatgatcacaaactcatccaaaaactcctagaacacgctgttcatcagcctcaagaacgttgtaggtgcattagtcaaaccgaaaggtatcaccacgaactcaaaatgtccatatctcgtcctgaaagcagtcttgcgaatatctgcctccgctatcgggatctggtgataacccgacgtcaaatcgattttagagaaacaagtagcacccctcaactgatccaacaactcatcgatccttggcaaagggtacctgttcttcatagtgacccggttcaacccccggtagtcaatacataagcagaaacttcagtatttcttcttcgcaaataacaccggcgctctccaaggtgaagtactaagacgaatgaatcccttacccaataaatcctctagctgcttcttcagctctaccatctctgctggagccatcctgtagggtgcttagacaacagcgctgtccctggttccaacacaatcgtgaaaggatcagaccatgatggtggtaatccctgcaacgattgaaacacatcctcgaactcctgaacaacccgaatgttgctcactgctacttgccccacagactccggcatagatatcgtcattaggtaagcctcgcagcccttctcgatcattttctctgcctccactactgagatgacgagactccctgaggtaggtctcactccctaataaaccaacctcccttctggccgctcaaaagaaactctcccatggtagcagtcaaaagaaactcttccagaataacatgatacaactctacagggctgataatcagatctgctgcatcgactcccctgcaatttgaatatccacacccttagctctccccagaacctctagaaactgccctccagcaaccttgacggatccaaactgctcaccaggatccccacggatgttaccgcgcgaggcactcttcggggtaatgaagcaatgcgatgctccagagtcaaacaacacatgggcctctacaccgtccactaataaggtccctacacaaacctcatgtgctaataaccctaacattcatcacaaaacaatgatatctaaaacaacagaaataattcacaaagtctgagtgtcagaaatcataccagtgatcgctctgttgctcgtactgcctatctcacgcgtagtgtagccctgcggtgccgctccaatatgtgctaactgctgtacattttgctgcactccctgctgcacctgcgctccttgctgcaccgccggttgtactactgccacaaccatcagctgcagcttaggacaattcggcttgaggtgtcgtctctccctacagtggtagcattccctcgtctcagctcgcagctcgctgcgtgcaatccgctactttgtggtcaaggctcccacaagaaaaacatcccgcacgaccccctgtctagctttagaaggatgatcccacttcctcttctgcccctgcgcagggttgccgcccttgctaggtgccacctgccgctgagtcttcttcggttgtaccgctagactcactgccaccacttgcttctaaaggtcctcctctacctcagcagctgtctccaccagtgccgcttttgtggcgtactgtgacactctacaccgcaccctccagtccggtcgaagtcccctcaagaacctcctcatctgggcctggtcatcctccatgccccgacccgcatacaccaaaagtcggttaaactcccggtcatactcccgaaccgaccgctcaccctgtgtcagctcaagaaaacgcgcctccatacggtcgagcgcctcttgcggacagtacttggcattaaactcagccacgaaatctgcccaaaacatatccgcctgcctcctcttggcagtcacactccgccaccacaaatgtgcatccccctctagaaaatgcactgccagatccaccagatactccaccgagcatttgctcgaaccgaagttccgctcaacccgagacctccaactatcggcctcctcaggactagtaccaccagaaaaatatccggtgccaatcctctgcaactgctccatcatcctcaaataagatggaacctcctcagcaactgcagccctctgctgcacctccgccactcgtggcgcaactggagcctgcactggtaccacacctggtaaccgcttcaacaactgtctcagtaggcccgccaaaccaacctctagaacctgggctcctccggctgcggcagccaacactcctgggtcctcagcaccaacgacatgcacaccgataccgacaccagctccactagcccccactttggctgcaccagctatatcggcaccaagaccgtccccaaccccggctccacaaacctaggctgcgaacccagagtctgctcaactgtggcactgtgcccatcactctcgccggtaccctcgaggactcgtcctctatcgcgaccacgaccacgaactccagctactcaagaacaaaaggctaagaatatagaacaaacgaatatatcacaaacaacttaccatggaatctcatttaaggctcagagaagatgatgctaggactccaacaacacacaattgactaaacactccataatcaatcctcagtatgctaacatcctagctcatccaacatcaatcattaggaaaataaatcatcaattaatttttctacacatcttataactgtgatcgctctgataccaaattgaaacaacctgacccatttttttttaaaacataattaaatattcccataaatatctaattaaaccaaccaataaaacaacaattaaaccgcaagtcaaaaatattattttatgaataaataaataattcgaccaacaaaaccaaaaataactaacaatcctaaccgggttccaataaccaaaacacaaaaataaaacaaacgagttcctagatcatcctctcttctttgtcatgattccacgatcacactttatctttacctgcatcaacaatacaatgagatgcgtaagtattatcataaatacttagtgaggcgatcctcccatctacgagctatacacacaagcaaataaaagggtataaacacaaatacaacacaaacacaccagtcattgaacaattcaccaaaaaacacattcaccgtatctacatattatcacacaaaacaaatcatacaacccaatcgctcagataagctcatggtcatgcactcaccttaacaaattgattctaacaataaataaacccaggaaagactctccttgcgtctgaaacagtccagaaacgtcctacaacaagtcacaaccaaaagcaaccttgaagcaaacttgacatgaaaaatagaaacaaacaaccttaaatacaaaaccctaaaatacaaaccaaccgttaactatcaaatccctccggtgaaaagctaaccgtagacgtcacgaagcttcccataaaatctcgtgccgatcggaaaacagacgagaccacgatctcagtgtcaatctccggtggtcctaattcgcgtctgaaaaaacgtgtcttacgaaaatgtgtcttacgaaacttcgaataactcaaccaatttaaatcaaaaaccagttctaaaaactggagaacaacgataaaagacttgggaataactctaccaaatttcgttacctttgaccacgatttgatatgacgaaactgatttctcccaaaccctaacgattctactccttctccttctctctctttttctcttttataaaacgaaaagtgtctaaataaagccctaatttcgagtttccttcttttataggcacactctagggtttccaattaacccaaccaattaaaccggatgatttaaaaacaaaccctaacccattttctggttcacgggcgttacagttcggtacttgtatcaattatttagtattggtttggtgatacgattcatcaggcttatgtgaggcagaggacaggacacgtcagcatattggagttaaagaaattgaggacatggcggtcaacgcaggaatgggcaaagactcagaccgaaagagagacttcaagaaagaagagaaggaagaagactctgacggagagagagactttgtcgttatcaaagatgcttaaatagctgttgaggctttattgttgcatttcatgtttttatgctgagacttttagcctggtgatgtgccagtagagagatttatgctgatctcttgtaatcgtctttgtgtgagagctaagaatgattgtatcttgtgatttctgcagttacaacctttgtaatttgtagatatcatattattgatcatcggaaagttttggtttacaatcggagtagcttaaacttatcattggtgcggtgaaactggtccgatctaagtcgcgatgggtgttgaagctgagtcggagttgtatgtggcggatcatgtggagaagaacgtgatggagcacgatattctcggattgtagggaaatttcgaacgattgtgtgaagcgaaggctcaacatgaagagaaattggagaatctggacaggttggtcagatcggtgatttctacattggaacgtacggagattcgtgctggtaaagcgtcggagcagccacatgactttcatcagtcaccaaaggttggttcgtcgtcgatccattcacgtcgtgctcctatggaggatgaaaggtatttggataatcttttgccattagataattgtgttggattgttgaagaagattgaaatgccagttttaatgggtctaatccttacaaatggttttcaattgtggagagaattttttcgtgtgggaaggtatcataatgatgataaattgaatttggtctcgttgagcttgacaggtgatgttttgaagtggtttaattggaaaatggttaacgatgagtttcgatcttgggaggattttcgccaacgtctgtttctgcgttttggggaatcaattgaggatgatccgggaaacacattcttcgcaatacgccaaaaggatcagtttcatcttatgtgacagagtttgaggatctttctactcaagttgtgggtttggatgtgtcacacttggagaagattttctacaatgggttaaaaccagaaatgaaagaagttattaagatgaaggagtctcgaggattaccaaatcagaaagttgcggtgttgagaatggagtctagtgcctattatcagatggttagtgaacgagggagtaagaatgttgttgctgctcgtacgtataacaagtcgtatactaagccgtttttgattactagtggggcaccaggtcaggaggttcaacgagcataacctcgtcaaaagcatactatagaggagcgtgatgcgatgagaagtaagggaatttgttttaactgtaaaggaaaatacactcgtggtcatgtatgtcctttgcgtgagttgcagattttaacagtagtggatgggctggaattggaggttttggatgaggattttcaggtggaggaagtagagtgtgctccttgttctcctgttatgagatgtttatctcataattcttttttggggtgtcattctcccaaaactactaagttattgagaatgattggcaggagcacagtagtggtgctgttggattctggtgccgtctcataatttcatcactccaacagtagcacatcgttctaagctgaagttgtgtgctgataacaatttggaggtgatgttgggtaatggagtttcagtgcattgttctggagtttgtaaaggggtgctgttctggctcggtggtgttgaatttggaggtaactttatgtctttggaacttggtgttgtggatgttgtgttgggagttgagtggttagaaacattgggtaaatgagaagtggattggaaaactcaggagtggagtcttacttatctaggtcagcaggttaccttgtggggagatccatctttacataagtcaaatgtctcattaaaatctctagcagttcccaagctggttgagattcatgagtctgatttgactgaagggtctctaagtctatcttccttggccacaatggagatgttaccagtggtagaggttgtgttgtcagaatttcccaccatctttgacatacatattgaattacctccgtttagagggctggagcattcgatttcattgaagccgggtgtctcttctatcattgtccggtcatatcgttatccacatgctactaatgtggtcttggagaagatggtagaagttatgttagtaactggaattatcaggccaagtactagtcctttctctagctagtccgatgttgttggtgaagaaaaaagactcttcttggaggttttgtgtggattattgtgctataaacagagcaacaattcctgataagtttcctattcctgtaattgagctgttgctagacgagttacatggggcgatgatattttctaagattgatttgtgttctggctatcaccaaatccgtatgaaacctgaggatattgagaaaacagcgttccacacgttggagggacattatgagtttttggtgatgtcctttgggcttactaatgctccagctacttttcaatctagtatgaataggatttctaagaagctgttgcggaagttcgtcttggtgttttttgatcacattttgatctatagtcccagcgtggaatcacatgtgaagcatttgagagaagtgttacaactgttggcagacaacaagttatatgaaaatatgaagaaatgctcgtttggggtgcaacaagtggagtatttgggtcatattatttctgctgaaggagtagttacagattctactaagacagaggctatgcacaattggcaagttccgagtaatctgaagcagttgagaggatttcttggtcttactggttattacataaagtttgtgcgtggttatgggagcattgctaagactttgactgaattattgaagagggataagttcttatggcttacaatgactcaggatgcatttgaacaggtgaagcaggctatgattttagctccagttttgggattccctgattttgataaagtgttctttttggagactgatgtttttggtaccggtgttggagcggtattaatgcaagaaaagagacgtataacatactttagtcatgacttgactccaagagaacaattgaagtctgcttatgagcgtgagttgatggctattgttatggatgtgttaaaatggaagcattatttgattggtagaaagtttaaggtccatactgaccaacgtagtttgaagttcttgctggaacagaaagaggtgaatatggagtatcaaagatggttgacaagattgttggggtgtgatatggatattgtgtataaaccaggggttgcaaacaaagcagcagatggattatctcgtattcagcatcctgtttatgcattgttgttggcactcacagtgccatatgttattcaacttcaggatttatacaaagaaattgatgaggatgagcatattcaaagtgtaataaaacagttgcatgataatcagctacaaggaagtcattatcagttggttaatgggcggttgtggtataagcaactactggtttttccaaaacattcaagctttattccgctgattttacaagagtatcgtgacagtaaggtgggggacatgctggcattttaaaaacaatgaagcgggttcaagagagttttcattgggaagtcatttataaagacatgcagtggtatgttacaggcttttcgatttgtcagactcacaagtactcgacactttcaccagcaggatagttacaaccgttacctatccctacagcggtgtgggaggatatttctgttgatttcattgaagggttgcctacttccggtggtgtcaatgtgattttggtggtggtggaccgacttagtaaggcagtatacttcttgggattaaaacatctatttaaggcgattgatgtggcaaataagtttgtttcagaggtggttaaattatatggattcccaaagtctattgtttcagaccgtgatagaatctttctgggggcagtgtggaaggacatgtttaaactgtcgggtactcagctgaagcatagtacatcgtatcgtcctcaaactgacggtcagacggaggtcctgaatcgttgtttggagacatacttgcgctgctttacttctagtcatccacgggcttggcataaatatttggcgtgggtagagttttcttttaatacggcttaccactctgctttgaagacatcgccttttaaggttgtgtatggtagagatcctccttctttggtgaggtttgaacttggttccacggataattgggacttggaggtgcagttaaaggagcgtgatctgatgttggaacatattcgagctaatcttcaaagggctcaagagatcatgaaacgtaatgctgatatgaagagaagagatgtggtgtttgcagtgggtgattgggtgcatttgaagttacaaccataccgacagcggactgtggttcgccgtccttgttacaagttggctgccaagttttttggtccttttgagatagtggaacgcattgggaatgtggcatatcgcattaaccttcctgcttcatcaaaaattcacaatgtgtttaatgtttcccagctaaaaaaagtgtttggcgagcaacaggtggtgcaggcaactaatcctccaaagttggtggaagatgaatttctgtttccggagaagattgtggatattagttttacggacaaagggaacaaagagttcttggttaagtggcaggatcgtggtgtcagtgaaaactcttggatgccgtataaggagtttgttcaggtattccctcagttcaagcttgaggacaagcttattttcctggcgagaagtattgatatgattcatgaggcttatgtgaggcagaggacaggaccacgtcaacatcttagagttgaagaaggtgaggatgtggctgtaacgcccccgagcctgaccattaggcgcaactcggctaaagacccgggctttcaagtccttggccaattctcatccggtcatctccccactagatgcaccgcgtaggcttgccaacccttgcggtgtacccagtattgtgcggctcggacaaagccttgtatcatcacgaaacacccgcatttgtaaaaccctttgtactttaatgttattcgcaaaaagatcaccaaaaaaaacagttagtaaaacggatccgcattttaaataaaacgtgaaaatacaaaatcaggttttacaaaagcaacttaaaaaattaccctagtctggcggccttatcgttcgtcttccctctactggttgaagctacagctgcctgaaagacaagaaaatcatgagtaatctagtattactcagccaggccaatgcaacatggaacctacggcaactctaagccattcttatgcaaatctaacaacctagaggggttaacaaacggaagcaaagcaagaatgcaacaaaaaatcagagtaacacgcgaaaagcacgtaaacacacaagcaatacaagcaagacaaaagacaagatataacctaaactcgacctatgggccatgtgctccattcctccttacaaaacgtcggaagttgagttttcctatatggatccgtcaacccgaccaaccactcgttgaatccacacaggaaaccaacaacatcacgacttattgaacccacccaggataccaataagcccaaatgcatcgtcatgcactctcgacctaggttccgagactacccgacaagtgtttccttgggaccgagactcgcaagcttccccacacacatgcaagaactggcagcaccctaaactagacttctatgatactcggattccgcatccaagatcacctataccaaacagtgcacatctctcatccgacatggattcaaagatggcgactcacaagcatgacaacaagactcgcatgcaaagtaaacaagcaatacaaacaatcaagtaaacggatgcacacaaacgaacaagcaatcaacaagtaaagccctagtgttcatctacatgcagccaacaacctagtcggtttttaaccaaatgaatttaagcatatgaggtgatggaatctatatgcagttcattggttaacctagccggattttaaacatgcaaggaaatataaaaagtgacaatttctaagtgatctatgatatatccctatttttaccggttttaactatgttttaagtataagttttagagtctatttgttatttctagagtcttttctagttcttttcaggtcttaacatgtttgggattcatttgaagataatggagcattctgaaagaaaacaaagaatttatgctgctaaagcaatccggagacgaaaatgcacgtaggtgtcgaacgacaccacccctggtatcgagcgacaccaatacctgacggcaatttcgagacgcaacttattgatgttttgaagatttacaaattcggccctgaactttctcttatttttaaagaaggtccatcatgtttttaggtcatatatatagttttaaaggtcaccagagcaaaacccgcgccaagccgcggttttttttttaatgtaattttgttaagttgtatgtaagtattaaatattatttgttataatatatgtagaataaaaagattcatttgaaagtgattgtgaacacaatgcatttgttgattttttttattaatatagcctttataagttttagaagctaattttttgctttacgaacatttattttgaagagcaaaaatgacatcttagttgtaaccattttttgctttttacatattacatcaacaatgtcatttgtaacatttttcagcgtaagcttcttttccaacacttccatatatgttggtgatttatcttaaacgctagtttttctctattaaaatcatagcatcaaatcaaactgaagaatgataagatactaactaagtattataataataatattaatccggaagatacaaaattgaaaatattttttttagtttgtcatctttcttccttttttgtaatttgcatattacttggtgatttgttttatgaaccaaatgcatatttgagtataaaatttaattagtttgaataattaggagaattttattttattattagttatatttaaatttcacattttatcataataatataatgttttggtatttttatatttgtataattatttattattattttttgttatttttcatttcaccgtaataccacatgctggttaataagttataaaactcttggaaacgctccaatttttaaccattaaaccagtggttcaaaatatttcataacgcttgaaactgcaatcgttcgcttccgcaaactcttttattcataaccgcaaacgctatgtttaaacgctattaccctctcgtaatatcatactactatcaccatcatcatcatcatcatataaatatatcatagtcataatagctatcatcatgataataacattatcatagagtcgtaattttcccgccaaaaacataaactcttaattttttccccaaaaagtaaatccataattttctcgccaaaatagtaaactcgtaattttcccgccaaaaacgtaaacccgtaattttcccgccaaaacatgtaaacctgtaattttctgccaaaaacgtaaactcgtaaatttcccgccaaaaacataaacctgtaatttttacgcgaaaaacgtaagcccgtaatatttccgcaaaaaaacgtacacccgtaatttttctaccataaacgtaaatccgttacggttatttttttttgaatattctcggatattactattatctatatatttttaattatttagtctagaaataacttatatttttgaaagtataattatatttcgatatttttggttacccaaaatatttcggtttgtatccattcggtttcggttctttcggttatagaatttaatatctattcggttattttcaaatttttgttcggtttggtttgagttttttttgcattggttttggttcggtagattaggttcggtttatttgtctaggcctaagttttttagattaggaagtttacgcccaaattttaatatagattttagttttgaaagtagtttagttggggtaggcccatgtctaattttaattttgttaagttgatgagatgacatggaaaaatagtatgtttttattggttgaagtaaatgagctgtattaatcgaaatgttctaattggttgttgattttgcagaggtgtcaagttgaggttcactgaaaaagctgatgtgtcagaacaggagagacttttagcacttttaaggtgttgattgtttagacctaagcttggagaggataatctccttatctcttttgtactttgggagcaagaccttatggagactccctttggagaagatcttctttactatttctcttgctattattgatttcttattcagactatgatttgtgtttctttgatcatgtctgagtaatccacttgttaggtttagggtttctcattagggattcatatggtttagtagatcgcccatttgctaggtttttatgtaaaattcttcatctttaattgttttaaatgctagttctagatagatcacctagaacttgaatccagacaatagatatgcccatcataggtatccgtagttggatctattatttgatgagcctggtttataggcgtgtaataagaatcggcctatctactaaggtgaacaattgaactcgtttagaatgcatgtttaggttaaagatctctaggcttctccgattattcttagctataggcttagggagtttcgcggaacaccaccggttattccataattagagtttgagtttaaaaatggttcgataataacctagctattattagatctactaaccaatagtttcctgagaataccctaagcctgacgtttttactttcttgtcttacaacctcacaatctgctattgcttccttttgtttctttttattttcattactatattacttagcttaattcaaaaccttggtctattgtgtgatccgagagctttgtagaatttgacccttaagtgctacaatccatctcttatttgagagagtggtcttaaggcaatttgactcatatcaatctatatgcattaggtcgtagtttataatgcatgcaaccaaattcgagaatgatgaatcctagaatgaaaatgaaccaagaaaagtagtcacgcgaactcacaaacaagaaactagttgagaggttaaggaacagatgggtttcaccggccatcttggctcctccgccttctcctcaagatcttcttcgccttctccttaaaaacctgtcttaaactctctctaaaaactcttaaaaaattctaacttcttttctttttctctataagaatgttcggaaatgagaagagtgagtttatatagagtagtcgatcgttagttattgttaaagttccttttcccttagaaacttcttccgattttaagttcttttccttagaaacttaatcgggaaaattcaactcgatcataggaacgattgaatctctcttccccttccgaatatttcctgtttattcggacttcttcttgattctcaatgctttggagaccactctcgcggatcaagtcatttcgattcgatccgagccgagcatccttggttcacacacggaccatgacatccgattacctttctcaagatacggtcgtggatcaaaagggtctcgatggttccttgaaaactcggtccgtgagttccactttcgcgtttaacttggaggacttcattgacagttttgaagcgaatgtgaatcaatccccttccttctcgtctttgtcctccagttaagtttttcttcttccatggacttctcctttcccttccccttccatggtacttaactcacgcgaaagtttcaaaattcgactcaacttctccagacttctacttctgcatacaaggtgctacattggcggtcaacgcaggaatgggcaaagactcagatcgaaagagtgacttcgagaaagaagagaaggaagaagactctaaaggagagagagacgttgccgttatcgaagatgcttaaatagccgttgaggctttattgttgcttttcatacttttatgctgagacttttagcctactgatgtgccagtagagagatttatgctaatctcttgtaatcgtctttgtgtgagagctaagaacgatcatatcttgtgatttctgcagttacaacctttgtaatttgtagatctcatattattgattatcatagagtttgggttttacaatcggagtagcttaaacttatcatttggtcggatacgtttgtatgtattgagcatccctaagtaggaaaaacttttaaaaatgaacaagagttttaagaaaaatggcagatgccatatatgaataggtagatgattataccgagcaaacaatcaacaatggcttatgtcacaacagattgttcatagatgacaagttttcttggtttctcaaacctactgtttcacttgcaaagaattctcaatacgctcaacgagttggttcgctggcaaggcaccctcctgcaagaacccaaaagcaaaacttgtcaacaaaagttaaaaacttgtgctataaagaaaacagctctgtcttataagcttttcaagataagcttttaagtgtagctacaattgagcctttgatgcaaggagtagatatgccgtattcatgcgtgatagaaaacttacgaaacggtcccagagtttgccgtctttgaataagatgaatgtgggcaaagcctcaatctggtatttgttagcaagacttgggtacttctcagtatcaattttcacaactgcaattatatctttcagtgtttcactcacttcattgagtataggtaccataagctgacatggaccacacctgcaaaaaacacaactctgtaaccatataagaaccaaaaaacacattaaaacctgatgctataacaagtacacctgaacataaactcaccaagtagcatagaagtctacaagtacaggtttatcagagttctgcaacaaatcatcaaaagagttgaaagtttgcttctttgctgctcttacctgcatcaaatcatcgcgccacaaattatgaaaacgcttctactataaaaacaaatgaacaaattttccctacttctactagacgtaaacaacattacattagaagtagaagaacaattcactaacatatatgttctttcattctttcattacatctcaattctcattttctgattacacatactgatttagattacacagaacaacgtcaaacactatgttagaatcacactctctaatgtttttttttttattaaaagaaaaagaaaaaaatacattcgaacatgtctggggtgtgcaacccccgcaacatcagctaacaaaatagaactaacaacatcgggcctagactccaaccaatgcaaacctaggggtaatgaaaatgcatagttcgctaatccatcggcaagacgattagcttcactaatacacatgagaaattcggactatccagtccttcgatgttgaatatactaaaatcaatgtgttacattctccttcttgtttcaattcgaatcaatctcagtgtaaaactatgtaaatttacaacattactgattctatctttatgtataaacaatgaataatatgaaaatacacaaacaccatgaagctactcgaagtaactaaaacaagaacaaaattgaattttgtctcaaaatcaatagcatcaaatcgaaacaagtaattggtgaacggagaactcacagtgagtggagcgaagcgagtagacgaagacggcgattgaacacttccgaatcggcgaatctgagaaggtaatcgtacggaggaaagagttcgtgatggtgaagcggaattagacgattccggtgtaaaacatggagagatataggcggtggcgagagaaatcgccattgaagaagcttcggcgaaacgggagagtttttaagttaaagaaatgtgacattttttgttttggataacaaatccgatttgtaaggagaaagtcagaagacgacgagacaaatatttgggagttccgttaaccgggtcggttaataggagtgaattgatcggcaacattttgtaatgtgttttggttagcagttaaccaatttttttgaaataagttctcttaaccaatttttgaaatgagttcggtttttttgctaatggttataaccaattttatgttgaattacaccgaatttaatgaaattataccaaaatttctttagaatctttacccaaatcaaacgaaatcgagtttctgtatagattttagtcaaataaccgaatcgaattaaatattacctgaaccgattcgaaccaaatttcgttcagttaattttgctttcctagtattaatgtttgtattgattatagtaaataataattttaatataattctgaactatgtgcaatcaatataattttagttttaaaattttgaaaataacctaaaaatggaaacaattttgaaaatacaaataaaaatacaaaccacaactcctaaagctaaacttttgccaagtactagattttaacccgcagtataccgcgggaacaatttattttttaaagttagtatatataaaagtttacaaattgtatctatctataaaataattttattttatagtttacaaatgttattaagtaacgtcctgctaaacccgtcctataaaaaaaaccatttattttattaatgttgatcttatttatgatatgcttatgaatcattgtctaaatattttgtaattttgtagtaattaaatgctatcagattatatctctgcgctttgatgattataatcgaattgttatagttatggagaaaatcaatatcaaaaatgataattttatagtaattaaatgatattaaataatttggaagtattattttaggaaataatcgtgtagttaatgtggagagattttaggaaaattgttaaatgtcaaatatttaattcaaagattttatttttaattatcaaaaacaaacattaaaatccagtggcagccattgtaaataagtcccaactacaggatttatttcacaaaatggctgcaaaaatgtatatatagataaatgaaaaacaatatcggagttgaaataattaataaaccacaaaagtctataaatgagctcataaaacctgtctccacacagtccttcatttccatttctccgatcatttcaaaaccctagttcaagaaagcaatcgataatattaatacgatttctttagatgagcagttactgtttaggttctggttctactttgaattgatttactgttaatttagggttttagtagggattgattgttttctttggatttaatttaatgatttcatgttgtcaaacctactttttggagtctagttctagtttcatgttaccaaagggtttgactctagtttcatgttatcgaaactactttccagggcttggctctagtttcatttggtcaaagctacattttggttttggttctaggttcatgtagtcgaagctacatgttggggttttgtttaaattctttttttttcttttttttttgaatgaatgttaaattatattcaccaaaaagacgtttgatacatcaagtgcaacatttcaaaaagaggaataagaagttctctgtaagactaagattagcttctagtggagaaccaaaaacagaggaggttctcatatttttgatttcccgagttgcggagaagggtgattctgtttcgtattgttttgtcgatggttttctccaattggttgactgttcttgaattttctccatgccgacgattgtttcgctctctctagattgtgtaaatggtggtttgaagagcatactgcaaaagaaacagaggaagggctcgagtgatgttcccgcaatgagcgaggcaagttggtcccagtttgatgtgtactgcacgcccatgaagcctttcgctataatttcccaaatttgattggcgtagtgacagtggaagaataggtgatctcttgtttccagagggtcttggcagaaaacgcaagtagagtcagcttggccgttccacttttgcattcggtcccctgttgaaagacgattgtgcatacccagccaagtaatgaaagcaaattttggtgtggcttggggaaccatacacctttagcccattcgcaaactggttctgccattcgaatgagtttccaagtctcacgggttgagaaagttttcttgtatcctgtgcttggcttccaaagatcaatatcctcaatatcaggttgatgacgtgtttttgcagcttctatctcagcttcaattctgaccagtaagtccccacggtgtttcctactacgtcgggtcgtgaacacattttccatattcgtagttgttgtaattcccagatcaatgcatcctcgagcacccaaaacatcaacaagagtccccatggaagaccaatgatcataccagaaagaagtgtttctaccattgtgaatttccttcttatgaaaacttcgtgcaacgtccctgagtgtaagtaacttacgccacatccaagaaccttggtaagaagaggcttttatcgcccagaaattgtttcgccgaataagataggtctgaacccattgcccccaaagagaggtttgtgaggcaagtaaccgccatattaacttgagtccgcagactgtgtttatctccttaagtggccggagacctaaaccgccttcacacatagggagacaaacctttgaccaagcaatctttgcattatgagtctttaaatcaggaccactccataagaatgccgagcagagacgttctatttccttcatacaatttcccggcagtctaaacgctgaggaccaaaaattcgtgatactcattagcactgacttgatgagctgcagtctaccacagtaagaaaggaatcgacctgtccaggagctgattcgtttccttattttttcgatcaatggtaagtaatcatgtgccgtcattgctttagtcatcaatggtaagccaagatagcgtaccgggagctgacctgattcaaagggaaagtttgatcgaatctcttcttgtgtggataattaaaggaaattatatgtatcttagataaataaaaatagaaaatatcggtatatatcttattagtctcaccttttttttgtaatgttggttcaaataagagatcaattaaaatgaggttaatacttgtaattgtcatttgagctaagcacattaggagctcttttagattatatgcatgtatattttacaatatatattatgttaaatatgttaatatacttctacatttacgtagtttaccctacgtaaatgaggttaaactctcttaccagctgatcacacaacatacacccaatgggtggggtgaaattctgaatatgcaggatttagagcgacatacgacagcccatatggatttttgccgttttcctgacgaaagcttttggaaaagcatgtattttttgcaatttggaggttgttgataaaaacaacagtctccagtcaatctcaattcaaaagttggacaataggaaaaaccaatcctaagtgtcacaacgttgagaatttgtacaaagaagaatggaagacccatttctcctacgaggggccagagtttagtcttacacatttaggagcggctcccatgatacttggctcacttttctgaagaataaagcccaatcggttgggcctgcatctttttgttttttctgcaactttatcgttttctagtttgaataagtcaccacctatgtaggagaaagaatcgtgacattagtttagttgcagagtttcgtagcttcagttgctttctttgtaaggtcaatttattgagcaatctgaatttaatgcaagtaagagttttcagtacttgttcttgcaaatctctgtttttccttaaagtgagatttgataaaacaaaattttctttgtagcttcctttattaacatgaacaataaggatcacattcttttggtattagatgtatcaatatcgttgaataacatattactttattttctatctaaacattatattaggttatgaatccttaaaacaaaaacgtaagatactattatctgatattttcatatattaaaacattttaatatttatattattacaatattatatatatattatttataaattttactcatttagcattatcgccactattatcacttttaatatttttattttttcttaacactacaaaaggccaatacatttaaccaattcaattcatatattgtattgttataaacaaaattttaaaaataatttaataaaattatctacttattcatttttaaggattacatgaagtaaattacatgaagtaatttttcactggactcgagtactaccatgcagatgaagttcttcatcacgatgttatatggatggcgacttcactgaccttgctgaacaagggactcttattgctcctcatattaaggtattgtcagatatacttgattgtcatagcctgcaataatccaaaatattcggacttttgaaacttatttttcacaaaagtacatgaagcagctgctaaatggacttgagcattgtcatgctaatcaattatacttcaccgaaacaataaatataaaaatatacttgtatcgaaagagattttaaagcttgcgcattttggctctcacggttcatgaagggaacaaattcagattcagattcggaggatataaagtctgtcattattgattatagttcagacaataacacaagtttgcaagaatatcttggtgggatgacaaactcggttgtcactgtagcatacatgtaagacataccctaaacacatgagtcatcgtgtaagatatgtttgagaaataacgattaaatcatcattgtagggccagagctcttacttggatgtgtggattatggtggagaaatcaacatatggttagtcggttgcatttttgctcagttgttgaacaatggagttaggattctgcatgcatggttctcgagtctgatcagttaaaaaagacatgtgagcctcataactaaatagcaaattagttgatgcaactcacccttttttttgtagtgttggttccacaaaataagctctagaagttgacaaatgatcggttggttgcgttttcgctcaacatttgaacggttgatcacaaatcttgcatcaaaaatccaaaatgttctatgacttttgaacctcatttttcacaagattacatgaagcaatttctcattggactcgagtactatcatgcagatcaagttcttcaccgcgttgttatatggatatcgacttcactgaccttactgaacaagggactcttattgcttctcatattaaggtattgccagaaatacttaattatcatagcctacaataatctgactatatcgtatgtaagattgcttgataagaggacgtccttaatggtatataggtcttttccaaaacaacttgtgtgtttcacttatgattacatgcgttaaaattcttaaaatcttatatataatccatatctccatgtgtaatttgtagcaaatgtggattaacatggcatgttgctcgtctctaacactagttggagtcacaatttgtctataacacgacgatgcttctcttttactaaggcttgatttcttgtccaatcttgtttagtttttcaggtacctctttaaaacatgtagcaaagtcaccttcatgatcttcctcaaactcacaccctaacacttcttcaccatcatcaaatttagcttttaccaaaaatgtaacgaaatgattcacatcttcttcagcatcacttttttcctttgaatcatcttctattttatgattaccaacacattcatactgagtatgtccgataccttttcaccctaaacattttactttctttttcttaaatgtaggaaattcgtatttgaagtgtccataccctaagcactcatgccatggcatatttgccttcttaatagctttaccttctacatgattctttttggttgagctgaacctcctatgtcctagttcttcttctactttccttaattgttgatcaaatcttttgaaacatagaggatcctcttcttctgcgtcttgagtttttctttcatgagaagttaatcccaaacactttggttttttcactttcttcataccctctagttccttctcatgagcttgaagcattccgaccacatcgccaaagctaagattatctatgttatgaggcaccgtcagggcagctttgtatgccatgaatctcgaaggtaaacatcgtaaaaacttcttcactagtttcttgtctttatacttctttccaagagtcaatgcttcttgaacaaagaacttatattttaactaaaaacagaaattgaatcacgttcttccatcttcagatttttgaatcttgaggctaacatatatttccttgagttcttcacctttgtggttctttcaaagaaatttcgcaaaatatcccaagcttcttttgatgtttcccatccctgaattagttcaaactggtttcatccaacattattttgaataactgtgagtaccttggcgttgtactttgatttcttcaattcatcattagtccctccggcttagcaactttggctccttattatccttgatttttggttcttcccaccattccaatatggttttccaagcatagacatcaattctccttatcaccaccttcatccttgattgtcaaaaaccatagtttccatcattcaatattactcttgaactattcatgtgttcatgatagctgatacggttcaaattgccttaaacctactctctcaaataagagataggttgcagtatttaagggtcaaatttcctcaaagttcttttgtttacacaatgaattgaatgtcaagattaagctagcagggaatgagtgaaataaaaagtaaacgaagtaagaaagcaacagattgattggttgtgagacaataaaataaagagttaggagtagagtactctcagaaaactattggttagtagatctaatgaatgttaagttgttatcgaaccattcttaaactcaaactctaattatggaataaccggtgcgttccgcgaaattccctattcctaaagctaagaataaccggagaagccgagagatcttatacttaaacatgcattctaaccgagttcaattgttcaccttagtagataggccgattcttattacacacttataaaccagactcatcaaataatagatccaactacagattcctatggcgagtatatctattgtctggattcaagttttagttaattactctatatctagcattaagaacaattaaagatgaagaactctacagataacttagcaaagagggcgatctactaaaccatatgaatccctaatgagaaactctaaccctaacatgcaaactacttagacatggtgattgaaacaagcaacatagttgagtaagaaagcataaacacagcaataaagaatagagtatgaaaggatttcttcactgtattggaaactgaatgaatctctgaaaacaagggatgaatagcttatgtctctctgaaaactggatgaaaagcttgataaaacttgatagatctaaacaatgacctttaaaaatatatatatgccctaataaacattcagggactaataatgcatatatgaaagttttttggggcaaatttccacttctgtaaacttgaaagcgtcatggactttcctgggccaaaactggtgtcgatcgacaccaagaatgtgtcgatcgacattcccatttgattctgaaactgaaatcgtctttaacttccttttccttagcttttgctccaaaatgtcttctcatctccattgtagtctcacttcatagaatacccgaaaagactctaaaaagactcgaaaaaaaatttaaaaaactcaaaatcctatatctaaaacatagataaaatcagtaaaaaatagggttatatcaataactttgcatcttctccacatgatctcacatgtatacaatccttacacgtgactgctctgataccaattgaaaatgcaagagctattgttgtatatggaaactgattcaagaactgagtcacaaactcgaacaagggtttcttcaaaacaaaaaaaaaatctttaataaaaaatatgtttagtaaacttacaagtttcagttaaacaattatctaatctctcacgttcatggattcctacacaatccaagaacctctcaagacaaaccccttagcacccttaagcattatgctcttttgtttgtgttgaggcttctctcaagcctaagcaccctatttattctaacactaataggaatagacaattttctttttctttatggaatacgaaattatcatttgtctgcatgtttccttttcctctcacgtaaaggaaactcttcagtcttctagagtcttctccaagcttctagtatccatagctaaccgtcttagaccgacttgctaatttccatatgtttgcttcacgttgctctgttctcctaaactacttcgtgaggtactttgacttagtacaagaacaacttcaacaacttcgtcttcattatttgccatccataaatatcgttttctgtttctcttcatcttgatataaaactcgttaagaatacatcaacaatctcttcctttcttagtgagttttataatccaagcttcacaaaacataaacttcaactactactttgataatctccaaactccccttcaatctctaaacaaggaactcagtaggttctaaaactcggtcttcacaacaccaacgatctcccccttgatgattgagttttagaaccaaaggatgtacttaaagctcatatcaaacatcttgttttgtcgtataacttcttgtactattttgtcactagtacatcgagggtgtcaaacacattcatcaacaatctcccctttttaactttgtgtgtctctcaagcatcttaatcatatgtcactttcttctccccctacttgtgagaatacacaagttaaaaacaccttcataggttggcacactcataatttccggttgaacaccttcatagatcaagttggtcaaatatgaaacttcatatgaactctgtccaaaacacgttgatcaatcaaacccaaaccaaccatcaaaaacacaatccctccgttgaatcttaagatagtaataccacgaatcttgccaccaagtttcggctagatcagactactattagattttcaaacgtagccttgaattagacatcttgaaactatttttctgcttctctagtccaaaaatatcatactttgaccttgatgatgcatatcatatcttatcttcttctttcgactcccccatagatgtatctctctctaataaccaccagagataaacattggatctgattttgaaagatatccattaaatccaagatcataccgatcagtttttccaatgttcagaatatgatgcaactgtttcgtgtcattaataagcatcctcaaattcttgtgggtttcttcaagttgtactctagcttgtgatgcttcttcttctttctctattgcatatctttttgtttcaggaagcttagcctccaacttgagtttctcccttgtcagcactgaattctcttcaactagtttaagccattgttcataaaacatcttttagttgacagtttctatctcgctacaaccttctgtcacaggttcttatgcagtaacaattgcaggttttgatgcaggttctgttgtaggttttgttgcatgttctgatgcaagttctaatggagattctattgtagttgcagattttgtaacagttcaagtctctattgcagttgtaatctctgtgatagttgcggtctttgtagcagatgcaatctttgtagcagttgtaatcatattgcgagaatacctactttctgatttatttcttgacgtactttatgcaccatgatacaaattagatttctttacccatatttgacttcggaatccatttcagaaacatttcccttgatgtttgaggctacttactctttctctgaatctgtagcaatatgctttaatgtgcccagtctttccacaaaaataacatctagtttgtttggttgcattactttcatatttgctttgatttggtagagaaacaccttcagctacaactcttaacttgaaataattaatttttttaaaaaaaaaacgttaaatttagacgatatttttttttacaaagttttgatgttttaacctttttgtgtttagtgagttttgctctttaacatatttctcgtatcatttttggatttttgttttggaggaatatggattatatcagtttggtatccattttacatgttgagttcgtagtggtatttatcaagttaacttcttcggatctggatgtcaggttactgcatctttaagtcgacaaatcaaccatttatcgaccttttgcatgagccatgcacatgtaccatattaggaggtgcatacatagcgtctcatcgttcactggctttcgttaggtggtttggagcttttggtgctctcggatcggttgaaattgaagtagcacaaaaacttttatgacactttagtacattacaaacaataaaccacgaaaacaagattgtagaaaaacgtggaaagacaacaatccatttagttaagcttatgactaaaccctcgaaggtctcttttagccgtcgcttgtcaaagtcaatgccagaatcactatagtgagtgttgtgatcactgtggcacacgcaaacacagtcattgtccggttcgagatgactttactctgcttctccaccctagagcttacctctatctcctccacaagtctccttacagtctctatgtctccatcctttgcagcgtgaatcagactattctgaatcttctctagtttcgtctgcttcgtttttctctcggctgaccagataaaacccgtcattttccagagaaggataccaacatatatcgccacaatacagtctactgtgtaatggtgtcgctctcgtatttctctctgtgcgctgtgtgccacgaacaaccatatcattgcagaagagaaacctccataagcctcctgttgataaattcaccacagaatggttaaggcgtcataacaaaatctctttaatgcatttagctgacaagtgatggaggtttaccgtccaagccatagcggttaagacagctacaagcatatgaccactatacatgagatcattacaaccacctccggctttctttaatagagcaaaccaagaagacccttcagagtaactcggtctcaagaactcactaaggaagctcattgaaccccaatcagctctatagtcaccaatgtaacttcctggatcagctgttaaaacaaaaaaagtactaataagtaagcaataaatacctaagtaataagtgaaggagactagatattaccataagctgcatcccaatgaaggagctttctaattgcagcaggatcattagcataagggacataatatttctgagcccaacgatgaggctgagaaggtacattgttaaaccgggctgaagcacaccaaggtctagctgaaggtaatatagttgatacaaaggttatagctcttaaaagacgtccaactcccatcgtgaatatgtatctcgcgcctaatcctaaacctggagctttcactgagtcgaacaccaccgagaaacccaacattataaacaacataagaaaatgatgcaatccaatgatatgtgctcttaggatttccacaagtgtcccgggaaggctctcgtttagtgcaagtaagaaccattggcctgtatcaggaagtggaggtgtttccctatcaaagataaaaccatttatcactgaattgcataaccattccaaaaacagattagtgtaatttagttcaaagattctcaatgaatgttaagtacatgctaactcaaatcaacttaaaacaattttcaagattccaaatcaaaaccatgtactattcaaattgaagataccaagtaaagactatgagtctcactatcagatcaagtagcaccaacgagctcaaaaatctaagctttgttcaaatttcaagtcaaatacttaatctttaagctaactgaagtaaaaactcaatctttaagctaacttgaagtaaaagactcattctttaagctcatttcaagtcaaaaactcaatctttaagctaatttgaagtaaaagattcattctttaagctaatttgcagtcaaagactcaatctttaagctaatttgaagtcaaagactcaatctttgagctgatttgaagttaaagactcaatctttaagctaaattgaaacagatctaaagcaataccggtgccaatctaagccaagaacagcagtaacagagcgaacacaaagagcttcaaagagaagagcacagagaaggaatacgatagaaccaaggaaaggaatagctgctcgtagctctttagaccagtgtttatagaacagaacacgagtgacgacggcgatagcaagaacagaccaaagaactggcataagacgagaatgccacaccggtgacacgtaacgcatgtaatcgattaccacgtatgacatcgcggctattccaagtccacctttagtcatctgaaggttgatgggtcgccggatttgacggtggtggtcgaagacggaacaatgactgaaaaggacaaaaaaaaggaaagttttgtctgaaatttgcaacaattgcggaaattaatgaagtgggtttaattaagctaatttttgtaatttatgagaggttttattgttaatattactctatttgctacatgtattaatgtattaattatgttgccatttttatttcttagctacattattaatggtagtgtattacttctactttttaaaatttatcttaaatatatgtagctgaacgaaataatttctttttcttgtcttcacaagagacaattagtaaaaaaaattttgtcatccaataataatttaaggctcaaacaaatcgaggaatattgacaattagttaatatatatagatataaaaaaatacatacacatatattgaaaattttggtaaaaagattattaacagtaataaaactaatatttcataattttttgcaattacactgaatttaataaattatttttgagtaaacatacacataaatctatataaaaaaatattttaccacaaattcgacctgtattcaaataagttcatataacttcacacaattttataaaaatatataaaaaaaatcacacacttaatttcatattttccaataatatgcgtatatttttatctcgctactgtatatagttactaaattgtggagaaattagaccatgtccagtggggaattcttatgagttttttagcaaaagtccttagaataatatgctaaaattaaatcagaagtcatgaaattagtaaggttcgaaccttatcttaggtgtttttggtttgggaagagtcttacacgtggccttttgttattggctgagggaagagacaaaaccaaaaaaaaaaaattctcccgtgatttattttcatttctattgttcgctttgttttgtccgaagaaacgaagagagaaatctctctcaatcatcagaagctagcatgctccaatcagattatgaaggtatgattctaccttattgattgtgtagatcgtgagtagttagagttattgatagattgcaatgaaattagggtttcgtgaattgggatttctttgatgatgatgattctgatgatttttgtttgttgagattcgttagtttattgtttcgtattgaatttggttataaaatcaacaaattactcagttatgatttcttctttgttttagtgaaattagccttgatttcgtattggttctgtcttttaatgtaggaagataataagtaaagtttgagattagctaacacacttctctaattgataacaaaaggtataaaaagagatttgttgatgcaggagttagcttttgtaatattctgtgtttgtgatttactctgtcattggaagagactatgtcttgcctagtataatctctatgtgcgaaactagattttctatccgattgatacttgttagaagtataaagtaaaactcaatggcttttgtagtcaacgggaatgagtataatttggcttactatctcactgatgaaatttatccaaaatgggctacatttatccaatctatttcacttccacaagatgaaaaagcttctttatttgctacaaatcaagaagcttgccgtaaagatgttgaacgtgcatttggagttttgcaagctcggtttgctattgtcaaacatcctgctcttatttgggataagataaaaatcgggaatattatgcgagcatgtataattcttcacaatatgatagtagaagacgaacgagatggatacactcagtatgatgtatccgatttcgcacatccggaatcagctagttcttcacaagtggatttcacctattctacggacatgccttcaaatcttggtaatatgatggccactcgaacccgacttcgtgatcggactaagcatgaacacttaaaagctgatttggttgaacatatatggcaaaagtttggtccgattcaagcttaattctaatcgtcattcaagtttttcatttaatatgtttgttttgtttttatgttatgtatgtttacaattttaatatttttaataattattgtgttttgtaaaataaaaaatattataatattatattttgaatttttttttaaaaaagcccgcttaaagattccaccattggacaacaaaaaatataaagattcaacaaaaattctaaactttcatttattcaaaatctaataataaaaaattctaaggattccttaaataaggtactccaatggggtgctcatactaaaatctgtagtttcccaaatcttacaaaacgtaaaaccagatggcctatgtaatttcactcaaaggcctaggcccatttaaaccaaccaaacaaatattgaacggcttcaagtgtcacacctgaacacgtgtcaacatcacattgcgatttccatttttcgttactctactccaatttccattttgtcttgttatttccatatccttctctatatatacgcagagtatcaatcaatatcattatcatcacagattatacaactcattgtttccgaacaaactagggttttgtttttccgttcgatttcagatactgatttgtcgattatgtttctagtacgtaaacatcttctgcaactgaaatccaaaagaccaaagaggtcgtcctcgtcgtcgtcttgcttcgatgatttcgtcaagagattacaaaaccacgctgcgatgttaaaaaagcatcttactacgcaactctttcagaagaagaagaagaagaagcttcatttagtccttgacttggaccacacgctactccactctgttctggtttcagacctatctaaacgcgagaagtatctactcgaagaaactgattcaaggcaagatctatggagacgcaacgtagacggttacgagtttatcataaagctacgaccttttcttcatgagtttctcttagaagccaataagctcttcacaatgcacgtttacacaatgggtagttctagttacgcaaagcaggtgttgaagctgattgatcctgataaagtatactttgggaaacgagttataactagagaagcaagtccttttaataagtcacttgatcttcttgcggctgataaacgtagagtggtgattgtggatgatacggttcatgtttggccttttcataagagaaacttgttgcagatcaccaaatacgtttattttaaagtcgatggaaccaagtgggattcgtacgcagaagcaaagaaagatgagagtcaaagcaatggatcattggctaatgttctgaaattccttgaagatgttcacaaaagatttgaagaggatttaggttttaaagatttgaggctattgataccttgtagacaatgctgctactgagttacagtaagtatatttgatccagagtgttgtactcttaaagctagttagagattagaatgtttctagctttgtaacaagctcttgaataaatatagttttgaattttattgatcatccttcaaagtccacttagcagtacactagtgtgtccaaaactcaaactcattctcattggaccacaaacttataaagatgaacaaacccataacaataatttcattacatccattttatatatgtccttatgctccaccataccatcagatcaacaactatatatgatagctgagacaaacaaatgtagtgaaagaattagtcataagaaaaaaaccagtgactttatggtcaccacaccccttcctaacatcccttcttctcactgccgatcatcgtcaaaccttctccggccaacgtctcaatgttatccggtgactttatggtcaccacacctccgcgattctctctcaccgcatgtctgttcctcgacaacaaaacctaaggtttcttctcggactcgttctgctcatgacggcgtcattgctctctcacgacgttgtcgaaaacacgagccactctccggcgagaatctcgacgtctttcttgtcgcctatctctgaacaccactagagctcacgacaagctttctctgccaaacccagatttcaacagaaatcttacatcttcttctcttttcaacttcagcgaatctatgtctctaaacgagcatagcattccatcttccttgagacataataaccagattcatcattctcctctaaaatcgctcttctagaagcttctacttcataaagacgtgacctttttgacaaagcttgcatttctccttggaaaaacttgaatctttctcacggaaacctgaagattcagagcaaagcttgagactttacgcacgaacctgtgctctgataccactgtagggtttttgacaacctctataacacctcaagcttaaaaccaatgtcataaacatcaacgcaggtcacagcaaaacagagcaaagcatatcatagaaaagatgaagtcgaaacagaacagagaaagagaagaaagaagagaggagctgatacatatgcggcccaacacccacctattctatatcaataccaaaggaggagcaaggcccagaagcctgtgaagtgaagtcaagtgggttaagaagagtaaagaaaattccagataagagtcatggtttaattggagttacttaactacagtaaggaataaccatgattaagtaggtggcatcatctcattgcatctcgccataacggtgcacttgcgtgaggaggagatcacaaaagtagtataagaagtatgagagggcatagagagagggtatccagaatctggtgaaagtgtacgggggaggggagagactccattgtaaaactctcaattttgtattcctttcaatattaatacaagtatatgcctattacattgtttgatccctagtttactgctctaatcgtatcaggagcacacaccaagttgttaacccggttcatggcgttaacgagccactacatccggtcgggatcaacagatccccaatatatactataatcagagacaagtttacaaagatcactcaagtgacatctttggatctttactgctaccaaagactcactcataacactctgtaacacttaagataactctccccaagcttacactcttacaagttttctctctacccgattacatctctctctttacattgtgtctctctgtcactcttctttaggccgcttggcttgcgacaaccaaccttgtgtgtcttcaagagtacttatacagagacactccttagacctaatgcttctaccaaacgctccttttgcaatcacaaatggacaaagtgtccttcttggccagcaatgcacaaggctcctccttgtggtcccaaaagcataactcaaccagagattaatatacatttaactctagttagctttctttatttttccttgtatatttgaacatattgttctcatttcaacagtaacaagttctcgaataaatatagttttgaattttattaatcatccttgaaagtccacttatccaacaagctttaccaaagaggtttatcaaaatcatatgaacctaaaaacaatattagccgtacactcttgtgtccaaaactcaaaactcattctcattggaccacaaacttataaagatgaacaaacccataacaataattttattatatccattttatgcgaacaactgtgcaaaaaaaaaatctaatcatattcctgaccattgaatgacatgaattgagttgcagagacatagattatacatcaatgatttgtttttgggtatacttgtcatgaacattcatacgttatcattggtcattttgattaatattatctttattttctattgtatataatggatgaagttctatatatacaatttgaaacaaatattttattgcatcatttcaaacatattataattttaagaaggattagtgaaataacgtgcctaacataattctaaaaattaaaattctatatatatatatatatatatatatataagaaaaatagagtatatatacaaaataacatttgacttgaaaagaataaacaaaataaccttggaccaaatagtactagtctggtagagaaattttggtaatgagactttagccatggagttctctttctctcttcatctttgacacaactcatcttcatcttcaggttcaccatgtcattttctttttctcttttgctctctctctcctagaatatcttcaccacctctcatataatatatcatcatatctctttattttgttcacctacatgttcctatctttctttttccatagaaatctctctatctctcattctctcttttctctttttgcctgaattctccatcattgtcgttgtgataagagattagatatgattttaaaacaaatgtatgattcttaaaatgcatgtattttaagaacaaaacatgctattaacactgatatattaatatttgtcatgttatccaacaaaaactcatgaaatatataaatatttgtcatgttatccaataaaaacccatttaattttgtaacaattctatatatttgttaatacttcgtattctataagagaattgcatactttttataaatatatcatgatatttaagagaaacacattatttcagtgtatatatatcgtgtatgtatttaaaagaattgcatgcttttttgtaaatatatcatgatattttagacaaatacataaaaactttataactacaaccagcgacattgttgtaagaaaaaaaatataaggatattttagtattttctccactctagaaaaggttatttacctatgttttgtgaaacaagactattctcttaattcttttcaattttatagttagtttctaatattacccaaaaaaataactaatagtttggattctcctctgattttagtctctgatccaattgttatttttatataattatagtgaatcttaacaaaccgcctaaatcaaaagatttcaaaaataccaaatcactttttcaagtttctatattcacgggtggtacgtattcaactattcttacacgaaataaacataaatatagataaaacaaaaaactttaattgcatattttgttgtataccaacaaatattagtctcatataataattttacacataataatttatttaattattttattccgcacatagtgcgggttcttatctagttaagaggtataccatatgcatatatttttatcaaaatattaaagtttgtttttaagatgatctatagacatatgctatatttttttggtgttattagtggatagcctattttgacattataattaagaaaataaccatatgtcagaaatgttggataaatgactctttttatggtggagtaggagtgagtaaaagatcaattaatcttttgaaattagactttttacaaaatgatatatttgctttgtaagttgttgtaaagattcggtgaagaaaaatagccccgacagtggaagcggtacaatgatcttggaactataatgactgtggttatagaagtgatggtggcttcagagaaagcattggtgatggaaaattgggggaggaaaaatagattccatgatggaagtgatacgaatgaaagtgacaaatgaggttatggaggtggccgtagtgaagaaccgaatgttacagatttggtaaaggaggtggtggttgatgttgatatggtggtgatggttacagaggaagtgatgatggagaagatcaaacctaagataaagatctctagtggtgaagatcaagaaaaaaaacagaaaaacataagaattctaaaaattacatgtgattacgtaaaaacaaatgtaattctgttgaattttgtgaaatgttggtaaatatatagatttgttttaatagaatatttttcaaaaatactacttgtatttttcaatacacatttggttaatagaattgttacagaatatgacaattctaaaaaacacggttttaagtaaaaataacatgtatctaaaagaaaagtatatgtattatgtctaataacatgaaaattatgtaaaaatacatgagattttgttgaatctcatgaaatattgataaaaatatatagatatttgttttactagcatgttttccaaaaatactacttgaatttttcatacagatttggatctaagaaaccggtttatgagtcacatgatttgtgtggtaattgtagaacatgatgatgggttacgaaaaatatcgaaagagaaataagaggatatggaagtgaaagagatatgcaagagtagaaagaaacatgtggctcttgaaatcaataaaggtggaagaaattgagaattctaaatgaccaaaagggttagtgactttttctatagagctctatcccaatgttggaggaaacaagaatcgtagtggcggtggagttgaagatggtgttgatgatgatggtaccatggtggaaagattaagtttgaggtttaacaatggtggagagagaaggataaacaaaagagagaaagaatgaatgaaggttatatatgtcatttttatgtagttcatagttagtttcttaatcttttcaagtaaaatgttagtttatgtatatatactctactttttcttttgtataatataccttgggacaatttttataacttaagaaattaaaattttaagttatatttattttgttaatattattagttttttttagtttctaaaattgtataattgtattttgattgttaattctatgatttcacccatagtatataccatcatgtattaatatcgactcaaactagatccactgtataatcccgtctagtaaaattaaacatcattttgccaaatttctaaagtttcaatatttataatatttgaaatattagaaaaatcaatatcgatccaaacttaataattgtatttttattgttatatctaggatttcacccgtagtatactgtcccgtattaatatattttaaaatatttataatatttaaacttcttacaaagttcaagttttataatatttaaaactgcataacagttttaaaattataaatgtttcaaatgttttataaagtatagctttttcaaagttttaaaaattttcatatttaatttttaataaagtttaaatattttaaagatccaattctttaaaataaagaatcagagtacacaggatattgatagggctgtgcaaaaaaaccgaaaaccgaaaaaccgaactgtagcgaaccaaaataaatggtttggtttggttatggttttgtataaaaccctatttggttgtaaattttatttaattttcggtttaggtttggttttgttaaaaactgtaaaaccaaacagtttttttggttttttattaaagttaaaaataattgtatatatactagatattgacccgcggtacaccgcatgtgtatatattcattgaaaaattataataatttttataagaattataatttgtatctgaataatatatttaaaataatataattttcatctatgtaaagtatgggtaatttatgttttatattttgatatttgttgtatattagtttattatgctaaaattcagtattttttgggtttgtggttttggttttttttcttagaaatgataaaaatttaaaacttgtattatctaatgaatgtgtaatatggtaattaatattgtacatttgatttgttatctttagtttaattagaaaaaagataaatctaagtagcatcttaatttgactataattccaaaaaatgtttatataacaaaatcctaaccctaacctaaactaaaattctatataaatcacatgccgtcattaactcttttttcttaaactctcttcccctacgtgccttccctgcaacacaaacttcaaggtatttttttttctattttttgttctctttgtcctattatagtattatctcttatcattcatcacaattaatattcgtagatgccagattcaagtcaagacactaatccctgtgaaaaaaaggaatgcaaccgatgatccttcttcgacggccaaaaaacaaaatgttcaacggtcggatgtatgggaccactttaccaagctcaaaaatgatttagtaaggtgtgggtgtaactattgtggtgcaatacttgggtgaaaaccatctagtgggacgagtactttgtgaaaccataataaaatctgtaaggcatacatcaattttaaccaatttgaagctcagaaaaagttagctcaaaaagaatcaggtggtttagatgttatgaaatattgtccaattgcttgtcgaagtgcattagcgaaaatgattgtgctggatgagctgcctattgttttcgttgaaaaggttgggtttaggaatttttgtagtatctatacctcattttactattgaaaaaattcttttcaaagatcaatcattatagatattgtcgagctgtactatcaagaaaaggctatgttaatgctcttttttagtgcgtataagcaaagagtttgtctagctacagatatatggttagcgccaactactactaccaatctttaagatgacattttagagattgaccgtggtatatcgtgggtcgatattttcgttagaaagttagagatttttattttaactaatattatttatatatgaataacatattaagaggtatactacatgcctataattttatcaaaaaaataaataaaattgtctttaatatgatctattgacatatgctattgttatttttaatatatgatccacattggggcgatttttataactaaaaattttaaaactttaaattttatttattttgttaatattgtcagtattatttagtttttaaaattgtatagttgtattttgattgttatatctatgattttacccgtagtatgtcgtcccgtattaatatatttataatatttaaacttcttataaactttaaatatttataatatttaaaacttcataccagtttaaaaattataaatatttaaaacgttttataaagtatatatgtttcaaagttttaaattttgtaatattatttttaatattttcaaaattttaaagattcaattctttaaaataaaaaatcatagtaaaccagataacactttaattttggatgtctgataaatcaagcttttgcacttatttttttcttcatcgattaagtaatatatgttagtttttaaaaatttgaattacatcatatgcagaaaaattataatattttattaactatatgtattttatatagaattaaataaattaaatataagaacaaataaatttaattaatgatataaatttagacaactatcttttttagatatattttgtaagggctaaatatgtaatagaggaaaaagttaataagtatttaatgcaaactaacgaattataagttcttaattattgagtatttgatagaaatagaatttgtaaggatcttaatggtaatatttaacaaagggactttggctaaaacctctaccaaaaacgtatatgtagatttttgagtaaacatatacagaaatcttaaaaaaaatattaattttgaccccaaatttgacctgtattcaaataagttcatataacttcacacacttgagaagaaattacgaaaatcagcagtttcccgaatcttacaaacgtataaccagatggccaatgtaatttcactcaaaggcccatttaaaccaaccaaacaaatattgaacggcttcaagcgtcacacctgaacacgtgtcaacatcacattgcgatttccatttttcgttactctactccaatttccattttgttttgttatttccatatcctcctctatatatacacatagtatcaatcaatatcattatcatcacagattatacaactcattgtttccgaacaaactagggttttgtttttccgttcgatttcagatattttgttgtcgataatgtttgtagtaacaaaacatcttctgcaaagacggaagaggtcgtcctcgtcgtcgtcttgctacgatgatttcttcaagaggttacaaaaccacggagcgtggtttaaaaagcatcttactacgcaactcttttctgtcacgaagaagaagaagcttcacttagtccttgacttagaccacacgctactccactctgttctggtttcagacctatccaaacgcgagaagtatctactcgaagaaactgattcaaggcaagatctatggagacgcaacgtagacggttacgaatttatcataaagctacgaccttttcttcatgagtttctcttagaagccaataagctcttcacaatgcacgtttacacaatgggtagttctagttacgcaaagcaggtgttgaagctgattgatcctgataaagtatactttgggaaacgagttataactagagaagcaagtccttttaataagtcacttgatcttcttgcggctgataaacgtagagtggtcattgtggatgatacggttcatgtttggccttttcacaagagaaacttgttgcagatcaccaaatacatttattttaaagtcgatggaaccaagtgggattcgtacgcagaagcaaagaaagatgagagtcaaagcaatggatcattggccaatgttctgaaattccttgaagttgttcacaaaagatttgaagaggatttaggttttaaagatttgaggctattgataccttgtagacaacgctgctactgagtgacagtaagtagatttgattcagagttttgtactcttaaagctacttagagattagaatgtttctagctttgtaacaagctcttgaataaatatagttttgaattttattaatcatccttcaaagtcattctcattggaccacaaacttataaagatgaacaaacccataacaataattttattacatccattttatgcaactgtgcaaaagaaatctaattatattcctgaccattgaatgaaatgaattgagttgcagagacatagattatgcaacttaaacacacgactaaggaactttgatatcacacgccaccacatggaagacaacacttcttgccaatctgaataaagaaccactgtaacaggtctggtcgatcatcttcatcttttttctcggacgaggactcgggcagtggcagctctggtggcaaatgcctgtggaatgcatcaactgctgcagctacaccatcctcgttctccagtactttcgctagctccatcacttgtgatttcacctgaaagcacatgattcgtgtcctatgatgtctatgctttctagagaaagctttggaggttttatggaggaggcttaacatcctccctaggcttggaagatattaaaaaaaagggaaaagcaagtttgtgtacctctggttgtagcatgaatcttatggagctactgaggttctcaacactgagctgagctatcggtattggcgcaggcccaagtcctttctcatagatcctgtcaccccagaagaactgatccccaaagaatggcacgatcgttgttggacactgatgacacaaatggaattcataagaatataggaagtaacaggtttcatatggtcaataaaactgttaaagattccaacacaggacacttcggtgatgagtatgaaagaaagcaacttaaatgttataccccagcttttagtccagtcgctgtggttccagcaccgccatgatgaacctttatatccacaacacaagaaacagcctcaattagaagataactcttcggagatgtgaatgtagtaatatattgaaaatctaaagagggcttaccacagctgaacattgaggaaacaaccaatcgtgaggacagtcctccactaagaatacattttcaggaacttcagtagcaactgcaaaatgttagttggtaaaaatgtgtcaggaatcagtataaaagcaagaagaaaaccatttcagtacacagactcaaaatagaaggtacagaagctgcttacggtttccaaggccaccccaacctcgatcaactatccctctctgttctgtatctttcaatgtttccagtataatgtccattgtttgttttggatcatcaagaggctggtagtgtaaaggagaagaaacaagaaagcaacaatactgtgagctgaggctagcacatcatcagttaaacaaacaagagggaccagggccataatatgtagaatataaatatattgatcatatacagtataacttgtatgatgcgctctaagttgatacaagaatttagtgcctaaccaataataccaagatccattgtcaatattaccaaaagaaaggaacaaattttcagacaattaacggtcttcggcttaccatgcttccaaaaccaatatatacgggcggtgatcctctttctatccagtggagaaactcttcgcgaggctggtacttcgatccaaggttcaggaaacagtagccaacaacatcaactaaaggaccccaatctgaaaattagtcgaacaaaagcaaattctttcagatatctatcatctaaaacgataaatatctcagactaaaaagaatactacacatccaaaatttgacaacgcattatggtcttgagccatagccaggagaagaacataagctttgggaccagaataaaggtacaatgcaaattggtagcaaggaaacatttgataaacctcagcggaattgatgtacttgggatgcagctgtgctcttaccacttggttttggcacaacatggggactccacatgtaaccagtaggcaagtgcgaaattgagccatggtatgtgctaaaatatgcgataggtgcaaggtttagctttctcttcctaaaatcatttatatatgtccttatgctccaccataccatcagatcaacaactatatatgacagctgagacaaacaaatgtagtgaaagaatcagcctcataatgcttttagtcataagaaaaaaccagttaaggccaatccaaataataacattacccaatatgcagcactttgaggaacacgcgccaacgggtggggaaattcattggttggcctgtctacaggaagaggacgttagaaaacaggaccaaaaaacacgtcaaggcaggtgcaccgaccttgagattaaaaagcaaagaagtcaactcacgtccaaggcattgtgaaaaaaatatgaattggtactccaagagcttcagcaacatgcacatgtcctgcaattagaaccaaaaccataccatcagcttcataggagtaatgaaaacaacagaattgtgaagtgggtgatggacttaccatatgcaggaggatttgcaattatcgcttgagctctgaaagacgtagcagtttccaaatcaggctctatgcatgccggaagaagagactctataattgccttcaactgttttctctgttttgatatttctgaaggcccagagggaatgagacctttatttctagccatatctacattcaaaaatacgcataactttcattttaatcaaacgcaaatgaagagattttctgacagcttaactatgtttccatattaggcttacaggcagctaactctcggggatcaccgcccaagggataaaactctactccagcagcccgtacaaaagagcggaaatttgcatgagttgccaacctaacacgatgaccaaactcctgcaacgaaaacaaaaacaacatataactctaacctttctcaatgccaatgaccaattcgttcaaaatgtctcactaaatgcttaaaaaatattgggatccctagctctaggggaaatgagtcacgaacatgtatgaggaagagacgaagaaatcaaacaaaattaaaaagacaagaacacatggtatagctgtataggcacatgccaatgcttgggtagagccatttcatttgcagcatactatgtgcagccacataaaaattacatatataatggcacaatgcttcccactgttcgcaatatgatacaaagaatgaggaaacacttttacaaatacctggaggcgctttgccatggccagaaaaggctgcacatcgcctcgagttccaaccacaagtatagcaatttttaaccttggaatggatctaaaggactcagttaaggacttttcatatgtgattgtggactgccctttcgttggctcaaactcccataactccgacaccggagtaccgttatctataacttccactgtcccgtcattttgtattctgactagctcaacaatgagtttttgctggaaccacaagatattatcaaaaagaaatcatgagaatataataatgatttcagtgtaccgcattcaagaaacatatcctagtgattctaacagcacaaatagagattcttcacttgttaatatccaagattaacaccattgacaatatgtatgtggataaaatgtttgtcttatgttcatgctcaactgaatacatgagggtttagtttcctaccttttcttgctccgacaatctatctaatttaagattatgaatcgcaggagaccctttctctgtcaaggaccgagagtactgaatctcactgtcattgataagcatatctccatagagaccaacaggtgcagtttcacagtggtctagtccttcaagaacatacaatcttgaatcagtggttatcctctatttcagaatacaggtaacacgacggagaaagtaacaatgggcaaagtgcaataacaaggttgaatagaggactaacccctatgcccatcagaagaacgatgaccagaatcctcaggagtagtatctacagaaccagatgtttccaataaactcgctttctcgctctttacaccattatcttcaccctctaattcttgaagtggatgatcaaatacattactagccatcacctttaaaaactgaattcaactaaacagctctcactgcctaaacccacacaatcagctgcagcaacaaaccacctacatatggatcaaactccacaaaagaacatctatacacactcaaagaatttcactattcttatacatttattcaaccatagtgatgctaatggctctcctggcaaatgctgtacacagacgaatcaaagcttgaagcaacaaccagtcaaatccttaggtacagaaagttagctgcactttatataccaaaatccaaaagagagaatcaaattaaagtattaaagaaatcggaaattggggtaaacagttttatacaaaacgagaacaccatggaacaaaagggtctcacgtttagctcgagaatgagattacccactacgaaaggatcaagctttacttgtaaaactcaaagtataacacaattcaaaagcaatttacacagaattgaatcaaccaacatcgagggtttcatcaacaatggagtttatgatagaaagattgttcctttacctgagtgaattggaaaaggagagaaattgattagtgggttatctctgtggaagaaagattgtttctgggtttgtggaattgatgaagaacaacttgaagattccaaagggtttggagacttttgaatcaaccaaatgtggtgagaccgccgatgagatatttattaataatcgcagaatataaatatcaatgaattcattattaatgccaccgaaacaaaattaattggttaggaatttggagtagttttaagtcactgatactacgacttttcgttgtcaaaaaatgatattctttctccttaagctaagaagaaacattgagaaaattaatgttgttattctaaacagatttttgggatcaacaagatgattttgtatagttctaggtagtcatgggcattcaggtactcattcggattcggttaaggtgtttcgggtattctggcgtacatgtataggatcgttcagatatttatagacatcggatcggattcgaataaattatcatcgggttcagatcgggcatgggtgttatccgaattccaaaatatgtttcgagtttgggttcagttttgctcatatgtacccaaaacataaagtaattacccaaaatcaatatgaaactatagaaaacccgaactcatataaagaagtagaagttgtataaccaatgaaatgaattaaggacaaagcaaaaaacatctaaaagtctttgaactagtctaaacgagaaagtagaagtttaagacagaaccaaattctgtatccaacaaaacaccaaataaccaaacattaaagagttcaaaaactaatgagcctaataatttctacatgtgacaattccaaacatcaaaaacccaaagcaatagccgatacttcataacttcatttggcttgtaagacatcaaatgaccaaacattagggtgggatccacggcacatggtttctagagacgctaaaaaagtagaaatacgattgcattgcatgtacaaacagatgcgatcatatcagtactaatacatcagatccaatcagaacttcgcagttaagtgtgcttgggcgagagtagtactaggataggtgacctcccgagaagtcctcgtgttgcatccctcatttttgttttggttaaaacattttaactctataactataaaatcatgaggccaaacttgccatgtgatagcttttcgaaaatcccaatgagagccctccgacgacagaagcaagacaatgatatgtactattatttttttttactccagattttgacctttctgtacattttcgggcattttcgggatctgtgctacattacgggaccaaaattatttgtttggacgttgttttcaaaaaaaattcatgtatcaagcctcgcaaacctagacggggtatccttacgtagcgggttggacccacggcgaatggttcctagagtcgccaaaaaaatataaatacgatttcattgcatgtcctaacggataccattataccagtactaatgcaccggatcccatcagaactccgcagttaacatgcttgggcgtgagtagtactaggataagtgacctcccagaaagtcctcatgtcgcatccttttcttttcttttttttggttaaaactttaacttttaaactatgcgcccaaacttagcatgtaatagcttttcagaaagcccaatgagatccctccgacgaaagaagcaagacaatggtaactactattgtttttttttttggttccaaattttgacctttaggtactttttcggccttttcgtgaactgtgctacattacgggaccaaaattatttgttcaaacattattttcgcattttttcatgtatcaaacctcgttaggacctgatggggtatccctatgtagcgggtgggacccacgacaaatggttcctaaagtcgctaaaaagtatagatacaattgcattgcatgtcctaacggatacgattataccagcactaatgtaccggatcccatcagaactccgcagttaagcgcgcttgggcgagagtagtactagaatgggtaacctcccgggaaatcctcgtgttgcatccctatttttttttttttttggttaaaactttttgactctataacttttaaaccgtaatgtaaaacttggcatgtgatagtttttcggaaagcccaatgagagccctccgacgaaagaagcaagccaataccattgtttttttttcgactacaaattttgatctttaggtacttttttgggccttttcgttccgtgctacattacgggaccaaaattatttgtttggacgttgttttcacattttttcatgtatcaagcctgtttgagactagatgggttatccatacatagcgggtgggatccacggcgaatggttcctaaagtcgccaaaaagtataaatacgattgcattgcatgtacttacggatgcgatcataccaacaataatgcaccggatcccatcagaactccgcagttaacatgcttggacatgaggagtactacgatgagtgaactcccgggaagtcctccaattgcatccctccttttctttttcttttttgttaaaactttttgactctataacttttaaaccgtgaggccaaacttgacatgtgatagctttttgggatgcccaatgaaagccctccgactaaagaagcaagacaataccattgtttttttttcgacttcaaattttgatccttaggtattttttgggccttttcgtgatccgttctacattacgggaccaaaattattcgttagaacgttttttcgcatttatttcatgtatcaagcctcgttaaggctagatgggatatccttacgtagcgggtgggacccacgacgaatggttcctaaagtcgctaaataagtattaatacgattgcattgcatgtactaacggatgcaatcataccagcactaatgcaccggatcccatcagaactccacagttaacatgcttgggagggagtagtactaggatgggtcacctcccgggaagtcctcgtgttgtatctttttttttctttttgttttttggttataactttttgactctataacttttaaaccgtgaggccaaacttggcatattatagcttttcggaaagcccaatgagagccctgcgacgaaagaagcaagacaataccactgttttttttttactccaaattttgacatttaggtactttttcgggccttttcgttccgtgctacattacgggaccaaaattgtatgtgcggacgttgtttttgcatttatttcatgtatccagcctcgttaagactagattgggtatccctacgtagcgggtgggacccacggcgaatggttcctaaagtcgccaaaaaagtattaatatgattgcattgcatgtactaacggatgcgatcatacaagcactaatgcaccggatcccatcagaactccgcagttaatatgcttgggcgtgaggagtactatgacgagtgacctctcgggaagtccacgtgttgcatccctccttttttttggttaaaacttttggactttataacttttaaaccgtgaggccaaacttggcatgtgatagcttttcggaaagtccgatgagagccctccggcgaaagaagcaagacaatacctatgtttttttttcgattccaaattttgacttttaggtatttttcgggctttttcgtgatccgtgctacattacgggaccaaaattatttgttcggacgttgtttttgcatttatttcatgtatcaagcctccttaagactagatggggtatccctacgtagcgggtggaacccacgcctaatggttcctagagtcgccaaaaaagtataaatacgattgcattgcatgtactaaaagatgcgatcataccaatactaatgcaccggatcccatcaaaattcagcagtgaagcatgcttgggcgagaggagtactaggatgggtgacctcccgggaagtcctcgtgttgcatccctcttttttttttggttaaaactttttgactgtataacttttaaaccgtgaggccaaacttggcatgtgatagcttttcggaaagtccaatgagagtcctcaagaagcaagacagtgggtcagaataccattgtatttttttcgagtccaaattttgacgtttaggtagttatatacactcatatctttatttgttatcttcactaaacatttcaaaacgagcactcaaaacgaaaaaacaaaaaatgcattcattcacaagagtcgacgatctcactccttatatcaaaaatggtgtcatttgtgttaaggtattggtttttggtatgaaacttttgggaggattaaccaaatattttagatgattcttgcggatcaagaggtgagaatctaaattggcttaaacattctttgttttgactttccttgtaaacgttaaaattattttgttattccttaggagacaaaaatcgaagctacgattgccggtggttcttttgattatgataatataagcagtctaagagaggataaatggtacttcgtattacatttcttggtcctttatttttcagatctgttgatggacacgtccaatatgttctgtattcagttttatcgaccgacaaagatgactagcacaatggagcttagccagcgtggatttttcgagcctgaaagatttagccgtatattaggatatatgatcctcaccgaattccctattgataagttttacattttactctcttcttccaaaatatctgctaactaactaaatctaagccacaacatgtagatgttgatagatttttcgtatatattggtggcctcaaaagaatcccttacgcttgtggtctattcgataggaaaaatggatgcaactgtgtgtatttcacactacaaaattataggtacttactattgatctttgaatgctaatagtttcgtaaaaatgtttacctaagtttggattgaatatcttaaggggatcgaagttaagatgttgtgcagtgggtgatttagccgattattttatgcgagtatgagttaatagaaaatatgattggtcatatcgtcatgatcctgtgttttttcttttgtgatttttgctagccgatgagtacaaaggtaatgacttactttaagaaaaaaacatttttaacaaactcaacgtacttaatatattatatgatcttagagatttgtaacttttttaacaaacaatgtctcatataaaattttaaggtaaacaatgtctcatgaattggggtggatgtcctatatttcactttgaccaggagttttacgaccttgaagagatcaaggaatggtacatttggttttgttttggctgataacttatcaattttaccttacttaccacactgacgacatcgtttgtttgggctgcaaggaatgtaaggaatgtacaatattcataatcggatgattgagtgttatcgataaccctatcaaaatatttgctgattttcgtgatgattagtcatttgtaataattttgggataagttaaattcgataaaatattgttaacattcctaatttgattttcgtatccatataatttaagagacaacgaattaaaagttaaaactgtaaaatatgttttaattttcaacatatataagtcagttaatattttatatgaataattgtaacgttttagggaaatcatgtatcatgtatttgtttttagggaaaacatgtcttttgaattgggttagatttactagattttattttgatcctgaattttacgaactcgaaggagatcaaggtacggtaatatattcatagtttatcaatataaaatgatcgacatgttcgagtttgcttcggttgataacttactgttttgatgtatagtacactcacgatggcttttgcttgggctgcaaggaatgcacgaaatgaaagaaatcttgaatcaaatgattgagtaattacgaagatgaaaagtgttgaatcattttggcgttttaagccttaacatttatggataaattgtttgtaataaatttggtaccttttaaattcactaaactatgtctaagattggtaatttatttttcttatcgtgatattatcttagccacgaaaggcagcgggtaactctcctagtttttgatacactgtaagtcattagctaaatatttcttaatactagagaacttgtagtacatatatttatatttaaaaaattatagaatcatattaactcaatacgattactagataatcgtttatgttttaaaatttatagaatcaaataacccaatattgtccaaataattaaaatttatgttttttttcatcttaaaccccaatattctctccataattaataaaacaaaactccacaaatattaacacatatctcaaaatgttctattcttgattttgaagctttccaagtgaatcaagagcttcggtgcgagtacgaacaatttggtggaagacatccctcactttcctatcaaatggatctaaaccctcctttatagcttcacacacattcatcaattcttgaactctctccttcacctctaaagtacatttttcatctgttaatgagaaattgtccgaatcaatcaaatcacttaacattctcgagtttctctcgatttgattaatctccctaagtagtccacaacccttcttctttttgtctcttttctttgattcgtccataatcttatcgtgcaaggacatgactggtactgcccattggaaatgcctagggaaatagaaatggacatgtaaaccacgatcttgacaaggtatggctgcgacaagaacccaagttacaaacaacagtattgatgtcattgtatacactgtgagagctaggccattagtcgccataacatcgctggctcgaggggttgctaagttatttccaatgccttgtaactgccttgatgccgaccacgaccgagaaacactccaagaaagtgacctgatatagccaatgtgttgattatggtccttgttgcgtgtgaaagagcgattacggtgggtgttagaagagtctttctcgtcgagcattccaattgccaaatcaatcaaagctttctttgcacggtggatttctccttctccaagttgtctttggttcgtgtccaaagccgatattacgatttcaattagtttctgccactgtcggatttgctcgatgccatcacgtatcgcattgcatacatcaagagcttttacactcctctcgaagtattcttctatcaagcggtccattggttgtttgaggagctgaggtttgtggttgaatattataactcggaaatcttcttggcaacaaagaaaagaatcaagaagtttccctatccattcaagtgagaggatctcagcctcatccgcggaggcattaagatcgatgaatttttccgcaacttgtctttgaaaagaatctaactctacctccatggtcataggctcagagaaggatgttggatccattaagtgtgcttggtctcggcgcaaactaaggaatgaccttccaaacgaatattctgtctctggcatctttgaaatatatgaaaaattggtttcaagggataaatttaccttaggaagaaattggtgatgagaataaaggagagggatttgtagcatgtttaaatgtttcctaaactttcttcttttcttctattttaagtaaattcagtttagcctttattttttagccctttaatttgcagttcatggttacaaaaaaaaaaaaaaaaaactaaatatctctaaagtaaatggagggatgtgaatgtttttgagaactatttttaaataataatataatattgttacaaaaattgttatttaagggaaatattttgagaacaaattaaaattgtttctatatcctcactattttgttacgaaaaataaattttcgtaaagaaatttcttaaaagtatttgctggaccattttggaatacatatcaaaacagaaagagtatgatccaagcaaagcttgtgttgtgaagtagtgcggtaagctagtcgtaaggaggcgttgtgccaagtctttcgagagtattgaagagtatgggcaagagaataacaaagggtctcttgtttcctcaatgttggtacaatcaacctgctgtctcgtgttccacttgttgacccgatcccctgctgctggaccatgacatcaacgataagtacattatcagctgatgtgcaatcacgcgatgtaagacatattccatctaaatctaaaacacggtctattttgacattctagcattcacatgttaatttgtgaagacgtaacgaactaattaatatatatcatgtgcaacgtttcttcatatttttcgtacgtattcaattttagaccgaattaaatacagaaaatggtacgtattcaatcgttgttgaaataaatgtgcttgggtcgttttcaatgcatgcaattaatttctagcatctatatatatgtgcaagattaggttctttaatagaatttagcttaatgagtttaacaaaaccatttgatttccttctctctttttgtttccgagctcctacaccctctctaacctttgattcttatccttctcttgagtcttgatcaccaccaaattattctcgcaatttgaccatatgacctttcaaaatggttaaacttcgaatttttttaccttctttatctccttttgagtctatgtaaatcaccatcccttaaggtattttgagccaaaaatcttttaggaaaaaatcacttagacttttatgaatcaaaaccaaagaatttttacgatttggccaaattgtaagctttttcaacctatataatcacttcctttgatcattgctaatgtaaaatcacataggatatagcatatagggggaacatcaactaaatttctacgatatagggacctataaatcttgtttttttacaagtagcaaaactaggtttgatatatgttaatttttaaggttttaaaccatgaattaggtattgtttttagggtcttttcattatttttaaagtttttttagtctttttcagatcattatacgtttgaaatacatttggaaattatcgatcattctggagcaaaaccgtgaaaatattctgcaagaacaatccggagaccaaaaacaatacctaattcgtggttaaaaaaccgtaaaaatcaaggaatatcaaagttataacaaaaacaaaaacaaagagttgtgttctagaatcgtaattctttcttaaagtgtgtatttcgataggaaaccttaaagttcattaactaatggtgctatgcatttgttaacattttcaatattgctatacaataaaagttatgtcctagcatcataattatttataacaacgtctttcgttacaaaatctcattaacttatggtgctacatgcattggtcaccaacacttattttttcttttcgaagataaacaaccacaaaagttcacattcactaacacaccagatcagacagataaacaaaaacaaacaaaccctcgcatatcgtaaacggttcctattagttttaagtccctcttatgatctttctacttttattcacatgccaatttagtatcaaaggtgctcagggaaatggcaaacgcttgaaaggcagagagaggataacgatagtccatagtgaacatatccttacccactttcccaaagtgtagtattatcttatcatggtttgattgctctggctgctgtggtgataacgatggcctcgtagccaatgctccaccatcactaccactaccgggctgaaccgttgcagcggacatcaactggaagttcttgacagaagctacagtcactctccctttgaagttaaggcaccaacatcgcaacggttggagccaccttggcggtttagttttcagtaccaaaggtcgcacctttccttcttcctctttcggtcgggtgaaatctcccgagtggttgactatctttgaggaaccgatgctgcggaaagattcatcaagggaacgttgtagaaactcaggttggctagggacagtacctccgggttctagagctaaggaggggatagagtgcataatgcagttcattctacgaggtccacgggttccaagcaagttcagctcgtatgtaacttgagcaatgttgtaacttccagaagggactttgggagacactttcttggagttgaaactacgactccggtttggtggggacaatatctggctactgttgtacgcaggagccgtatcatatactataaattttgtccctagaaagttagacctgaaaatgaagtaagacaaacgtttgtctgaattaatcaagaactcaaaacatgtggacgaatgatgttttttttaaatcttcttcttacttcagtttgccaatgtaagtgctgcttgatcttgaaatgttgtctgcatccattgatattacatactctgtgtatgtagctctccgtgagcgctttgccgagagaagaaacttcccactttcaacaagtatggctgtacaaatttgacaagattcaaaaactaaataatagagaaaattcgagttcttgatattttcaagatcttgataagtattgaatttaaacaaaagtatgacatgtgtgttctactaaattttgagtccaaattttactgaagcagaggtagtaacatcgacaaagacgaataacttaccaggactaagagaaaggtaaaggtggtaagtcatgttagacttgtctcttttgatataacattgtatgattccatccctaggcccgggcttcaccatcaaaagagttgtcagaataaccgacataatgtcgaatggaagtaacgaataacgaaaccacgaacctgtttcaacgaaactggaaatgtgagtttgcctgagaactcaggacttttcacaatatctttgcacattagtctccatgtcttgcagacaccagcacaagcaacgacttgtttacgtgcaggccaagtactctcgctttcatccaactttttcatcacatctcgtaatagcgcagccggtaaattagcccaacgagtgttcttgattacaataagatcttcaatatgtgcctcaacaccgtgagatttactcctctgatgagtcgtcccattagatactctcacgtcgaaactacgtctcgaaaagcttcctacagtatctctaacatcacgaacaatactcagaaacgacatttttccgaataccaaagattctactttagagaaacgctgcaaaaacataccaaaaccattttcttagtataaacttaacatatagtcctcaaatctctatgagaaacactaattcaacacataatatatattttatgaattatattagagaataggaaatagaagaaatgtaattatagaaatgtgaagaccaagaaacattgagaaaaattaaggttagaactaaccaaaatcaccacgcaaccacagaaattcttaaaattccaacaattgtttttcaagaaatcaatgtcttttgacaaccgtactaaacttattcttttctctacctcactgaattccaaagctgaatataacctaagatttcaagaacataaacctaagaagatttcaagaacacaaacctaagatttcaagaacacaaaagactaagctttctttgcaaaatcatatctttgagtgggtagcaaaacaaagagatataaacacagatcaaagaagacttacatatgtcttcgttagttcaaaagaatctctgttcttttttttcttttttttgatctctctgattttctttgctgttttttctcagtttagttagctaaccatttcttgtttgtaaagagtcgcggatttcaagactttatttaaatacagcacaattttatgagcttgccaagattttttgtttagattttatattttgtaaaaagtaattttatttgtgattcttaatcagtaaaaatacattccattattttgtatgattcggtaaccaaaatgacacgagttagattggcttgtagccaaggtgttgaagggtcccccctattaattcttctttctgaaattgttaaagcatagactaaagaacaaattttgttacaatggtatttttaacaagtaggaaaattaagtttaaaccaacaacaaatggtatttatagaattgaccaacctttactcgaagttcaaatcctatttttgcacccccactcaattgccatatttttttatatatcaatcttattcttcttctatcaatttcctgaatcctatattaaatattttcctaatatatcaaattttggtaactggttatattattcccctaaaaacatgaatttagatatacaaaacaattaactaatgtgggtactaatccttacgtttagataaacaaattaaaaatttcgaataacaaaaaagatgtataccatttttcaccaaaattttagtaaatttttaaatagaaaatgatgaataacatgtgactactcgtgtatttaccacaaacaaaaaattaagtatttctaaagttacatagtacatactatattttgtcggaaaaacaacaataatttatgaagttacaacactagtgatatcattttttgttctatttttttatatagaaaacttgttttataaattttttttaatagtatttagatatatatatatataatataattatttaattatatattaatattgatctccgtaatatatatttctgccttcgccactaagtactcatggacggtggatttaaggatgtgagattagatgccaaaaactggctaattgtagccaaagttgttgaagggtcccaattaattctttttttgtaaaattgttaacgcatgtaaagacaaagtcttgttacaatggtatttttaacaagtaagaaaactaagttaaaccaacaaagtaagattattgtagaatctgatacaaccagatatgagaatctaatactttaattaaaaatcatttataagaaactttaaacgtgttgaatatgatgtaaaatgctattacaatacaatagattatgagaatctaataatattaaattaaaatcattttataagctaagaaactttaaacgtgttgaatattatgtaaaatgctattacaaagaagaatattttaagaaattcgttaagggtgaaaaaggtaatcattttcttttcctagttgtttagagaagaataaatatatacatgtggaaattgtgtgtaggttttcaactttaaaatttaatcttgaaataaggtaaatgtttttattttggtatgattcgctgaccaagggacacgagtactcatgcatagacggtggatttactaaggatgtggattagatgtcaaaaactcgctaactatagccaaaggtgttgatgtgtccctattaattctttctatgaaattgttaaagcatgtagtgacaaagtcttgttacaatggtatttttagtaagtaggaaaactaagttagatcggaaaaaagtatattctacatctagatatatgagaatattttaaagggaacgataaatagcttcaatttaggtagttactccttcattttcaactttttgagttggtgaatggctacaaatctactgcctctaatcgtcactaatatacccaatatgttacctcattatttaatcaataaaacattacgttgaggaaaagaaaactccacattaatatttacacattacatgaaaattagacattattcatatgataactgcgacaataaaagtatcaaaggacgtggaatatgggtgtactgatgccttttgagatgcaatcctagacgatgataacttcttctataatttctttttggctttgcttttcaccatatctttgtatttcctcttctttagttttaccccatagaccaaggtatagtccacacaccaacaacactgccccacccacactgcaccagtttatatccccaagtccaaacacaaacattctcaatatcaggttctaaagacatgtagatcggaacttatgtttacatactttagcaaaaaaaaaaaaaaaaaaaaaaaagacaaaccttccaaggtaaaatgtttccttgaaaaggaaagatgagacaatgcaagtaaggatgagagctaaaggagtgtatagtgcagtgaatactggccctttcttctctattgcccatacttgtaaccaatatgtcagtccagtcaccataattccctatttaattttctttgatcattcttttaataaacaagaagaggaacttcatatttagagattagagataggattaaacgtacacaataagccattgagagaagaggtaagccgaattcgattttccaaactgatgggtttctgttcaccgcgactgcccaaactgcgctttgtatgcaactgaacaagcattgaagtgctaccaatcgcaacttcgctggatattccttcatcaccttgctctaacaacacaatcaatcaaagttgttaaagaatgttttacttttcttttaacgaaaacaaaaattcagtgatgaaagtattaacataaaacagttctcttgagtagtagtctctatggacatatatttgatgtcatacctatgtcacgtctgtaaataatggtgttcttgtttttactgcctccgtacaagagacattacttatggtaattaatgatatgataaattatttatgcttaaatttgactcaaaaaatttgtctatccaatatagacgtaaactggttccaagtaatctctaaacagaaccctacaataccattactccattaccaaccattatgaaagtgtataaacgactagtcgtttttcataccatggtggaggtccaattacgtaacatcggagacttgctttcttcatatatagatttagtgatctttccaaaaatgtaatatttcatgaaaacgtttttttaagcgaaatataatcgaagtttatatgggtccgttgaaaaacatcttaagaatttgatattctatactttgtctacctaactaaaagtatcccacatataccacaaaagtatgtattttttaatttcagactacccacaaaagtacgcatatacattaaaaacaataatttcttgttgtgatatgtatagatatatgtttactagttatatctttaaagccaaacattttatattttattaagtcttatgtaactttttaattgataaaatacatgcataatttcattgaaaacgacattccgtttttatacgagttagtttataattaatatcctaatagtgttttccacactaatgagataaaacaaattaaatagaggaaacaaaggagcaatgatttaaaaattaggaggcaactagtgaagtgatgaaagtgaagtagtgagtggcatacctgcatgataatccacaaacaccagcaagtattggcagcgagcattgtgattgaaccttttacagaatttttggttgatggaacggtgccgtttgggatggtgctgctgttatagtggtttatcaaacttggcccttttacaaaagcaaacactaatgcgcccaacattccaaccattgaaccagtgactttggccactccgtgtgacttcttcaaggtcaccgtctctaatcttttcattatacatataaaatgtaacattagattcgaaatagtggttctaactaaagctt

SEQ ID NO: 80 - DNA, 171769 bp, Arabidopsis thaliana
gaattctttttttttctaacagagcatactttatgtaaaagaatcaagataagaaattcctttagcgcaactttttactctaataaataataatttttgatttggaagaacgataattttaggacctcctcactctccatttatgaatctgatataactgtttgaagtagtatatatggtacaactgatatttttgaaataacaactaatattttcttttcaggagaatgagcaaccttccaataaacatatattttgattatgatggatattattcaaaaaccggagatgcatatcaatgaaattcaaaaatagttggtttgtatggtatatcgtttaggacatcatcaatagaggagataacttactcgcggttagtggataagatactcatgaagattaagataaatgaatctacgacaatcattcctctttttttatctttcctaaattaaaaaaaaaaagtgatttaagaatatttagagataagagttagaacatttaagattgaaagtgtgtgggttattatttaaaaattaaatatcaaaagtaaaactagacacaataagatagagcgtgtgtataactaaaatgttttgttattattcattaatgacgtgtataaaattaatatccagtttattatcatgaaatgaatagttaaattatattgcaaaatagaatgtgttaaatttgaatttttgttcaaaaattctttatattaaatgaaagaaaaaatgtagattactattacaattcaaatattattaaaaaaatctatttatttctcacaccagtataaattttgtatattattaaatatcactagattagtttagttggtttagtgctttatgtatagttttgttatcaactctggttaagagtcttggtattttaagtctttctttgtacatcttttacgattaaatttagtgggaaaacagtcgatttccctccaagaagtattgacatcacgtcagatagagcctatttttttttatctcggtctagatgtttaggaaatggaagtttaacacctataagcattttttccttttccaatttagtggaaaaggaaaaagttgagacatataagcataaatcgtggaaaggaagtaccgacttagggttttctccaagatggagcaaagagaagagaagaccgaaaatatccagagaaaaagaagcagaggaaaatcttcatcatcatccttacctctcgatctaacctcggagatattctcaaggctgcctgcgaagtctgtcgtgaggtttcgttgtgtttcaaagctttggtcatcaatcaccaccgctccatatttcaccaactcctttgaaactcggccgaatctcatgttctttttcaaagaaggtgacaagttctttgttttcacgattcctcaacacaatcagaatccgaacgagtcttattcttattcttcttctgagattattgatagttaccatacaacctatccaaaacgttgttgcgtcaccactttaaccgagtcggtccacggcttgatctgctttcgaaaagcagcaacccctataatttggaaccctactatgagaaagttcaaacctttacgcaagctggatgagaggtggaagaatataaaagtctctttagggtacgatccagttgatggtaaacacaaagtagtgtgcatgccgtatggtaatgctttttatgagtgtcgggtgttaacattgggatcagatcaagaatggagaactgttaaaaccaaccacaaaaatagcccttttacattccatggtggagtttgttatagacaatccagatgcatcaacggtgttatatattatcgagctgatactaattctggtcgggtgatattgagtttcgatgtaagatctgaacggttcgatgtgatagaattaccatgggatgagaattttgggcttgtgatgatgatgtcttataaaggaaggttagcttgtcttggtttcaatcatgagaagaatagtcgttcaatgtgggttttggagaatgtagagcagcgcgaatggtcgtgtcatacctatttacctatttctcattatgagccgggtttggagaactatttcaatctaacaggtatcactaatgatggtgaactgatttacgtaccaaacactgtgctcgaacgttttcatgttatatattttgatgcaataagagagacgtttagaagagtcatatacaaaggagttgcagataaaggttttcgactacgcaatggacttgaagacaaacctatacgtagactccactttttccccaatcacattgaaactctcatgtctttgtaatggactttgaaattccttttcttggttttcttcttatttttttagtgtacagttttattaggcaactttattattttactagataatgcccgcctatttaggcgggtgtaagatataaatttattcaaatatttatcgataatatttaaaatttgaatagtaaatagtgatccacacacttttctaatatttaatttagtaatttttgaattaaataaaatttcaaccatacacattcaattttactatacattttaactatctctttcatcataataaactgctttttaattctatacactccaacttattgatgatatttgaattttaaatagtaactcatatttttcagtatttaatttagtatttccttaaactaaatttcaatcttacaaattcgattttacaatacaatttaaatatcttttttatcataatacaatacaatttaattcgattgtatacaattcaaatacaatccaatttttcaatacaaatacaatttaattctatacccttcatcttattgttagttttcctttttaattaaaagaagttataagttaaattttttagatatagaaatataaattagtatatgtaaatatgtttatttcttttttttaaagaaacttttttttgacatatatcaacatgtcaatgatatacttgacacgtgtcatgatctcgtgagttagtaactttcaaaaccgtgtactttatataataagatatcacatgttgtttttttcttgttttttttttcaatataatcatatgttgttttcattatcaaagttcttttgtgatctatataatggattttgttactttacaaactcaacatctccaagaggttttggaatggttcgacgatcactcttacaatcaattctagatccaaatcgaatgggcctaaacccataatgggcctagaatcaaatatttcactcaaaacccaataacaagaaaccagagacctcctctgtttccgaatgatcaaatcagcaatttagaaacaaaaatggccgccaacttaaaaaccctaaaaatctcaaatttccccagtagatgaacacgttcttcaaactcggaagcttaatccaacgcactgcttctcaaatctcttcttctttcccaaaatctcgtttcttctccgatggagaaagtgctgtttatcaccatgcgcgtttgttcaagaaaccactatctaccaagcttaaattcaatcttgtgaactccgtgagtcttatgggtttcgttgatcgatctattcaagtcatgaacaccggacctgataggttcggtgttttcactattcttagagtcaaagaccctctcaatccaaaccggagctttaggtcaggtttgttcgattctcatagtctgttgcttattcgacgattagggttcttgattaactgagtcttaatgttgtttgatttcaatctgtgcataatcctgtattgttcgtaagccttgtgattgttaaagtcttagtcttttgttaatgtgttgtatatttaatgacaggatatcacttagaatgtgggacgcaatggcacggacttgtattgcgcatctgaagctaaatgatcatatacttgtctcaggccgtcttgagtcttacagcaagagctccagcgatgtatatagtggcttaaatctcgattatcaggttcaagttcaaacttaaactctatattagcaaaatgtcccagttctattaccatcagcttcttgtgtagtcaagagtcgtttatatatatgttttaaagcaacttcgtgtatctgtgtgtagctaagattgaccaggctggtaaattattgcaggttaaagtggcagaagtgaattatgtggcggctccaccaagtcacgtcttagattctcagatatccaaaaacccaaaaacgaaaacaggttattatctcttctacgtatcatcgtctctattggtagtgaatatgaatccacgttgattaaaagaaccttgtaccaagctgaattcacactgaaacaggttttatatcttctggttttgtgtacttagggtttataaaaagtttcattcattagttttgaatgttgtatacattttacaagataagatgataaatattgcctgctacttgtgtgctttggtgtttccttagaggatgatattgaagaatccaagaaagatgagatatacttgtggcaagtcttcttttcgaatccatacgattggtgggacaacaggagaaataagaagaacccaaagcaacccgactttaagcataaagatacaggtgaagctctctggctttgctcagatttaccggactggattactagacgacttgaattgttcgaccagaaaaaccgcttttacgatgaagaaaaaacacgtcgtgaccgtctttctgactatatttaggacgagatattcttgggaaattacaagtatgttgcattcacttcatgtttatcatctagagaatgagagttaaccatcttaaaaaccgtttatgtatagtaaaggttatgatttttgtgaacgttgtattactatatactatataattttcttagtaggtatatataattgtttgaagaatccttattgcagttattcacccagctcggtggtcattcattggtcagtgtttgcccaccagggttcgaatagcatgcacccaaaagttgatgattcatctttcttaaatttgtgtgtgtgtgtccatatacagtgaaacctctataaattaatactcgatgaaatgtatgagaccaattgaggtattctaaaatacctttttccaattattttattattgaaatttatttgttagcaaaaagaagtgttatgtacacaaaagaaaccaagaatgataagattatcttgttgcaagtcttcttacagtttattatagtttttgctactcatattgcaaaatccatcgcttggtaaataattctaagattatccggtttatgtggatacatatcagttttgatttaatttttttcaacataatcaagagagacccacaagagaactccaaattttcaccgttggagatgctctaagatgacagatgaaaaaaacaaaaaaaaaaagtataagagaactctgattagcagaaaagtccatatttatgcaagtatttttttaatttaaaactttataggatcaatatgtctatatttgttacaaataatataagttatccgttttatgtggatacatatcagatgaaacagcgatgactgcagctattcatccggtttggtggttggtcattcatggttcagtggttatccatcagggatcgaatagcaatgcatgcaaatcgaaacctctgtcttgttcacataaatatatatatgtctgcgtatatatatcacatacatatatgtgacaccaatcaaggtattccaaaataccttttttcatttattataatcattttaaagttatgaatatatttaggaaatggcaaatagaataatgttgagttgaaaaaaaaagctaatgtctacggatttaatggattcttttcatttatttatttttttgctgccaataagttagtagagtgtaagataaatctgaattggtcgagtaaaattcaattagtagacagaggtttacgtgtatgtaaccatgaatgacccaatacagtgaatcattaagatgcatcacatgtatgtatgtctatcagttcagtacatgtgatccaaatacagaagaaaagctgttatgtatcactattattcttacacacatcaaagagtcaagacaaaggatgttacataaagatgagtcctcaaaaccaatgactcatttattttaagtaaaaccaaaaacttccacattagctttagattaatgcaacggatcaacaacttggccaatgaacagaaccactcctgttatgttctctgtgaccaccaatagaaacggatggtctgcaacaaaatctatttcatcttcctccataagcaatcctcttagctttataactccagctgatgcagctgcagcttctgttccttcttcattcacttcgatacacgctttatggaaaatgttcgatacgcatagattcttccccatctcaggagattcaaccatctcagttaaaccttcttcaccgctgaaaggcgaagtcagtcccaatccttttaaaacatttgaagcatcgaacccgaaagagaatttaaactttggaatcttgaattcgcggactttaacttgtctgcgtgggatgtggttgtctaagaacccaggagtggaaactattttgtccagaagatcagacagtccgttgtttgcatcgggaagataaaagtacatggagaattgtcgcttatcctgtccttgtaagtaaggaagtcccaaaactttgaaaccatcgtaagcacttacgtattgtttcttcttgctggtcatgaatggtgcagtcactttgttaccgtcaagaaggtgaaactcgccttcttgtgttaacgactcatcgaatttctcgttccatgttcccttgaagtacaatgcatttgcaaatatcagtttggtcatactatcagctgatccttctggaagaacctcagtgatgagaccatttgtctccttttcagcccatgaattcacttcagcaatcacctccacagccttcaaaaacaaaaattatcaaacataaacccaatcagtacatcaaatcacaaaccttttaaaaacctcatttccacagccttcaaaacagaataatcgaccttaaccctatcagtacatcgaatcacaagccactcaaaattccacacaaaccaagatgcataagaaaccctagacacagccacagaatcaaaacgtagtaatcacatcacaagccactcaaatttcacacaaaaccaaaagatccataagaaacaatgaacctatacagatcctcagggtaacataatgaaaacaacaaatccacattttggcctttgattgtgtctactaaaatccacacaaagttagtatttacaacaccctaggaagcagaatcaaaatgtagtaatcatattgcaatcaataaaacgaattcgagagcaagatttctgtagaatcaaatcacaagccaccctaatacgatcatatacagatcctcaagtgtaaaattcagaaacaaaaattccacattttggcctaagagtgattctattacaatccacacaaagttcctctgtacctgaagaactaagtctagatcacagaaccaagtaatcaaatcagaaaactcaccttcgattgaaaatcagcttgattcgaagcagctttatacgaatcttccaagagctgtttaaaggaaggtttaaaggagagagacttatcgatccaggcgccattagccaccgagagcttaggaccaccgttagcactaccgtcagcgagaacagcggagacgatttcggaagagaatgaattaagttgatcagtggaagagaatttgagaaacgagaggatctgatctttggtagcgccggcggatccagcggcgattatactgagtacgacgttgattgaagccggtgagaagatgacgttggagttttgagagacggtggtgattacgtgttttgcgagattcatggagacttggttttgcagtgagattgattcacgcacgtccattttcgccggaggttgtggtggtgatgactggtaaacgaatttgctgggtttaggagaagacgattgatatatttattttagagaaatatcttaaaattatataataataattaaatacaaagattataaatgacatgtcggtcaaatttttttattttttttcttctagcacgtcggtcaatggtatttgactatctggtggcatatgaaaaaatttcgttatgactatttcgttatgaattttttttatagagctgaatgttttttttttaaaccgagtaaagaagaaagagagacaaaaaatagggttttgaaaaactcttatacatttagaggatttagattcttaaaattttacttaaaattactattttttttgtataaataaattagaaaattataattttttttaattataaaataaaataagggtaaataagacttaatttttttttgaaaaacctacatttgactaatttacaagaaaaataaatagatggacaattttgttttgtagatatcctttaaatttagttttcccaaatattttttgtttttaaatttcgcctttgaaaaagaactgatacagatgtttttttaaaaaaactaaaccttcattacatagtaaaactgatataaaatgtttatcattgatttttcaaaaatgttattttcaattttcttcataaatcgttataaaaatatagaaaaaatatgctgacttaatccacaaaacttgcagtcttaatataaaataaatttagattactcttttttattcacggtttttattagattgtcaaaacctatcaaatattaagtttgactggtgatattgttagaatggacaaattagttagcaatttagttcgctttattttttgtgtgaattataaactgccgtaaaccaactttacttatatgtaaaaaccgtttatatttagttacgataatttcaattatttttattgtactctcattataatttataaatatagtttgtgaattataaattaaaactaatctaatttgttcatctcaactgccgcaaacattcgcgattattgacattttagtgtaatataatatgtgtaagaaaatacgctcaccgcacacgtcgaagcgccaagcgaagaaggtggcacatcggcaagaggaaaaaagatgaattgacaaaatcttttgaaatgatgtgtaagcctataatgaacttgaatgtatatgaattaaaaaaaagtgtgaatatgtgctttgcttatcgatgacttgttgtgtttatctctcggtggaagcaatcgattattataaaccatgtcttcgaccagaccatctacacatctttttatgaattttaattctcaagtctgtgataacaaaaactaaatagagactaaactaaaataataatttagaaatggtcttttctaattaagaaataagatggttttcttctcaagatgctatatatatttttagcatttgatattatgacactaactaaataaaacctctataaattaataatgttgggactgcaaaattttattaatttagagaggtattaatttatcgataaattaataataaatatataaagagattttcctaatttggtaaatttttaaaaaatttctataagatttctttctttgtagaaaatatctttctaaaatcagttacaagtaaaacataataataatgtttagaaaataacaccaaaaattttgatacagtaaaatatgaaaactatagtcaaacaaagaacaaatatgaatttaagcaaaaaaatattataaagaatttttttctataatatatatatatatatatatatatatacaattatatatatatttatacaattattaatttatgatattgatgagaccatatatttacataggactttcaaaaaaattattattttattaatttatcgatttgtgtcacattttacactggtcctaactcgggaccgaaagaatttattaatttataaaagttattaatttatagagtattaatttatagaatttatactgtagtttttctgacacaaatcttttatgtttacataactcgactaatccttgtccttatattgaggggcaatcaagtttacggtttggttcaggtttctaattttattggttttatatacgggacactaaaatcgaaagaaaatacggtttacttttgcatttggtttgatttttgttttcgtttctgaatcatttctattttagttaaacgtttttaagtgagtacaataaagaataattttgttatattatacatttttttgtttgttttattatacttacataaaatgattaaattattttaaatataaagatgtaactaaaatatttttaaaaaatagtacgttttatttgtttagttcgattgtgtttagtaaattcaaaatgaaatcaaacagtttataagtctttagactaaggccagaccgcaagggcaaatcttaggcattggttccaaggacggtaacctactgagaatgaaggaagagaagcgtgtgcaacccttcaacaacacctcaaatccttaaatttgagggctttttgaactctaacaagccctcaaccctttatttttttagggtgtgaatagtacaacctcaaatacccttaaaatctttcttatatttcattttagtctttataatttatatattttacaaatagttatatttagttcaattatttcaaatataaccatataattcaaatacattgaaatttaaaattgaaattattaaaacataaaagatataatgtttcaaaacaaattttatacaacaatgatatcacactgaacaatttaatacacattataattaacatttcaataataattataaacatgaacacacgagttttattttatattttttctaatttatatataattttgtagtaacttgtgaagttttgtttttctaatattgtttgacataatatttttgaaatgtatgttttctattttttttatataaacttttatcattataaaacattattgttaatattgaggactagaatgtaaatataaacaaattttagaaatatatttgcgggtatgttgttggagcaagtgacccttaaaccctcattttgaaggtttctcatccttaaaatgatggtcatggttggagatgctcttagaacgttaatgttaatgcttcagagtaggcgttcaggtatccgttcagattcggatagaatattttggatttttgggttttcggatttagaggtatataagtcatttgggttccaatcgggttcaacaataatatttcggatttggattcggattacccaaagttcccaaatatcaaattttttataactaaactatttgaaagtacacaaaatatctagaaatcttgaatatttctatttaaaagtagattaaatatccaaaaatatctaaaatatccatgaaatcctaatatctgaaagtagctccaatcgtagacaaataggcgaaatgagctggagctaatcctggcggcaaatgaggaacaatcgccggtaaattatagtgagcgcagttagctgccaaatcatccattgacgaagatgatttaataatatcaaatgttgatcaatgagccgttaaagctcatataagtagttagggtgctactcattttttgaatctcttccatcacaaccttccccactttctcaataaagttgagttttttcccttgagttttctcaataagggcatattcttcccttgtgttttctcttgtgatgtcgagcagaagccagcgaatatcaagtaaaatagtggtaccagatttgtcgtgctcgagctgagcatctacagtggtagtactagagaatcaagaaccccaaactgttatggagttcgggtagtagagaatcaagtatatttattttatattatgaccctggtaaaaattatggactaaattataaaatattttagaaaatttgactaccattaatgttatatctcatttgtagttatacattatgattatttcttttgactaccattatgattacttttgaaaataacatagtccactattttaaaaagtccaactgcgattaagaagcttctacatgaaaatattattgttttttctcataatacttacacatcaaatacttaaataacatgactttactcgttaatgtaccttttttttgttatttgaaatgttaattttgtgatgtgacataaacatagtcttattaaaaaagcttaagtgtattttaaatatgttgtttgtacaattttgtttgggttaaaatcatttaattcaattgatcaagtctcaaacttatttttctttttgattatgttatatagttgtagtttcactcgataatagacttttcttcgagatatgctacacaaattatagagttgtatttccactgccatgtagtagttactataaattgaagtttcaattcaagttatatttttaaataaaaattttctttcaaatattttaatttttggttgaataatttgataaataagattacacatatatagttccaactcatgcaatatatctccttcttcatgtgtaagaaatcaaggaagttttggctcatatatctaaatctttatttttagtgatattttttgctaactttatttgtaaataacacttgaaaaacctaaccattaaaactagcgtttggctacacagatttaatatttactaaaaagatatttacaaaaaaaattgtccatctatttttttttggtaaaaatgtcaatttggactaaaatacccttacacttcattttaagttgttttcaaaacaaatattcactctaacatgtaaatatagaagaatggagatgttgtgaagtgtaatttttttttaattttattggaaaagagtgattttttttaatagataaagtttgtatgaatttgttagaacacgttttctagcgttatacgaaattcagaatgtgaattctacatttttgtaaagattttacgaattttgattttttttttcgttctaaataattcaaaagtctgaaaatccgatttctaaaatttttagaacacgtattcttggaattactctatgaactaaataatttggaataacaattctacgaattacttcatcgtttgctaatgttaaaaagcgtaatcttcgtttagaactgacattataccataatctagatttgagtttttgaacttttagaaaactctgaatatagatagtgaataatcctactatattatttgggaagtacattttaaatgtaaccttattttttgtaagtaattacataggtatgccattagaaataaaatttaaagagtaaattaattcatctctttaaaaattaaaaagtcaaatactaatttaattagttaaatttaattaaaaaacgaaatacattattaatttccaaaaaagtaaccaattaaaatcaacaaattagatttgatatctaaattatcatattaattttttattaattattatagttcacctcttatctttatatgattctatttttgcgaaaaattaatatcatcgttataaaaaataattagagttttttcgcatacgccataatttgaatttttaaaaacgaatataaactgttcaatacatgaaaaaatattgtaacggatcaaaaatagatttaagaaaattttctactgagtaatgggtcataatttgaatatttatattcaatttcatacatattattttaaaaatttataatcttatatactacaataattaataacatattagatttttttatgtgtatgatgtgattcaatttttaatacaagctggaaaatcctagaattgacggggttaaatcgatattaatacaagatggtatactaaaggtgaaactctaaaattaacaatcaaaatacaagtgtataattttaaacactaaacaatataaataatatcaacaaaacatatacgactcgcagtttactatgcatttaaaatcaaataaaataatatcatatatttataatcatctttacaataaaagtttttagtttaactaaaatataagcctatgagtaacccattcgtgttcgggtagaacccgtttgggtttgggattaatgggtatatgatttactacccaatagaataattctaaatattccgttctggtttgggtcggatccagttgggtttgggtcagtttagataaaaagttatagacccaaaaaatacccaaaaaaatagaaacaagaaatttgtatttagatagcgggtcttcaaacaaaaaaaacttttacatttgttaagttttaataaatttaattatatttgaatatattttactaaattttgacaaacataacaaataatttttgaatagtttagttgttttggatatttaggtccaaaattaattgacatatttagacttataattataatcttagataattagataatattacgattaaatataattaatattttggatattaaattaatgtttgggtttttgaatactctttttggataacgagtaatttccggaccaatcggatatacacggatttactaaaactctacccaataagaaaatttcctaaaattttaactcgccctaaccctgttttttggttcaattattgggttggttatcgggtccgttttttcgtcagccctatcaaagataatctaatataggctccaattagatccacaaatagtataaccaaaatactatacaaagactaattttaagttaggccaaaaattagatcctctaatacaaaagaaacatgtttcttaccaaaacaacttgtatataaattttacacatttacttaaaactacatatgttgtatttattataaaaataacatttttaaaaaaagtcaattcaatgcagcattatatgcaaatagtaaaaacattgaaaaatattatagcatcacttttatactatactatttcttatgtaattcaaacaaagtatacaatttaatttatacaaaatattaatgcccgtgctatacagcacgggttatgatctagttagataagaaaactaaatatttattatagattacgttttaaatgtaatttattttgtttttattacgatttacagaattgagagatcgtattctaaatattttagaaacactaaaagcaaagtcgtccaaaccctagcagctagtttttcctttttttccatgtttaacaatatttgtagtcattttacttttatttgtctccaaaatttactatattttttctttcttcttctattccacaatgtgtgcctttggttaatagatgcacatttacgtaattagtggtgtgatgcacatttacgtaattagtggtgtgtggagattgtaagaataatatgttctcaagaacttgtatctaatcgatctaacaccttctaagaacatttcatgctctatgcatgaaaacaaagtcactttgaagtaaatttcagaagatataatttggtaactctagaaaaaactcttgtgactttaaatttcatgatctaacaccttttggatctctcaaactaaaacaaagggaacagaaaggacttatatatcaaactctgcaaaattttcaacctcgtcaacgtaacttttttttttcttgtaccttttttgatttccttgcatttgaagaaacttagcataatggttactttggttttttacttctatccattttcatacttacgtatagggatttgacggttcgattctgttagacgatacgtcgagcatcacatgagaacaaaacgcggccctaaaccgcaattcagctagtgaatttaatgtgatcactgatcgataacatcaaatcagcggtttagaaagcatgttccgggttgtatcttgcggtgacatcttagccattgcagctagaaactctgtcgtaggcgtaagctccatgtttcttctctcaatcttgttttgaaacttaaaaaaaataaaccggtctaaaatatgaattcttctttatatatgttgaagcttggaggactgaattaatatgtgaaagtaggaagaagagatgcaagaacgggggagtcaaacgacgacgaatatgtagaaacattatatatggtaggtttagtcatttgagagagaatgagggtagatttgggtttaaaattttataacaacctatcttaccaatctactaaaaaggtatatatggacaaaagttgttgtagatatcctacatatccaattttccctatatatttttttccaaattttgagtgtgaaaggaataaaaattcaatttgtttggatgaaataatagttaattttacttgatttagtttttattttcttacaacaagtcaaatatattttatgtctatatttaatctatcttatctcctcgtaattaactacaaactacctcatgtatatataaacgttctcatctcatgttcctcctacctatgaataatctaaagtaacaaatattttcacttttcttttctttcttcttcacaaaaaaatatattcctttaacaattcaacccatggagaaatcgcaatcatcgtgtgatacacggaaaagaagtgttgtagttgatgttgacaacactaaagatcgcattagcgatctcccaaacagaattttgggtaaaatcatagtaaaacttcctttagacgaagctgtgagaattatggctctatcaaaacgatggaagagtatatgggatgataattgaggataaatgttgtatcaaaatcttttgttttgaaggttttattattctatccgaatttgtattcctcagtaactgtcttattgcaacttattaataagttatttaatttaattaaaaaagatgtactctttttatccttcaaaatatgacagatcgctaaattaagaactatttgttgttgttattagattcttttttaatagcttctctaaagaaatttttgaaaaaaatatagactaatagatctgtgtataaactgaagatttagggttggtgatatataaaaaaaagacttaagaactcctgaataactctaggatcttgtatgttaattgttgaagtgagaaatcaaaacctagataatcgatgaatacctttggtatatttgtgctcaaataataaaagaggtaagaacttcttcttttttgtcaatcgttattaaattattgttcaaacgagccatttcttagaagagataataactttattaattactttcttattgtcatgtaaatttaagataaaagttaacgggcttttggtgcgtaaaatcttttattttcaaactttatgatacatacatttgaaattgaaccgtgaacatgatattattgtagtgaatagaaaatttaggaaaacatgaaattttgtcttattaaacttaaaataaataattgcatacagaaaaatattttttaaggattgttttgataatttattgcaattcaagggtaagaactgttggagcatgaatccaatatattccaatggagttatgtataaaccacaatgagattaactatatgaaatcatagttagggaaattaaagattaaggtttataaatgtattttggacaaaaagagcaataaaatacaagtaattaatatttttgcctagataacgtcaatacaatttgaacttcaaatgaacttggatggtaagatatattataagaaaagtttggagtagaaaatgttgaattataattcataatatttaaataatattttttgcctatcattgtttcagtaaaatctactgtatattcaaaagattttttttggaaaaaatctttattgttattatatttagatcacatcccatatttgaatcaaaaattattttcagtaattggaataaattcatttgaccctcgagaagatatattttaatataaattataaatattattattttggtactacaacaaggattaaaaccttattatgatattttgacatgtcgaaacaagttgatttagttaaaattgtgtggaaaaaaatttgtttatgatatatcgtgggctaattaaatttcggtgtgttgcaatgtatcatactcatttcagctttcttagctaaatattacttgtacttcaataactagtacaaaacaccaaaataccatgaccttgcttcttttgatattctctaataaaacccaacttggtttaaacatctctaaaatctgacttgattccaagattgaccaatcatctaccttcttgagatgcagcctcgtgattatacttcttgactcttcatctagtttctttagatgtagtcccatgatctttgaatgacgtacgacttctccccacatatcatttagaatcttcattagatacctagagattcctcctctatgcaacatcgattgaactctcttgaagtaaactcccctcctttatgggtacgaaaggttttaatagacaagccgacttgcttctctacaaactcttgaaaagcttttaaaccgattagaaacttgaatcaatatgtcaacaaagaaccatctcgttcttgttgactgattcaactcctcttcacatgctttccaccattaaagcacatctttagcctcttggctcattacttgtcgaaagttgacgtctcttacttttaacataagcttgtttgaacaatctataagttgtttgggactgcataacatagtcttcaaggtaccgcgactgacttacttgtcgacccgaccttctcagttgtggtactccttggattacttcaccaacctcattctcgtggtttttttagtgatatcctccatgacatcatcttcttcatgtacttctccaacatcttctctgtgaatcaactccaatatgacataaccgagcatgccatgttcttgtagcttcagtagcaagtccatcgacaagtgatgttggataattcctttaagagcaagatatctccttctagaagatggtagaagatgatacaagaatggaaattcaagaaaattaaatacaaataacgtcaagttggacataatttgtaactcttcctattcataataggctaaaaaggtgcttgctcctattcaaaacatgactaaactataaattcagatgtaatttagcttagtggtagatcagagcaggtggatttaatttatgcgtttgcaattgtgtaattacttttgtttatatttgttttgtttttggacgggttctaattccatggatatagtttgtaagaccaaacctcattacaattatgtgtatcaatttattctgcatactcgtatttattttctcaaatctttcttaccaatctacaaaaaaggtatatatggacaaaagttgttgtatctatcctttatagccaattttccctatatattttaggttggaaagtgttaacttttttcctaattttgagtgtgaaaggaatacaaattgtttaaatggaatcataattattcttacttgatttggtttttattttcttacagcaacccaaatatattgtatggtctatatttagtttatcttatctcctcgtaattaactacaaactacctcatgtatatataaaccttctcatctcatgttcctcctacctatgaataatctaaagtaacaaatattttcacttttcttttctttcttcttcataaaaaaatatatttctttaacaattcaacctatggagaaatcgcaatcaccgtctgatacacggggaagaagtgttgtagttgatgtagacaacactaaagatcgcattagcgatctcccaaacgaaattttgggtaaaatcatattaaaacttcctttagacgaaactgtgagaactatggctctatcaaaacgatggaagagtatatgggatgataattgaggataaatgttgtatcaaaatcttttgttttgtagtttttattattctatccgaatttttattcctcagtaactgtcttattgcaacttattaataagttttttaatttaattaaaaaagatgtactccttttatccttcaaaatatgacagatcgctaaattcagaactatttgttgttgttattagattcttttttaatagcttctctaaaaaattttttgataaaaatatagactaatagatctgtgtataaactgaagatttaggattggtgttatatcaaaaaaagacttaagaactcctgaataactctaggatcttgtatgttaattgttgaagtgagaaatcaaaacctagttaatcgatgaatacctttgctatatttgtgctcaaataataaaagagataataacttcttcttttttgtcaatcgttattaaattattgttcaaacgagccatttcatagaagagataataactttattaattattttcttaatattgtcatgtaaatttaagataaaagttaacgggcttttggtgcgtaaaatcttttattttcaaactttatgatagatacatttgaaatcgaatcgtgaacatgatattattgtagtgaatagaaaatttaggaaaacatgaaattttgtcttattaaacttaaaataaataattgcatacagaaaaatatgttttaatgattgttttgataattttttgcaattcaagtgtaagaactggtggagcatgaatccaatagattccaatggagttatgtataaatcacaatgagattaactatatgaaatcatagttagggaaattaaagattaaggtttataaatgtattttggacaaaaagaggaataaaatacaagtaattaatatttttgcctagataacgtcaatacaatttgaacttcaaatgaacttagatggtaagatatattataagaaaagtttggagtagaaaatgttgaattataattcataatatttaaataatattttttgcctatcattgtttcagtaaaatctactatatattcaaaagaatatttttggaaaaaatctttattgttattatatttagatcacatcccatatttgaatcaaaaaatatttttttacctatgacaaattcaaattttgacaaataatatgcatatcactagcttatatacatttaaagtctcatgtttttctaaaataatatactatttacagtaattggaataaattcatttgactctcgaagagatatattttaatataaattataaatattattattttggtactacaacaaggattaaaaccttattatgatattttgacatgtcgaaacaagttgatttagttaaaattgtgtgaaaaaaatttgtttatgatatatcgtgggctaattaaatttcggtgtgttgcaatgtatcataatcatttcaggtttcttagctaaatattacttgtatttcaaggactagtacaaaacacccaaataccatgaccttgcttgttttgatattctctaataaaacccaacttggtttaaacatctctaaaatctgacttggttccaagattgaccaatcatctaccttcttgagatgcatcctcgtgattatacttcttgactcttcatctagtttctctagatgtagtcccatgatctttgaatgacgtacgacttctccccacatatcatttagaatcttcattagatacctagagattcctcctctatgcaacatcgattgaactcccttgaagtaaactctcctcctttatgggtacgaaaggttttaatagacaagcagacttgcttctctacaaactcttgaaaagcttttaaaccgattagaaacttgaatcaatatgtcaacaaagaaccatctcgttcttgttgactgattcaaactcctcttcacatgctttccaccattaaagcacatctttagcctcttggctcattacttgtcgaaagttgacgtctcttacttttaacataagcttgtttgaacaatctataagttgtttgggactgcataacatagtcttcaaggtaccgcgactgacttacttgtcgacccgaccttctcagttgtggtactccttggattacttcaccaacctcattctcgtggtttttttagtgatatcctccatgacatcatcttcttcatgtacttctccaacatcttctctgtgaatcaactccaatatgacataaccgagcatgccatgttcttgtagcttcagtagcaagtccatcgacaagtgatgttggataattcctttaagagcaagatatctccttctagaagatggtagaagatgatacaagaatggaaattcaagaaaattaaatacaaataacgtcaagttggacataatttgtaactcttcctattcataataggctaaaaaggtgcttgctcctattcaaaacatgactaaactataaattcagatgtaatttagcttagtggtagatcagagcaggtggatttaatttatgcgtttgcaattgtgtaattacttttgtttatatttgttttgtttttggacgggttctaattccatggatatagtttgtaagaccaaacctcattacaattatgtgtatcaatttattctgcatactcgtatttattttctcaaatctttcttaccaatctacaaaaaaggtatatatggacaaaagttgttgtatctatcctttatagccaattttccctatatattttaggttggaaagtgttaacttttttcctaattttgagtgtgaaaggaatacaaattgtttaaatggaatcataattattcttacttgatttggtttttattttcttacaacaacccaaatatattgtatggtctatatttagtttatcttatctcctcgtaattaactacaaactacctcatgtacatataaaccttctcatctcatgttcttcctacctatgaataatctaaagtaagaaatattttcacttttcttttctttcttcttcacaaaaaaatatatttcaatcatcgtctgatacacgaggaagaagtgttgtagttgatgtagacaacactaaagatcgcattagcgatctcccaaacgaaattttgggtaaaatcatattaaaacttcctttagacgaagctgtgagaactatggctctatcaaaacgatggaagagtatatgggatgataattgaggataaatgttgtatcaaaatcttttgttttgtagtttttattattctatccgaatttttattcctcagtaactgtcttattgcaacttattaataagttatttaatttaattaaaaaagaggttttccttttttccttcaaaatatgacagatcgctaaattcagaactatttgttgttgttattagattcttttttaatagcttctctaaagaaatttttgataaaaatatagactaatagatctgtgtataaactgaatatttagggttggtgttatatcaaaaaaagaattaagaactcctgaataactctaggatcttgtatgttaattgttgaagtgagaaatcaaaacctagttaatcgatgaatacctttgctatattttgtgatcaaataataaaagaggtaataacttcttcttttttgtcaatcattattaaattattgttcaaacgggccatttcttagaagatataataactttattaattactttctaatattgtcatgtaaatttaagataaaggttaacgggcttttggtgcgtaaaatcttttattttcaaataactttattaattactttctaatattgtcatgtaaatttaagataaaggttaacgggcttttggtgcgtaaaatcttttattttcaaactttataatagatatatttaaaatcgaaccgtgaacatgatattattgtagtgaatagaaaatttaggaaaacataaaattttgtcttatttcacttaaaataaataattgcatacagaaaaatatattttaaggattgttttgataatgttttgcaattcaagtgtaagaactggtggagcatgaatccaatagattccaatggagttatgtataaatcacaatgagattaactatatgaaatcatagttagggaaattaaagattaaggtttataaatgtattttggacaaaaagaggaataaaatacaagtaattaatatctttgcctagataacctcaatacaatttgaacttcaaatgaacttggatggtaagatatattatagaaaaagtttggagtagaaaattttgaattataattcctaatatttcaataatatttttttgcctatcattgtttcagtaatatctacaatatattctaaagataatttttggaaaaaatcttcattgatattatatataaatcacatcccatatttgaatgaacaaatatttttctacctatgaaaaattcaaaattttgactaataatatgcataacactactttatatacatttaaagtctcatgtttttctaaaataatatactatttatagtaattggaataaattcatttgaccctcgaggagatatattttaatataaattataaatattattattttggtactacaacaaggattaaaaccttattatgatattttgacatgtcgaaacatgttgatttagttaaaattgtgtggaaaaatttttgtttatgatatatcgtgggctaattaaatttcggtgtgttgcaatgtatcatactcatttcagctttcttagctaaatattacttgtacttcaatgactagtacaaaacacccaaataccatgaccttgcttgttttgatattctctaataaaacccaacttggtttaaacatctctaaaatctgacttagttccaagattgaccaatcatctaccttcttgagatgcagcctcgtgattatacttcttgactcttcatctagtttctttagatgtagtcccatgatctttcaatgacgtacgacttctctccacatatcatttagaatcttcattagatacctggagactcctcctctatgcaacatcgattgaactcccttgaagtaaagtctcctcctttatcggtacaaaaggttttaatagacaagccgacttgcttctctaaaactcttgaaaagcttttgaaccgatcaaaacttgaatgaatatgtcaacaaggaaccatcttgttcttgttgactgattcaaactcctcttcacatctttcctccattaaagcacatctttagcctcttggctcattacttgttgaaagttgacgtctcttacttttaacataagcttggtggaacaatccataagttgtttcggactgcataacatagtcttcaaggtaccgcgactgacttatttgtcgacccgaccttctcagttgtggtactccttgaactacttcaccaacctcattatggtattttttagtgatatcctccatgccatcatcttcttcatgtacttctccaacatcttctctgtgaatcaactccaatatgatataaccgagcatgtcatgtccttgtagcttcagtagaaagtccatcgacaagtgatgttggataattcctaacttgaagagcaagatatctccttttagtagatggtagaagagatacaagaaaataaaatacaaataacgtcaagttggacataatttgtaactcttccttttcaaatcatgactaaactctaaatttagatgtaatttagcttagtggtaggtcagagcaaatggatttggtttatacgtttgcaattatgtaattccatggatgtagtttgaaagaccaaacttcattacaattatgtgtatcaatttattttgcttactcgtatctattttatcactagaatacaaagattttgctaactccaaatctattattttcagacaagcatatcctgtaaatcttcaatcatccaaaaagtgatgttgagtttagatccaactccaaaatgtatttatcttatttttaagtaaaaaactgaagaaatgagtttgcgaatcttttaaatagttattttgtataatgcatattagagaaagaacaaagataaatttttgtatcaaatatttaaactgagttaatggtggtttatgaagggtgttatagtgcattcactcccttatataatcgatatctctaatcccttggtaaaattaaattgttgtattgaatttttttatgaaagagtaaggtgagttgcaaattttgcttggcctcaaaaattcttctctctattttttcatttacatgtttgaagtgttactttttactttgctaagatatttcagtgttactttttaatctacatatttcattgttattttttaatttacatatatcaatgttatttttccactcagataaggtgaaatatttcagctaacttaaagtgattatgatcatcaacacctatttcatgtcaattttttgctaaaaaataaacaaattggtcataatgttcaaaaacttgacctcaccatcataatacttagtacttactggtcaaacaaacatatgttcagaacttttgtattgatggggaaggttacttttgtcgtaatgttacaaaaaaaaaattgttactgttgagaccattataaataatcatgtcatgttctttaattatcaactttgattgtcatttaattgtaaatttcgttagttaatctgtcctcttcttgtaattaaataaaaatttgtttcaataccaataaagttgtcctaaaaaaaaccacccctctaaatagggagtgagtgagagagagagtgatagtgagaacaaaaaaaaaacatcatttcttctcgcactcttcacctgctccaatggacgaaagacccgagacagagctaatatcaataccagccacaccacgagtttcaacaccggagattctaactccctccggtcaaagatcacctcgtccggccaccaaaccatcgtcggcgacatggactccgacttcgttcatatcaccgaggttcttgagtccgattggtacaccaatgaaacgagttcttgtgaacatgaaagggtatcttgaagaagttggtcatctcactaagctaaacccacaagatgcttggcttccaatcactgaatctcgtaatggaaacgctcattacgctgcttttcacaatctcaacgctggtgttggttttcaagcccttgttcttcccgtcgcgtttgcgtttcttggctggtgcgtttgcgtttttcttgatttttccaataatcttttttcttgtttttgagttttttcttgaactttgtgtttagtgtttcaagattatttttgtttagtgaacggcgagggtttattcgactctctgtggtgctcagatccagtttcagggttcactttacttgtttgggcaaaaatcaaaaatgtttttcttgtcggaaataataataggatattgactaatttactttttaactttgaaaacatttcaattttagcagtagatattttctttttaatttgtcatgcttccatcattacacatgtggatactcacagacatacttttttgctttaatttggattaagacagagccttctttatcgtctactttgtttcttgttaatttccggcaaaaaacacttttctgaaaagtatttattgtgtatatataagtagggcatgtagttgacgtcataatagatgactatttcttcttataaacttatatttagataaatattttttattgcaagttctaatatttgaaactatacataacttgttaaggtggagcatttggctagttcaatacttaaatagcttagtgatgaataatgatattgcaatgatcatgtatttgagattcttatgtaagaaaatgcacatatattatttccaaacttcaagaagtgaattattgttgttacaggagttggggaatactgtctttaacaatagcatattgctggcaactctacacactgtggattctggttcagttgcacgaagctgtccccgggaaacgctacaatcgatatgtcgagcttgcacaagctgcttttggtaaaatgataaatttagttttacattaagaatgatgaaataatgcatcaatagtgacaattattattgatactaattttgtgtcttgctaagttgctattactaaatcttgtactcttgattggaacaggagaaaggttaggagtatggcttgcattgtttcctacggtttacttatcagcaggaaccgcgacagcgctgattctgatcggtggagagacaatgaaactcttcttccagatagtttgcggtccattatgcacctcgaatccgttaacaacagttgaatggtatttggtgtttacatctctctgcatcgttctgtctcagctaccaaacctcaattctattgcgggactctccttaataggagcagtgactgcaataacttactccacaatggtttgggttctctctgtgagccaaccaagaccagccactatctcatacgagcctctttctatgccttcgacttctggttcactcttcgctgttttgaatgctcttggcattatagcttttgccttcagaggtcacaacttggttttggaaattcaggtaaaatatgcaaaatatttctgtctatagataatgcacatattggacttatgatttattctgagtattgaaaactttgtagtcgacgatgccatcaacgtttaagcatcctgctcacgtaccaatgtggagaggagccaaaatctcttacttcctcattgctctgtgtatctttccaatctccatcggaggcttttgggcttatgggaaccttgtaagttccatttactatatcttttgtttatgtcttgtcagtgaaggatgtttatctggtgtttggttcatgttagtgaaatatagaattcaaaaggaacactaatatcatttatttatagttcgttttctgatctttggttcaatttccggattagtttgaagttattttttcttggtcttatagatgccttcaggaggtatgcttgctgctttgtatgcattccacattcacgatatcccgagaggcttattagcgacggcatttctcctagtagtcttcagctgcttgagcagttttcagatatactccatgcctgcctttgacagctttgaagctggctacacaagcagaaccaacaagccgtgttcgatttgggtcagatcaggtttccgagtcttttttggttttgtctcgtttttcatcggtgttgctctcccttttctgtctagtcttgcggggttgctcggtggactcactctcccggtcacatttgcttatccttgcttcatgtgggtcttgattaagaaaccggcgaaatacagtttcaattggtatttccattggggattaggttggttgggagttgcattcagcttggcattctccataggtgggatctggagtatggttaccaatggacttaagctcaagttcttcaagccgcctaactaagtagtaatagcctatgtggttttgtttggttgggaagtttgaagttttaagagattttgtatttctgtgttttgtttaagagtgcctatgttttgaagttggaacaatgtaatgtgtattataattcagtaagcttttcaatataaagaatttggaattttgaagaatcacacttgtgtgcctctgttgaatccctagctggaattttcccaacgtggttttctcttttccatctttttttcaaattattttgatactactaaaaataacgatacatgagtattaaactaaattaagctagatcaagaattcggattcaaagtaatcgttttagtgtatgaaagatgatattctcggatgatcttttgttctgcacaactttttggatcctgcgggaagagggaaagtatatagaattacatgatatcatatgttgatatcaagcgacttgacataagaattggtgaagctcatgtttgatgaaaattgatgtacaagtatacccctgtcgacggacgactgcactacgatttgtataagagcagatacggggcatgtttttagagtgtctttttgtacatgagaatttagatgtgtgcatggtttcatgtctattacgcatttaataccctcaatgtacatcgagtcgatttctctgtcatgttctaggtgaagtgtcggaccgccaatgagattgtgggatacgggctttgccctccatgcccaattcggcccaaacacaaatagaacaagtcaagaaagctactaacaaggaagaacggcccatcagaacaacggcccatcagaatgactgctcggcccatcacagctcggcccatcacggtttggcccagcccgataaattcagaagggcaaaacggagaaatcgctagagagactaagagaaccctagatcagcttcttgcctataaataagaggagacactactaagaagagggatccagaacctaagtcaccactcagaggatttaagagagaattgctgcctacctctttatctcttattttctggttttccgttctgtattttctggttttccgaccattaatatcgattttccgacctgtactttcggttctccgttctgtacttacggttttccgttctgttaattattgtcttttcgttcgtcattaataaagaagctactccgttctccccaaaccccttaataattattgttacaacctcggtacaaacaattggcgcccaccgtggggctaggcagagttttcttctgatattgacgagcagctacgatgttgccagtaatcccggagagccacgacgagatgacggaaacctcgaacgaacaaggagtcagaaccatcgcgcctcgtgccgcaccaccagctcggccaacgacgccaccaccagctcggccaacgacgccaccaccagtttggccaacgacgccacctccagccggagctcctgtcgcagttccagccgcagctcatgtcgcagttccagccgcagctcctgtcgcagctcctgccgaactcggagaaacaacttcacgaagaaccaatcttgacgaagtcatccgatctttcctcgaccgactcgacttacagaacacaagaactaccgaacgcatcaacgtgattgtcgctgcccagaaggcatcgtagaatcagatcgagcaactccagtcctccgcagctcgcgccggtcgacagctcagcgatgacaaaacagtcccgccccagtaactcttttcatggaaagaccggtgaaccgacgcaataggcctgcttctatcgttgttgggtccatcgacgagcacacccgtgaaaatgcgctgaaccgtgacaaccggccgaacatcgacactcgaacataccgaatagaagaccactatatcggtgcgagcgatcgtgagctctaaaaattacaaactactatgaaggatataactctgctcagcaccaaagttagacctttcttcaactgaatcaaccaacatgatgcaaagacggccgagcacctcaacataaccgttgaaagagtagggaatcaagcatacccctcaagccgacccggttactcacctgcacctgctatcttccttcaaaggctgccaagactgactattccaatctcaataaaactgcaaccaagaggacttaacttgacaaactcgtcttaaccgacctcgacccgactcgatagccaccatcttcttcgtccagctcgttgcctagccgccagtttgtcgcatggcatcaagctcgtcgcctagcggtcaactcaacgcctagaagctagctcgtcgccaagtagccagctcgttgtccaactgatagctagtctcctagcagccagctcgtcacttaccaactagctcgtcgcctaactgatagctcgtcgcctagctacttagttcgcctaaccgccagctcatctcaaaacggcctaactgcggagcttcaacgtcatgagaatcctgtccacctcacagttatatcatcaataagactatgtggtcgtcaactatcacctcatcaatctgacagttccgtcttatcaatccgaaagttctctatcgtcaactattagctcatcaatccgatatacctgctcgcaacgctgatctcgtcaatttgacatttcttctcgtttatccatccgttcctgctcgtcaaacgctcgtcaatttgaaagccgtcaacccgagaattcctgctctcaactgtgagctcatcaatcctacagttcctgcttgtcgactgttaaattgtcaacccgacagttcttgctcgtcaactgacaacacctcgtccaactaccacatcgagctcgtcttcaagcttctcaactcgtccttaagtctcttagctcgtctccaagctcttcacatctcctgagaaactatctcctcgcatacatgtcaggtcatcccttgactccacagctcgtccatctcctcgtttaaatgtcggctcgtcccttgactctatagctcatctaactcgtcgtgtagctgtcgattcatcgcttaactgcacaactcgtccaacttgtctagctcgccgacccgatgaagaagcaatgccaactttagaagaagtcaagccgaccaagtgaataaaattgccgaccaggtgaaggaaaccacaccaatcaggtgcaggaggccttgccgactcgaccaactagtcgacccgacgacttgaagttgctctgaccttgggaagtaatagcataaaacctgtcaaaaggtctcaccgaccagagaagaagtcttgtcgacaaggcgcaaaacacaaaaatctctgaagtaccaaactcattggagcaacgacaataggcaatatcgcatggccaaacctctcaaaagaaagagggaaaaagttagccaattttcctaagaaagtatctccacaacacaaatctcctaacactcgccaacacgtcgctccttaatcatacgaccaagctctttctcatgttcactatgtgcacccttgtctcagttattcacaaccaaattgtcaaacccgttccccaccatgagacaacccagtccgccatactcgctaaactctccctcacggtcgctaagatccaatccattgagatccgcattaaatccgcgataactgaaggtggaacgaatctctcaacctcgctagaccgcacatcatcttcgccgagctccgcttccggctcctcaagctcgcctcccaaacgaatctcgccaactcgtcgagcatactctaagccgagctccacacttaacggaattgtcgcaaaggatagctcacggtgatcaaagtaatctgcaaaccaaacttcttctatgacgagctcgcttctccctatgtcgatctctccacaagcctcgatctgctcaactcattgagatctaaagccgagctcatcgcctagcatgaaaacgacccacccagtccctaaacccaacttaccaacgtcactaatcctctttggcagatcaacatggctaagcgtgacaagccttgtgttggtttcctgaacccgaatttccgcgacgacggatacgctcagctctaagcgcgcacatcaaaatcaaaaaaaaaaaaaaaaaaaagaacgctcgcctgccgagctcatttgctatatagacaacaattggtttaatcccttctacgtgatacatatgcaacttcttctaaacgttattttttttaacgcgcacacaagttactattccaagtctaacttttacgagtaacacttgtcatccccacatcgtctccctggcgaggagttcgattctaaaacgcgttcccacatggatgcagtggtgctcgtcggacaggtctaaaaacctatttccgaagaaataatccacatctttacttaagtaagctaaaacttacacttaaagatttaaagccgacccagattcgcaccaaataagctgatagtaaggcagaacaatataagccgagtccgctcgcacgttctcactgacctagaggcatccgcagggtaagccggacaccagcgccgcacctataaagtacgacgagtcagtctcgcatacttcatacgtaagccttgtgattcgagttcaacgtatacaggataagtcaagggacgccttgccccataatacgtttcgaaaccaagcttaaacgccaaggaaaacctcgcagaatataagccgaggataaccttgcacaaaaaactcaagaacaagcttcaagtcatcactaaattctccgtctagctcatcattgtcacttcgtctctaagacaaactcctattgcgtatttagataggataagccgagctgcagatcgcaccgaatctaaatttcacagcataagccaagcccaaccttgcattcataatctgaagtcaagcttagtctcgctcccaaataacaaacaatatcaagctgaatcaaactaccagttacggttaagccaagctcgatctcgcacatacaaagatcatttcctaaaacgcatgacaaagacacgatccacgacataacttaaagtcgtgccgatctccccatgcctagaagaagatccgcaaaatcaacatcatcactcagtcttacgtcatctcctcgctcgccaaaacaagtttgtcgcactcacggccataacaatccattgtaatgccaaccaagtttggtaccacgcaaaatcaatcaacattcacactgatcgatttcgacgattgtgctaagcggacttacttcctcgctactcgacacggatccacgaaaacctaatgtcaatctccataaatttatatccacaaagcaagtgttcccagccaagcgttccttgcagagcattactcaccaagcgttctttattaacaaaactatcaaacgttcctagctcaaaaacctccaacgttcaatccttgcctaacaggcgagcgttacttaccaagcgttcatcgcagaaccaacaagcgtttctagctctaaaatacggagcgttcagtcctcagcgaactacaaagcattcccatccccgaagcaaacgattgagcgttcttcactaagctacaaagtaatcctcatcaaatcgccgaactaatctccaatcttgctaagcatcaataatcgcatcgagctacacctttggcgatgccacactacatctatcacttacaaaacgttcagcctccaccgaaccttctcactagacgaagccatcacatggaacagaaccatcttgttgacctgatccatcgcatcaaacaaaacttatccccgatcgttctccacccaacgctaggcattcccataaacatgcaaaagatctaactagggaacttcgcaaactcccagcatatcgttgctaggcatcttagcaaactcgtagtggatcagagatacacagctcgacaaactcccagcatatcgttgctatgcatctttgcagactcgcagtggatcagagctacacagctcggcaaactcacagcatttcggtgctaggcatcttagcaaactcgtagagaatcagagctacacagctcgacaaactcctagaagcatgaagctaggcatctcaacaaattcgtagaatatcagagctacatagctcgtcaaactcctagaagaacaaatgttgacagctcgacaaactcccaccaaatcagagtcaagcattcccgcaaacctgtagaagaacaaagctaggctgtctcgcaaacttgcaacatatcggagtaaatctcgcaacgattctccctgaactcattgccgacctcattcaccgactcctttcccgccgaactcccttagcgattcaaactcatagcccatgtaagaactagatcacctgcctacctcgacgcaagattcttgccgagaatacacgcgttgtgccgacctcgactcacattgcgcacgatccaacatgcaccgacctcgacgcatatcatgcgaccttgacgcaattcgtgccggcctcaacggaaaattgtagccaagctcaaatacctcgtgctcacatttacgcatttcacatcgatctcgcctaaacatctctacggccgacctcttttatctttcatgctcctcacactaatctcaccaagtacaccttcaaaattgacctcattgaactcttttatacaagaccagcacgccttgcatcgattttagtatcttcaccgagacgttcctcgttcaaacaactttgctcttgcacaaacacctaactcttcaaaagcgcttatctccaaaaatcatcaagctctcccgcgagctcctatctcaaaagatcttttagctcccccacgagcgcacatctcgaaagatcttctacctctccaacgagcgcatatctccaagataatcaagctctcccacgagcgcatgtctcctaagatcgtcaagctcgcacacgagcgtctatctccaaagatcatcaacctctccaacgagcgcatatctcagagatcttctagctcgcccacgagcgcctatctctgagatcctcaagctctcacacaagcgcctatctctaaaattttcaagctctcacacgagtgcctatctccgaaattgtcaagctctcacacgagcgcctatctccaagatcgtcaagctctccctcgagcacctatctccaaagatcttctagctctcccacgagcgcctatgtccaagatcgtcgagctcttccgtctcctacgagcacatacatccaaagatcttaaagctcttccacggacgcctatctccaagatcgtcaggctctcctgctagcgcctatctcagaagatcttatagctctcccacgagcgactatctccaaactcatcaatttctcccatgagcacctctcttcatgatcgtcaagctctcccgcaagcgcctatcttcaaagatcttccagctctcccacgagcgcctatcatcgaagataatcaagctctcctacaatcatctatcttcgaagatcgtcgagctctcaaacgagcatatatctttccacctcttgcgattctctgactcttgcaaaaatccacacttgctcaaacaaagaatttttccttggttcgggccaaattggcatagttccggtttcaggaaaatgttcgccgatcgcaagcaaccttctctcgccgaactcgggggggactaattgtgggatacgggctttgccctccatgcccaattcggcccaaacacaaatagaacaagtcaagaaagctactaacaaggaagaacggcccatcaaaacaacggcccatcagaatgactgctcggcccatcacagctcagcccatcacggcttggcccagcccgataaatttagaagggcaaaacggagaaatcgcaagagagactaagagaaccctagatcagcttcttgcctataaataagaggagacactactaagaagagggatccagaacctaagtcaccactcagaggatttaagagagaattgctgcctagctctttatctcttattttctggttttccgttctgtattttctggttttccgaccattaatatcgattttccgacctgtactttcggttctccgttctgtacttacggttttccgttctgttaattattgtcttttcgttcgtcattaataaagaagctactccgttctccccaaaccccttaataattattgttacaacttcggtacaaacagagatcattcccaaaattttactaccgcggtctcacccttttcatcctcatatccatatactgcctttacattcaccattttgtgaaagtaataaaaattacattaaaatatatattttttcttctaaaaattggtatatagtatgcttttgaagatatataaaaattatttttgttactttgttaagtgaagatatatatcgtatgtttatttctttgcatttttacaacatgtaataatttttgtgggatttagataatcaaaatcttttttgtttggttcatagattaatcacctattaaattttcaaacgtgttttacttttaacaataaataagcatgcttggaaaaaagaaactcttttagtcatgactcatgacccagtatgtgtgtatcttatcttcaaaaaccttgttgaaagcttttgcaacaaccaagtttaactaaaactaaaagtcaataaaacaaagaattgatataaaatgtcaacattgaagcttatcatatatatagtagcctctattctatctttcggttatttaaactattagttataataatttttgctgttccttttattcatttggtaatcagtaatcatagttagaaattctatattgatctcgtaaaaaatatgtgaaaatattggtctaatattatgcttttagtttggaaaaaaactgaggagcataataataattgatgtagggataagccaagagaagtcacaacacacatgctgagagataatgatgtaagaagccacaaactgggaaacggcatcatagttgtataattatggagatagataaacaaatgttgggtggttggtcattaataactatagacaacctttggctcaaaataaacattctttcgaggattcaattttcgtgttttttctcagcaaatgattcaaatctcatgatgactctgatttaatttgacaattgaaggtcaatgacacccacttccactgttgaataatatattaaagatgacaaatttttatgggaaagtaaagaatacttaatagttaacactttagtttttgtaatgatcttatgatggcatgccaccaaaatgcttaatctatgttttcgaatacagtagatgcaaataacttatttgaaataagtttcgattatagacgtttataggaataagaagtgagtggcaaaaaaaaagaaaaaaaatttgattagtgggatagatatcaatgaaattaaaaatgaaaagagtttagggatgaagaaggagtcccttaattattatgattgagaagaatgcaaaatttgttaatgtgaataaaaaataggtaatatgataacttagagcataatacgtaattgttgttctataatattgttgttagttgaattcgtaatgattcgagtattaggagcaaacgaatctgtgcaaatcaacaaacaatcaaaaccatcttgagccaccatgttatgttagtgttctctctaatacatatttttaaaaatgttcaaagtgctcaaaagttactcgtaaaaaaactccaaaaaatgtcccgacgttttttttcatttaacaaaaggttcaaaaaatgtttttgcccctaaggctcaaatatatgttgggccggagctgtaaacacaccttgtgtttgtggattaaggatgaacatgactcaaactaagttactaaagaataaatttgacatacaattaagtggagctgattacgctttgactgaacattgttgattgatttaggtgggcaaaagttttattagttggtaataaacttgagcatcattctcaatatagtcatgatgtagttaccgttaattatattcaacacaattcgtttttcttgctttgaccacaataggagactacacaacaatatctattagctatattccctacattcaaattttatttgaacgtttaaccaagtacactctagctgagatgtttgacacaaggattaaacctaaagatttttacaaaaaaataacactagctgataagtacaccataatctacattaaccctaagaatttctaatccattgatcgaatgaaaggttttagttcttagcattcatatgaattgtctcatatgctaaacactagactcacatgactttgatatacaaaatcttctacactgcaaatgaacaatgttgttgttgatgtttatctataatacaaacaaaattaagttcaacgcaatttcctcatttcaaagatgtagcaacagagcatctcttactcacttctgcaacagtacttatgtactttttccctttttggacttttatgctcaattcatctttctacatttgactattcctttcaaaatattaaccaaccaaaataaaaagaaagaaacgtttttactttttacttgtaaatccattccaatatgttcgtcacataaacagaggatttatacaccagaattgttggacctcaaaaactaaaataaataaaaacatttttgcttcaatttggtttcttttgctcttctttctaggaaaaaaaagaaaacaaacagaaatttccaaaaagacaccaacaaaagaagacaaaggcaagaaatcagaaacggtttcattttcacttaacatcgttggtttgcattgagatctcaagaccaggccatatcaaactgtctcctccacttttaccttcaatctccccaatctgccacgtgtcaccaccacaaccatcaaccaccggaatctctcctacggaagaatctccaagatacccaatactcatctcctcaagcccgtacccgtacccaaacccgtaatccaacccaccatttccacttcctaaacctaacagagaagcaaagcttccatgacctgaaattaaattagtaaccttagtttgactcgcttcagtcgtggctggttcttgtgtcgtggtggtgatgacggaagaagaggaggaagaggaggtggcagtggtggagaaagaacggtgacgttttgaggagcttcgacgagttccaccaccgacggggacgtcacggagtgtaccaccttgagtccagtaacggcggcaagatttgcagtagtagcgaggctgagcgaggttatagttgttgtagtaacagaacttggtggtggtggagttgcagcgaggacaaggaagaggctcagccagatttggcggtgggtaagccgccgttgagggctgaactctggtgggtcgggtttggtttggttccgacggcatattaagttgagagtatgagaaaacgagagagaagttaatggagagaagagagaagagagaaagcgaaagagaaggggatgttgtgagagtggtgatgtggtttttatatagaggcttttagacgtttttttcagttgccttttatttattaattgatacatatgaatttaatttattttccccttctaaaaataatttaattcatatttagttttttttaaaaataatttcttctatattaaatttaactaaaaaatggttaaaatatgagagtggatttaaaaatagtatttacttcgttaaaatgaattattagcggaatagagatgagagaaaagtttgttgaagatattatgaagccttttctcattaattgtaaaatgattctgtacaaatgtcttatatactttacactatacaatggttctactaaaccaactaataccaactaaaccaatatacatatctgatatgccccctcaagatgtgcatgaaaagatattaagaatgctcatcttggatttaaggtgttcgaattgatggggaaataacggattagtaagaatgtccgctacttggtcttcagttcgcacatgaagcaacttcagctcgccattgtctagtttctccctaaccgtgtgacaatctagctctatatgcttcgttctttcatggaacacaggatttgtggcgatgtaaatagcagttgtgctatcagaatataacacaggaaccaagtagctagcttttaaagacatgagcaaagtgtgaagccataccagttcacacgtaaccagtgctaaggcacggtactcagcctctgcagaagatctggaaaccacatgctgtttcttggaacgccaagatatcaatgaatcacccacaaacatgctgaatccagttgttgatctcctactatctggacaggaagcccaatctgaatctgcaaaacctttaagagtaagatctgcagatgcagaatagaacagaccttggccaacactgcctttgatatattgtaaaactcgataagcagcttgaagatgagacgtcctaggagcagaggaaaactgacataacttgttaactgcaaaggtgatgtcaagtctagtaattgtcaaatacatcagctttcctacaatacgacggtattgttctctatcatccaacaaatcaccatcagtcttcatcatcttcacattcgggatcatgggaactgaaacaggtttacagttaaccataccagtagatgctaataactcaagagcatactttctctggcagatagaaataccagcttcagttctagcaatctcaagacccaaaaaatatttcaaatccccaagatctcttaacttgaatcgctgttgtaaatcctgagtcaattgtattgcagcaccttcacttgtactcgcaatagcaatatcatcaacataaaccaaaacaatcacaaattctccatcatactctttaataaacaaagtatgatcaccatgtgtcttcttaaaacccaaatcaagtaatgaagcagaaaacttcttaaaccactgacgagaggcctgtttcaaaccataaatggatctcttcaatcgacagactgaattaggaggtagagtgatacctttccttgccgcataaccttcaggtaacttcatgtaaatctcttcctctaactcaccattcaagaaagcattagacacatcaagctgttttaagaaccatttcttagaggcagaaatcttcaataacaacttgattgtagtcatctttgccactggagagaaagtatctgtatagtctagaccttctttctgagtgtaacccttagcaaccaatctagccttataccgctcaagactgccatctgccaaaaacttcaaactgaatacccatttacaccctactgccttcttccctgcaggtaaagtagtaatctcccaagtgtgtgtagtttccatagcaccaatctctgcatcaacagcctcacatcattctttggtgtcctgtgcctcagcaaatgtggtgggaataggaatttttgtgatattattgatataacacatgtgagatggagaaattttagagtaagagatagtagaggaaataggatatttgtgattagattgcgtgatgttgcaatgataatctgacagatgagcaggaggtttcctaactctctgtgaagaaatttgtggtggtagatcagaaatttgtgatggaagagaagagataggagattgtgtaatacctgaggacacaggaaccattggagtaaacaacttcaaagaactctctgactttggatccacagccaatggaaatacctcctcatgaaaaacaacattccttgagataaacacagtgtgactctccaaatccattaacttgtaccccttgtaaccagcaggatatcccaaaaacacacacgctttagatctcggctgaaacttatgtctttttttggcgaagtagaactgtaacacaaacaaccaaaggttcgaaactgctcataaacaggaactgtaccagtgagaatctcatatggagtcttgtttgataagagctgggaaggtgtcctgttgataagaaacacagccgttaacacacaatcaccccaaagagagagtggtacctgagattggaacatgagagcccgagaaacattgagtatgtgttgatgtttacgctcaaccactaaattctgctccggtgtttcaggacaggaatgaaacgaaacaatccctttctgctgatataaacttgtgaatttcaattctggtgcattatctgatctcactgcctttactctcactttatactgattctcaacttgttcaatgaaagcaggaaacacagtaagaacttctgacttgtttctaagcaaataaatccatgtagctctggaatgatcatccacaattgtcaaaaaatatttatagccatccactgtctcaactgaaaaaggaccccaaatgtcaatgtgtaacaaatcaaagatttcattacaaactttattctgagaagggaagggtaactttctctgtttagctaaatgacaaacatgacaataatctgagcctttattcttaggcttagtagtccccaaagagtctgaaataacatccaatctctgtagagaagcatgaccaagtcttcgatgccacatactgatatcaaccactgcattcactgagacaataggatcttcaatatccagcacatatagattcgcaattctcctaccttgaccaagcatccgagccttgataggatcctgaatttcacaagaagtcttatcaaatattactcgtgaaccaatgtcatcagtcagagaacttatactgattagattcaggcgaaactcaggaatgaataagatattcttgagaagaatgtcatcattaagtcgcaatgtaccaacaccactgattcttacagtaggaccagctggtaaattcactgcactcacaacagaagtatccaaattcaagaaaagactcttatcatgagatacatgatgtattgctcctgaatctatcacctgagacttgtcaccacctttgcctttaggagtaaaaccaagagggaatccatgctttttatagcatctttctgcaatatgtccaaccctattacagaaagaacaaatcggtctgcccttgtttggaccactctgaacatagcatattcacatcattgttagtagccatcattgcctcagagacctgaaaagcagccggtggagcaaccacattggaaaaaccttgttgactgttgtcttgatccagaatgtgatacacctctgctaaacttgggagtgctttcttagcaatgatctgtctgcgaatgatagcataagaatcattcaaaccagctaacaatttcactatcttagcttgctctgccttctgttgcaaacgcatagccttaccacaaatacagggatcatctagttcctctgtactttctaattgatcccacaatgtcttgaggcgagtatagtactcagacaaagacaatgtaccttggcgaaaatcctggatctcttgagtaagattatatgtgcgtgggagattagtcacattgaaacgactgtgaagatcacgccatatatcagaagcatcattcatacggagaatgctcctatagatctgaggagatacagaattcaataaccaagacttcaccatgcttttgcatctagaccaaagacgaaaattcttatccgattccaacggacgagggagagttccatcaataaatccagatttattcttagcatctaaggagataagcatagcaacattccaatcaccatagtttgtttcatcaagacgatgagatatgatattcaaacctggatgatctgcactatgcaagaagaagggagactgagtcggatcaacggattccggtggtgcgatgactcgcgaagctccagaaacgttggatttgtgaactggaggagagatcggaggagattcatcaacaccggtggatcgcgatgattttcgagctgcagaacttgtaccggacttcgatcgagtggatttccgagtaactctagctgtcaccattgtatctggagcgagaacaacgaagaagacgaacttgagctgagaatgaagaaatcagatcgaaaacaatggagttttgagcttggaaggctttgataccatattagcggaatagagatgagagaaaagtttgttgaagatattatgaaggcttttctcattaattgtaaaatgattctgtacaaatgtcttatatactttacactatacaatggttctactaaaccaacttatatcaactaaaccaatatacatatctgatatgaataaatcgatgacataacaacgatttttgtttttgggtaactctttcaaaacactgcataaacaaaaaaaaaactattatatgcattaagtagtccaaaaaaatacgtataaaacatatcattgtgaaacatgattagattttttaggtgttaagtagtgaataacataaactttgaataataaaatttgaattactcaaaaaaaattcaatagataaatcaaaatacattattcttgaaaaccataataatcaaaaaatgaaaatatatgtaatttcaatctcctttaataaatttcagatgacaataaaaaataagtcactaaattcagttcattttacaacaaagataactctcattttggtgcaacaatatgaaaactagctctcaagaaattgaacaaaaacttttacggcccaataacgacccaaatcaaaacccactaagagttttgttgattccatcagagtttcagactttcagagatcagaaacctcttcttcttcttcaatttcacagcttcacgtcgtcgtctttgagtcgccggagctgtagctactgatttggtaccagaaagagagtgcgacggtggacgatgacgctttttcacttcttcaactgtgcgattctcacattcggtcctcacgcggtctactactccgccactcccttgtatgaacaaatcctcttttctcgatctgtaatatctgttagtttactcatacctaatctaagattgtacttagatcttctttcgcttcatgatctagaatcttaaggcttattagtatgcgctttaacgccacttagttgttgagaatttcccaaaattgaatctgtgaattgatattgtttcttcacggaattagaattgatgtttgtaatcggaatatgaatctgcagatctgaatatgatacacttggaacctccgtgaaagctgctgttgtttaccttgctactgcattggttaaggttagtcaactgtaaaaatcttagtgcaaatctttctttcgattgattgtatcttctgaatcgcttttagctaagcttattgattgttattttcatggcagcttgtttgtttggcgacttttctgcaagtgtctgagactgaagtgtttgacccataccaggtatgtacttgaagctaagatcaacactcacacttgtttttatgagtctttcgtttacttctctatctgagaggtgatcaagttgtcgtatttactactactcttaaggaaaatgaaattgacatacaatgttaaaccatcagattctattattgttaagcttgttttgttatgctacaatctagatgactaagtatgcgtacgatctcccttgtatcaggaagcattgaaagcgatgattggattcatagatgtcgctggtctgtattatgctctggcccagctgactcacaggaacatctcccaaaaccataagtttcaggctgttggtctcggtaagtgaatcactactgctacaaaatattgttacctttggctgtgacattctaatttcatgttacatatcgatgatatgatagtggaattgcgtttagcgggtttgtcaaaaaaaaagtccttttcatggttcctggagaagtttccatgactaattaccattgtagcttccaaccatttctagacttccctcaatgattctttgcgtcacggaatatatatatatatcaaatgtgatttgagagatttgttcttttttgtttcagggtgggcattcgcggattctgttttgcacaggttggcacctctctgggttggtgctcgaggactggagttcacttgggattatgttttgcaagggcttgaagccaatgcaaatctggtactgtatataccagttcttacttctagaaagatccacctgtaattgtttctcacttccatataacgtttgtgtcaaactcaggtgttcacgatatctctagctgcactaggttcattaatgtggctacgcaagaacaagccgaagagtctgatccccatcatatacacatgtgcagtcatcattgcgacaatgccttcgatcacaagctatctaaagagagtcaatggatggcatttcccgaaaattgttgggtttgagctggcgacttctctggtaatggcttttatcagttgtcaactcttcatcctctgtcagagaccgtctttgtgagtgattccacttcccagcagagctttttgttaatgggaaactcttgcgacgcacttgccttgttttctgcaggactcggttccatggaaactttgatctttcccatctttatttgtagaagaatattgaaccatcctttcataacttattgatttgggaagtgtcattcgttaaagcatagacttagaatcataataactaagagatgtttatcttgaaattatcttacaaatctatcaccaaattgtgatataaagcattactttgcagtgtgttaccataaatgagaatcatgtgctcctagattataggagacggtaaccattaaccttcaacaaaaatcattaaatgttctaagattcatctggttattataatacaaaaatgacttttaaaaacatatctttagtgtggatctagatctagagatgcctccatctctgggaattcaatgtaatgtaacaatagacttttaaattttcccagttgacgtgtgattgtgtgtataaaatcgagttccttcatcttctccttgtacacaaaataaccatctctctaatggcttcaatagggctatatgaagcattcataggtttcctctgctttctcatctccttttacttccttgtcaagaaacctttcaggtacttactcatcaagaaaactcatcaaagctacccttggaactggccggttcttggaatgcttcccggtattctcttgaggctccagcgcatctatgactacagcgtcgagttcctcgagaactccaacatgacgtttcaattcaagggcccatggttcgttggaatggatatattagccacggctgatccaacaaatattcattatataatgagctcaaacttctcaaattacatcaaaggtcctatattccacgaaatttttgaagcttttggagatgggatcattaatacggacgcggagctatggagggattggaggaacgcatctcagcttatatttaatcatcaaaggtaccaaaacttctcagcaagtaccacgaaaagtaaagtcaatgatgggcttgtacctcttttcaattgtggacttgcaagatgtgttccagagattcatgttcgatataaccttcattttcctaaccgggaccgatcctagaagtctctccattgaaatgccagagattgagtttgccaaagctcttgatgatgtgggagatgtgattgtgtataggcatattacaccaaggttcgtgtggaagttacaaaaatggattggaatcggaacagagaagaagatgtcgaaagctaatgccactcttgatcgtgtttgtgaaaaacttatagcagccaagagagaagagctaagatcacaagggattattgacaatgcgaatggagacagtgaggatcttttgacatcccacataatgcttgatgcaaccaagtacgagcttttgaaccctaatgatgataagttcctcagagacttcacagtaagtttcatggcagctgggagagattccacgtcctcagcactcacttggttcttttggaatttaactgaaaaccctaacgtcttaagcaagattcttcaagagatcaacacaaatctaccaagaaccggaagtgaccaagacatgtcatcgtacttgaacaagttggtgtacttacatggtgcattgaatgaatcaatgaggctctacccaccaataccattcgaacgcaagtctccaatcaaagacgatgtgctgccaagtggacacaaagtcaaatcaaatctcaatattatgatctttatctacgccatggggagaatgaaaaccatatggggagaagacgcaatggagttcaagccagagagatggatttcagagacaggagggttgagacatgagccttcttacaagttctgggttgagacatgagccttcttacaagttcttctccttcaatgccggcccacgaacttgtctcggtaagaatttagctatgaatttgatgaagacggtgatcgtggagatattacaaaactatgagattaagattgtcagtggacaaaagattgaggcaaaacctggtctcgttcttcacatgaagcatggacttaaagtcacaatgactatgaaatgttccagcttggagtgaaatgctcatggtgctttaattttttttgagaatattacactctaagacactttttaaaaactatgtatggaatacgacattttcaaaacataaggcacttccaacaaaaaaattgtcccttctgccctcaaaccaatttcggtttaactctataatctcaatttttaaaccaaaccaatttatgagaaacctctctttctcacccaatctcccacgacgattttacagtttcatttatctgggcagtcaaaatccttaaataatcacaacatcgataacatcatctcgccttcggcgatcatcccggcgagttttctaccgacgaattcatttccttgtccctctcctgtcatcgtcaacaaagctttcaatcggccgacattaattcgtcctctaccgtcgccgtcgtcaacacttgctctcttgtcatcgtcgtcaacacttgctctcctgttgtcgtcttcattttcttgtctctcaatcgattcgtcgtcttcagcgtgtgctagtgacttctacgcggtcctaaaatgcaaggtattaatcttctccaatcattttttttgctccaattattcaatcgtgtgctaattttatttataagaaccaacattgtgaagagctaataggtaaagacgtgaatgctacgttcgatgatatttcagcttgcttatctcgtcattgctggcggtgtcttcatatcctcaaaccaaccgagtaagcctacatttaaatatgtatagatgttggcagatttggacaagttccttaactgactgagatctacgtaactgactgtctatacacatgtggataaatggtcaaagaaacatggataatctactttggattggcgtttattgttcatgtataaacttatgtattagtatgaaactatcatgtgagtcgttagatgatcatatggactggacttcttggacaatcattaatggataagtatgtctttgatttgctgcgaatgtgtttatagctcgataaaattgtatcaacatgtctatacacacgtgggtaaatggtcaaagaaacatggataatgtactttggattggcgtttattgttcatgtatatatttatgtattagtatgaaactaccatgtgagtcattagatgaccatatggactggactgcttggacaatcattaatggacaagtatgtctttgatttgctgcgaatgtgtttatagatcgataaaattagcacttttttgtttgctcatctaacattatcattggagattctttgcgtcacggaatatatatatatatatactagaaaatatcccacgcaacgcgtgggtttaaaattaatataatatatacaatatttttttaatttatatatattaaaatatgtttagctctttaaaaaaaaatcattattgtgtatatcatattacataaatttgttgtttacaatggataatttgtaaagctttcagaaaaaatatttggaattactttcaattaaagagagcaaattaattttattttgaatataattttcaattttattatggaatataggtagcttgaaataagtgttatatgttttgctgattttgaactacatttatcatgtaggttacatttatcaattttatcatgtaggttacatttatttttcttttgttctaatttatatgaattatgtggtctaaataataattattaataaatatataattaaagtttcaattagcatgtcaatatgagatcatcacatttatactttcacaataaataatatctactgaagaaatttctacacatttttagcatgtcaagcacaccactctacaataccagtttacccaaaagtaattgtaactacactcccaatctagaaaaaaatatagaaaaaatgtttgtctcatatttcataaaaagatacattttatttggtcttgatataatatataattaaaccttttttaaaatataattaaggatacaatgtatatagataaaagaccgcacatgatggcttctcaaatactctcatataaaaaaaacttaaaatttaagaaaagataaacttggaaaagaaaaatattaattcatttcaatatgtcactcatataaaagaatctaatttgttttgcataaatataatactcttttataatgtattatttggtcctaaactattattttcttaatgtgtatataacatagattattgtaatttgtattatacaacctttcaataattttgacttataggtttttaaaaaatttattggaaaggtcattaaataaatgatagagaaaaaattaaacaacctaaatctaaaatataattaaggatatagtgtatatagataaaagaccgtacatgatgacttctcaaatactcttatataaaaaaaaaaaaatttaagaaaagtttaacttggaaaagataaatcttaaatcatttcaatatgtcactcatataaaagaatctatttttttggttcaatataagagagtcttttataatgtatttttcgctcttaaatatgattttctaatgtgtattagacatagatttttctaattgtattatagagtctttcaatacaattaaacaatataaaggccattaaatgtaagtaatgatataaaaaaattaaacaatttcctaatgtgagtgaactaatgttgatcatgttttcttaagagactaagaattgagcttccttatactaaaaaatcggaattttttttaagttttttttgtcaattttgatgcaaatgcaagttgatgtagagcaaaataatattattgaacaaagttactgaaattttgttttaaagagcatataagtcaacaaaatttggtaactatttatagcgatattgggtaaatgaatgataattttgattttaaaatataaatagaagctatatataatttgaatttaatttaattaacaaagataataaacattctagtaaatttaaggggtaattcaaaatatttaagttggaaagaaaaataaatagttatataattattgtggtcatacctattattatcttgcaattgactctactatccataatatgctagctttttctttcatatccatttaaatggtttaaagtgcatttgatgcgtacaaaaaaaaaaactaacaaaatatataagtaagactcaatataaccattatagaaattttaaacaatgtgtaatcatttacaaaaacttaccaaaaaaaaacaaatctgaaagctaatatgagtccaaaccttaaatgacaaaatgataaggttgggactcttgcccgtttagcttcctctttcatatccatttatggtttaaagtacatttcatgtctactaaaaagaaaaaagaaaaataaaatctaaaagatacataaatttctcgatttacatttagaacaaaacaaaaacatgtaaagaagactcaatataaccattttagaaacattaaacaatatgaaatcattcacaaaaactttaaaaaaaaaaatgaaagctaagatgagttcaaaccttaaacgaaagagacaaattgataaggttgagactcttgccgtaaatatttagtagttagccatcttcctttttttttcccagtaattgagtaacttcaattgtcaaaggaaacaaaagcacttataaatatatatgtgttgtgtctgtgtaaatatttgctatttatattagaaaagtagattgttagggtataacgaattcatgtgtttatttccaacataaaggttaataactatagaagaacgtttacaacataaacgttacatgagtaacaaactaacaattttcttttttttttaaacgttgcatgagacattgagtattcaatctcattgagtcactaatgatcttaatgaggtttaactgcatggtatttaacccttattttctttctctctttgctcttaaccgttatcaaaactatggtcatttgagtcttttttaagcaggtgagctttacatctacttctcatttattttcttattaaatcatatttttaaaagcatatgtagtatttaaatatcgataagtgatacatcataaaatatatactaaaaatcataaagaatatataattacatttcttttatcattgttttgaataaattataggaaaatatgttatatgtcgcgaaaataatgtttattatttacttctaaatgactgaaagtaaaaagaaataaatttagaaataaatttcaaatttcttatttacattgtctgaagaaaaataatattatttttattgtttgaagaagtataatatttataattaaatttaatgccaaatgatcatggtgtattttaataaaaatgaaagaatagagatattattggaagggaaaaataataaaaaatacagatttgatttaatcatctattatattacattttacaaagttaaaaggttaaatgtaataaaatacaaatattgttagaagtggaaaagggcattcctcaaacaacagtatctttatatatatattatatataataaatcttatagaaaaaactaattctaaaagcttagtgtaaatgataaattatatagaaaaacaaattctaagatttttatactactatatatattttgtatttaaactatttatatatttaattggttaaatgttgagatattagtatatatattaaatgttgagcaaatgtcatgataatagagctccttacaaaaaagatctagtcttattatataagatatatcaaattttatttgagagatttgttcttttttgtatcagggtgggcattcgcggattctgttttgcacagattggcacctctctgggttggtgctcgaggactggagttcacttgggattatgttttgcaaggccttgaagccaatccaaatctggtactgtatataccagttcttacttctaaaaagatccacctgtaactgtttcttaggccctgttcgtttgcctgtcgctggcgactgaaaccagcgacagcgaccaaaagttgttcgtttgtctgtcgctggttcagcgatcaaaagtagcgacagtcgccagcgaccagcgaccgcaatatctctggatccagcgacaaggaaacgaacagggccttacttccatataacgtttatgtcaaactcaggtattcacaatatctctatcatatacacatgtgcagtcatcatcgcaacaatgccttcgatcacaagctatctaaagagagtcaatggatggcatttcccgaaaattgttgggtttgagctggcgacttctctggtaatggcttttatcatttgtcaactcttcatcctctgtcagagaccgtctttgtgattccacttcccagcagcaagaccaaaacagagttcaattgttctttaggcagagctttttgttaatgggaaactcttgcgacgcacttgccttgttttccgcaggactcagttccatgaaaacttagatctttcccatctttatttgtaaaagaatactgaaccagcttttcgtaacttattgatttgggaagtgtcattcgttcaagcatagaatcataattactaagagatgtttatcttgaaattatcttacaaatctatcactaaattattggtgagttgattcttaaagaatctaaagatttcaaaagtttagagattttaaaagtcttaaagaatcttatggatttttctcaatgagttgtataaattatagcaatatttatcatggatttctgttaacttttcctcgacaaagtttttcaagacaatatttttttcactgttttcattttgtttatttgttttattttactttttttttgtttattaaaactaaacaaaattatatatctcatatgatataaatccttgacatattttcagttatcataatcgttaatgtaaaatttatgaatgtaaaacgctactgctttttttatgttaaagaatgaaggaaacaatttgttggatttttcgggtattatttttttgatataaattaaaaatctcatggatatacatgtgattttgaaagttgtgtcttatgagttaaattgaagagaattcatgatccaatagcatgagaatttagtagaatgataaattcaatgataactaaaaattttgaataacatgagattgtggatagaattcaaaagtcatcaaacggataacactagaatttactaagaatgtagtaatccattaaccaataactgtggaatctgaaaattttaaaactctctaaaatttatcaaccaataacaccccttaaagcattactttgcactgggtttaccataaatgagaatcatgtgctccttgattatttataggagacggtaaccattaaacttcaacaagaatccttaaatgttcttcgtttcgatccttaaatgttctacgtttcgtctggttattataatacaaaaatgacttttaaaacatatctttagtgtggatctagagatgtctctctcggaaaatgtaatgttaacaatagcttttaaattctcccagttgacgtgtaattctctgtgtataaaatcgagttccttcatcttctccttgtacacaaaataaccatctctctaatggcttcaatagggctatatgaagcattcataggtttcctctgctttctcatttccttttacttccttgtcaagaaacctttcagttacttactcatcaagaaaactcttcaaagctacccttggaactggccggttcttggaatgcttcccggtgttctcttgaggctccagcgcatctatgactgcagcgtcgaggtgctcgaaaattccaacatgacgtttcaattcaaaggcccatggttcgttggaatggatgtattagccacggttgatccagctaatattcatcatataatgagctcaaacttctcaaattacatcaaaggtcctatattccacgaaatttttgaagcttttggagatgggatcattaatacggacgcggagctatggagggattggaggaacgcatctcagcttatattcaatcatcaaaggtaccaaaacttctcagcaagtaccacgaaaactaaagtcaatgatgggcttgtacctcttttcaatcactttgcaaatgaagagattgttgtggacttggaagatgtgttccagagattcatgtatgatataaccttcattttcataaccgggaccgatcctagaagtctctccattgaaatgccagaggtcgaattttccaaagctcttgacgatgttggagatgcgattgtgcataggcatattacaccgaggttcgtgtggaagttacaaaaatggattggaatcggaacagagaagaagatgttgaaagctcatgccacttttgaccgtgtttgtgaaaaaataatagcagcaaagagagaagagctaggatcacaagggattacatacaactctaatggagaaagggaggatcttttaacatccttcataaagcttgatgcaaccaagtacgaggttttgaaacctagtcatgataagttcctcagggacttcacaataggtttcatggcagctgggagagattccacggcctctacactcacttggttcttttggaatttatctaaaaaccctaacgtcttaaccaagattctccaagagatcaacacaaatctaccaagaaccggaagtgaccaagacatgtcatcgtacttgaacaagttggtgtacttacatggtgcattgagtgaatcaatgaggctttacccaccaataccattccaacgcaagtctccaatcaaagaagatgtgcttccaagtggacataaagtcaaatcaaatatcaatattatgatctttatctacgccatggggagaatgaaaaccatatggggagaagacgcaatggagttcaagccagagagatggatttcagagacaggaggggtgagacatgagccttcttacaagttcttatccttcaatgccggcccaagaacttgtctcggtaagaatttagctatgaatttgatgaagacggtgatcgtggagatattacaaaactatgagattaagattgtcagtggacaaaagattgagccaaaacctggtctcattcttcacatgaagcatggacttaaagtcacaatgactaagaaatgttccagcttggagtgaaaatgctcaaggtgctttaacctttttttgctaaaaacataattatggaaagaataaggagatcatagaggatggtcctaagacaataggtaactagtttgtttattgtcggaatgtattttcaaccttaaattttagcttgaaactggttcatttatcaatgattgttgtactcgtattagaccctttcgcataaccgtaatttaagatatatattttacaaaatgatatattgtaaaattgccatctagttatcaaagacttatcatttaatgctggtccggacaaattcttgctgaccacaaaagtagcaaatcaaagttgtgtgtcaaataatggaattcaaaatcaattgataattattgaaataattcgcaattccgaaacttgatggccttttggattcagataatttgatgattgacactcaactttgtgcttgtaactctatttttgggaaatttatttttctactttatacgcttttgtaaaacctcacctcttcatgttaatgatattcatattcttttttaaaaaaaaaattaagggttctattagtatgactgtatgagatattactatacaagtcattttacctacttgtatatctcctaacaatgaaagtataacataaactacataggtccggaaaaatatgatatttcataataagatcgaggtcgagttgtaaataaccttagtagatgagccaaaattacattcatgcagacaaataacactcgataacataaacaaactctatcacaaatggacgatcaaaaatcaactctcttcaccaacttccgttgatccaattctgattctttaaccaaaccattagtccatcacctgaccttatccaatggtgtagttaacctttgtaaggtcatattcaaaaataaccgctacaagtttggcatttaaaagcatcattattggttgtttcttagattagttcttacgatttttttttgtcattgattactaagaacatctcattttaactcttatataagagacatttggtcattttgtctcttatataagagttaaaatgattagttcttatcctaaaaactaatctaagagataatcaataatgatgctttaatgctgagaggtggctttggctaaatcccgcgttggagagattgaggcatatatgacatctgcttaagagtttaaaattgtgtactgatgaatagagctagtgtgcatgatcaatgtaatgatggagcactaacaaagtacggtctcaggtgattaaattagaaatggtcgctgacaagagggaacagaaacatgtttatgtgggatcctacacatttatagagcctaaaacatagacacatttatagctcttgtagatcgtacctttgtttccatttttgtacaaaggaatcactataaagcaaaagcaacattgccaagaaaacataccattatcgaaagaaaataaaatacatttacttataacataaaaaaaaatggacggtcacaatgagatgataaccacccatcactttcatgtaactgtaatattgatacgtcgattttccgaatttctcgtcagtatctaccttaaaataaataaaagtaaactgacatttgtcgcatttctcatatctcgatttccgtatttcacgtatctacttaaaaacacacatataatgcaatttttggttattaattttaaagttttatacccatccgatcaagcttatggttcatacgtcatatcttatacgtactacacgtatttattggaagttaactagttctagtcttctagaagagtattagtttgaagtttcccttacatcaaaaccgtaagtttttaatgtatttcttctatcggattagtgttaaaaagaattaatcaatcggatcaataatccatttatttcatctctcggattagtatacagtatttacactatattatgagtagtttgtttatcaatatagaatttccaacattttgcttctccagtttctttgattaattgactccgattaatgcacaagaaatattttaatattgatatttgatattcaccgtaaacgataaccctagttcaattatacatgtatcaaagatatattaaattactaataaatatcatatattacgaacctcataattcatcatttgacttgggtttttgttcttacttacctacatacatcccaaatctcttaagcaccgaataaaatcctacatttaatgacgtggtaccctccacactttgaccgatttgtcaagacttccactatacaaaaccaacctcccatctcctccgtcttcttcttcacctcccgatggctccaccaccgccaaacacttaactggtccggtatgaccggttaacacagagacacacgtgtgtaccttcccttccctcctccacacgcatatcttcttatccgccgcaccgctaaacaacaattttccggctgccgcgatacagaggacagcaagcctatgcttcttgaaaacttcacaatgcttcaagagtttcttgtctcccatctcccaaaaattcacagctccgtcgcttgaaccactatacactgccatgtggctcgtgaccaaagccgtgaccgctgattcttgctttagcaaagtttggaacaaagagtgcgccgtacgcttccctctgatctcacgtttccaaaccttaaccgttccatccgccgatcccgtgaacacaaggctctcggcggtcgttacagaattcacagcgtcatcatgagctttaatagactcgatacatttcaagtcatggatacgccaaaccttgaccgtccgatcccatgaagcggagtacaacagcccttgatcttccgctaagctcaaacacgaaacggcgtcggaatgcttgatccataaggccgtacgacatcttctcacctccacgtagttactcggtttcactgaactcttcaaaacgtctttcaaagccggcaagctcccggcgcgtgtgtacactcgcgggtttttggacgaggttttccaaacccggatcttaccgtcttgatgacccgtaaataccttagcctcccgacttatcactatcgctttaaccaatccgctgttcgatttaaacccactaaactcgtttaagtttttccaaaccctaatgtaattattgtccgatcccgtgtacaaaagatcatttgttgccgctaacgagtaaatgtgaccttcctctcggacaatttctccgaccaggctgtctccatcagagtatccgcgggttaggtcggatcgaggcattttggtcgtaaaatttagagtcttgttagagtttcttaagaggttcagaaagttaaacactccgaagatggaggaatgagtttgagggtagtttgcattataagaaggtagttaagcaatgaaagtaggacacgtaacaagttataatttcgttttgttgtgtccactttttattactaaaataatcttctgaagtgaaacttgtggatgttgtccttattttgctaaatatagccatatagggaatgactcatgagtgtatatgaatatatgataacattgttttattttttcgtcataattttaaagtgagtgggggaccgctaataataagatggcacgtataatatatgatacgactttgtctacacactttcactttttgttagcaaaactttaaattgttgagaagttatcattggttgattaagtaaataaccaattttgttaagcaagaagtgctatttgtggatgtgcacgataaggctagagggttatcgcacatcgtaagatatccccttctttgggatagtgtatgcagaaatatcatgtgaatcgaatagggatttctaggaagaatatctttcccatttgtttccgtttaattacatcagatttgcaaaatttaacctacattgatatgctattagactcaattcattattaagacatgtagtgtagcggtttgcactagtttcggttacgtgtgagttgtagacgacaaaaataataatactagattttattttaatatatgtgataaataaaaaaaaaactaaataaaggaatgaacgattagttattaaataatgtgtaacacagtatcatgccaaaaatctgaaatctttaaaatgaaaaatatgttcatttgtgtctgtccttaattatatcatatcatatgaagcaaatttcaatatcattttttttggtttacgatcggaatattaaatgggagataagtatgaatgattttagattcaaaaaaaaaaaaaaaagaatgattatagatttttcttcctcgccatttagtcaagtcttcgttcactcctacttcaaagcaaacataatgctttccaaaatgcattattttgatggtaagagagcaatcacaaaagcaatttttctgtatggctctatggtggggctggaagtggagatgtgggaatgtttttggcggcaatggtagatgtcggaatagagttaagtttctgaaggatcttgccaaggaagtgctggattcctatgcggggctcagagatgcacaatcgggtaccgcaagggtggagagcttgattaagtgggtgtttccggggagtgggtagctgaaaattaactctgacagggcgtcacaggagaacccgggtaaagctgcagccgggggcgtgatacgagacgagtcgggaagctagatagtgggttttgcacttcatataggcatttgctccgctctgatggcggagctgtggggagcttactatgcactctatttagcttgggagagacgagcaccacatgtagagttggagatagatttagagatggtggtgggtattctaaagacagggattagtgattcgcatccgctgtcctacatggtacgtttgtgccatggcttcatttcaaagggactggaatgtcttcatttctcatgtgtataaggaaggtaaccgtcttggtgatgggttagttaactatgcttttactttacagttgggttttcatttactagaggtcactcctagttgtgttgcttcgattttgttggacgactcgaggaacttcgattttgttggacgactcgaggaactgcgtttcctcgacagatttatatttaattttttgtaactttcaataaataaagggagattctccctgtggttcaccaaaaaaaaaagcaattttttgagataataataaaatgaaaagattctagttgctgattcaatatagtagtcaaacaatttatagttaataaattatcagcatatctcaattgtgatttttctctggtttgagttttaacttttaactagattttcacctgcggtataccgcggagacaaattatattttaaagttagtatatataaaagtttgcaatttgtaactatctatgtaactatctataaaatatttttattttatagtttagaattgttattaagtaacgtcctgccaaacccgtcccgccaacccgtcccgtaaagaaaactcatttattttattaatgttgatcttatttatcatatgtttatgaatcattgtctaaatattttgtaattttgtagtaattaaatgctatcaaatatctctgcggtttgatgaatataattgaattgtaatagtcatgcagaaaaacaatatcaataatgataattttgtagtaattaaatgatattaaatattttgaaagttttattttagtaaccaatcgtgtagttaatgtagagagattttaggaagattgttaaatgtcaaatatttaatttgaagattgtttttctaattatcaaaaacaaatattaaaattcagtggcaaccattgtaaataagtcccaactacaggatttatttcacaaaatggctacaaaaatgtatatatagacttcgtgtaaccgtgttccataacatccaaagacaacatagagcttccttaaccagaacggacttaccatcaggctaggtgtacaagatttaataatgtaactaaggaactaaaaaaaaagttatgtaattttcatttatttgaagtgtacatattccttagtcctaatatataaaatcacaacatgtgatagaggttatccacaaaaattatataaattactaccgtatagtatgacttaattattatctttttcaacggagatacaatagtaaatgacactatgacttacaagttaataagttataattcaccttaatttagaggggcattattgtgcaatgagtgaaatttacatatcacggtttacgtatttttcccattagacgatcgataatctttattgacatagtatatattcataaataagtaaataaaccatacaaatcatgtgtacatttaaactcaaatgcatgtgcaaaatacgaattatatgaaatttgtctgttattatcttttctgtacggagttgtgttcttcttctttttttttcttttttttttttttgctaaagacggagttgtgttcttacatccattccctaatacatgtccacatggcgaggttttgttcttttacaagcaatctttttttttcaacatgtataaatatctaacatttggctacaatatattttctatcaaattatatattgaaaaaacgtttttctcctcctttttcgaaactctagccagggcagtcactgatttgcggttctaaccaatggccaagtaaatgacttttttcttcaaggcctcaatttccatctttttgatatcttcatgaatctatctggtaaatatttgtatacttcgactgatgatttcgcggccatcttaaaaatatatgactaccttatatgactcaattcaatattctatacatttactgtctttttttccaccaaaagttcattccatatattcacatatactccatgtttgatcaactttacacgtttcgagtgataccacaacctaaagcttgtaggttaactaatagccaaaaaagaaaactatgtatgtaatagtcgttatattggaatcatatctcaatgtggaggaacccagactgtattggcccaaccactatgttttctacccaaatatggacatcttcagtcgcattttgaaccgtgcacacatgctcctcttctacccattgcttttaaattttatttttaaaccaaatcatttaactactctttctattttctttaagtaatacgaactaccaacgaagttttttaaccgtaaattagctttatgcactttccggtggaatttatggagtgtgactggtatctacgacaacgttgtctgtgttgtttgtatataactaatctacagcaaagaataaataacggaaaacaatggtggcacaaaataacccggaaaacaatggcaacacaaaatgttggtatgcttacattccgaaagtaaacaagacagcaaatatattttggttattgttatcttcagaaactctattagtatctttaatatattttgtagaaacaacttgtttgttatatatcctttttatattatttgaaaagttaggataaaaaaacaccaactttaaaggtttgatacgttattacgaaatttatttaaaatgcgattagattgtttgtataatgagaaaaagtcgaagcacctattggattggaagagcatcaatgagtgttgatgttcttcctttcattttaaagtattacaaaaagttggttatacctttaagttaagattatatgtgcacttagctttttagcgagtatttttttattagcgaatatcatttcataagaatcatataaaaatgaatccggatataaattctgattctttttgttttaaatcaaaattctgattcttttggtcgttagttttcttggaaaaatggaaattaagtaaagtctctgaaagacactttcagagagaaaaaagaaaaaaagaaagaaagtaaagtcactgaacgtttgcccaaacaataaaataaggtaagtctctgaacgtgtatgtttatgagatcgcatttgtcattctatcatctggaagcttatggattcgctttatgtcttgtctagatatactaatagccaggggcgaatctagaaagtaattctatatagggcaccatatatatataaatagtattaaatttaacttaattatctaaattatatattgataaaaaacaagatacaaaattgctagataagagcttcgaacgtgggttggtatggagcacatatcactataataccatttaagctaactctatttttgctgaaaatgatagcttatataatctttatagaaattagtatggggcacgtgccccacctagcttcaacgtgtgtcaacttttcaaaattgtttttcggtcagttacacaaaaaaaattcgtttaggataatatttttataagactgttttaaattccaatgaaatatttttaaaatacacatgctgctaaacttaatttctagtcaaaaataatataatagaatggaatataatctcaaaagttattttgcttatgtagggttataattaaatattcaaatttttaataattcacataaaatggaaagaatactctttgattccatagagatgaaaaatatatatcctaagagtcattgattacttttctacaaatgagaacttttttaagacttcacactttactatatatgtataaataaacaccaaaaatatggatcattcgtactcatcaatactacacagacgaatattatcgcaactaaacccttgattgtcattttcattacatggcatcttcactagccaaacccaacgacaaaaccaagaagaagatcaagattagtaaagacactgaaaccccagattttgtgtccactcatatttgcatcaaacgtattcataccacgcaaacactagaccgggaagtggttctacggagcatacgtcaacgccgacgtgtaaacaaagtcaaatcggtattccaaacactgtttggtttcccgttaacaagcaaaaaaacacgatggtaattgcgatcaagatcccgatgatgcttcaacagtgccttgacgttggtttgtaagttgtaacttatatatataaaagtgataagtcataagtatgggtccttcaattttgaagacaactctgtcatatagttgagaaatgttaattctcatgtgcattatcgctatgatatctatatcttttcacaaacaagcctacgcagattctttgtactttttagtaaaatggtgaatcgtggcaatcttagctaattggaaagtcactaaaagaaggattgaaagtcaaactcgaaaactttaaaatgtttatgccagcaaaaatgtcacattatgagtgaaaaaaatgggttaaaaataacacattatagtacaaaaaacaacacatgatgagtgaaaaaaaataaaaaaaaataacacatgatgctaatgccagcaaaaatgaaatataactcatatcattgctcattcgtacgggaacataataattagaagttcaaataaaatataaactgatacataatcagacgacaaagcctggtcatggaaacttatatgcatattcaaagagtgttagcaacaaccttaccaaaaacaaagagggttagcaacaacttgatgaaggtaaaaagtctccaagatttaagaatttgttgttttaaaaaaaaaaaaaaaaaaaaaaaaaaaaaaagaaagaatttgttgttttattcctttcttatgtgttttgtcttcccataaaattttcaactactaatgcttcgtatagatctttgaatctttcaatatagatcatgttcgtttccttgaagtgctcgtccaattggttggtatagttgactaatgactatatattttttattctagctgaacatcaatatgacttatcatatatgtgatccaaagtcatggtcttagtttatgtactgttgcaatattccttcctatctacatatattacatcatgaaaacaaggtaaacttatcatctaaattttgtagttcattcttcagaagaaacttcatgggtttccacacaaaatcgccggaccgagtaactcatggtatgtgcattcatgtcttaacgataatgacttaattcatataaactatatctgtaataaaatgtctttttttttgggttggtttataagaagaagaagaagcaaatataggagttgataatcaaccaagagaaacgacatcaacatctcttaataggtcacaaattattaagacaagaaactggtggatttgtatctttgtctgctcgtgtttggtcgtagcaggacgtgttttatccacccttcttttaaacttctacttcatccaaacaggacgagatgtttgtgatgacccaaagcaatttaaaggcacatggctccagtctatggtccaaaacgctgcgtttccttttacagcctttcttcttctcttatggcgttcttcattttccacccatagtgaaacttcctcttcttcttcttcttttggcaaactctttcttctttacatctctctcggcgtcctatttgcggcttatagccaactctatgcaattgggcgaacgcattgtgtgttcttcttgtggatctttacttcccaattgattttcacttccatatttacaacaattatcaacaaacaaaaattcaaccgttggatcatattatccatggtcctttctggagctgccacaggcttaggcattacatcttcaggtggcgcctatattccctgcgaaaatgaaggctcaaaaatgagtaacggcgcttggtgtgccttctttggcacggtagcattctctttatctttatgtatcatgcaattagggttccaaaaggtcataccgactacacagagtagagtttccgcggtgattctaatgcaaaccaatgcttctatgattgcaacgttgatatgtttggttggattattcgttagtggtgaattcaaagatataaaagaagattttgagacgtttaagaaggggaagccactttatgtcttgagtctaattggattatcgcttgcgtggcaagtaatgtctttagggcttgtggggctagtgtgtttggcttcttctcttttctctaatgttgtcagcttctgctcaacgccattagtaaacattctccttgtgttggcgtttcggtttacggatgccgacgttaaattttttaaggaaggagctctggtagctgggattcttggttttgcatcttatgtgtattccttgtataagtctaccaagaaaaaggaaatagcaagccaaagccaaacaactagagtatgattatattatattgatcatatgaatttatgtgtgtgtaatttctgttgttatacactttcatgtgattcatactgttactcagtgtttgtccatttcactaatgttcgatagctttcgtctatcttgtaagttgtaactacgccttataatggtgagtgtttcttcaaataaagctacaggagccgtcgaatacaaaaatattcaataatcacctgactaaagaattaaaaacaaaaaacaaaaacagaaccttaccctgacacacactttgacacacacagaaccgtaccctaactcagcttatattcccttgcaagatgagcgcaaaattccactactggtggcgtcaatttgcgaaattaaaatattaagaacataaaagaattttgttgttttgaagcaaatgataaaaaaaaatagctcactctgataaaaactctactaatatattctgcagcttctctccccaatgtcattgcaacttccacatctgatacaccaaattgcaccatgattgaatccgtatctccataaataacctaaattcatcattgtcagtatcaagaagatttgtccgatctacccacctctgaccatttcttgtggtttgacttgaattgtagtatctctaggtaaaatcagcctcatcggtggaccttaagggtttctaaaggttcaaaatccttagcaaaagccaaaaaaaatcagaaatgttaaaagttttaagaaacgcaccttagataatgtttcttcagtctgtaagaaacgatgatgtgtcagtgttgggctgaaggcaaaaagaaaacaatttttttttgagtttgtttgaagactagtacgtttctgaaacttaattatagaagtagtacatatactattcacaattagtaatatagtcggttttatcgtggctgttatttgctcaaaaattgaagaaatctaaagagtctacatgtgggatttgtcatggctgttatttactcaaaatctaaagagtctacatgtgggcttttcaccagaaattgaagaaataataaataaggagaaaggttcgagtattaccaaagaaatatcctttggaaacctggaatcccttataatatataaattgcctgaactcacggaaatttgctgaaattttcgtactcttcctaacagtagaaattttgatgtcaaagattgtccaaagctacttgaagatattgctaattttcccaggcatgcagaggaataaagggtggaagggtgatgacaagtggtcatttaccaacgcgatgaccaaaccgagtgaagaaatcgaatgggagaaatatgtttctaggtctccttgcatcatctcagttcttaatttggtttaatgtaattgcttttgttttaataaccttttatcatccagttacctttctcaaaggtttgtgtgaattcaaaggtttgttggtgtgtttttgtcatcttctatgttgtctcctgcatagatgagagaggcggaggtagttaaggatcatgggggtcatatgacacgcatggaattttgtaattcacttaaattttggttaaagtttttagattaacataaatacaatacataaattgacccatataactacaagttctagctcggccaagatgacgttgatgtttctgtgtgaacaagttcaaagtttttttttattgataaaatgtgaatttttatactactaaaaaaattaatctacatatttttagctaaaataatttatattgtagaacggaaggaatattatttttttgcaattgaagagggtataaaaagaattaaaaacattggacataacgatttttggcgggggttcatcgacatagaagaaaaagatccaaattgttatatccagggctcatatcacacgttatttatttcaaataattatttcctaggtttaaattataacacgttaaaaattttttggttattacacagttacaccttggcttggagcttttgttatttatacttgtcaaatatgtaaaactgtaaagcgttaaaattttttgtttttgtttttggagatgttatatttagcaagagtgtagaacaagaacaattacaaacattgtatacatttttatttatttatgaactgtgcacgaaattaggatccgattattacaacattattaacatcatatacaaaacacataaggtcttaaaatacatacagtacaattgttattacattcgaggtttggatttataaatctagggcttcaacttattttgcgaggaacttagagaaccattttccagaagctttttcttttcgatcagcaggattagtgaaattgacccaattcataccaaaccggagggtgtaaccatttccgaattcgtaattgtccatcaatgaccatgcaaaatatcctgctacgttgcatccatccctataatatatttttcgaaaagtagttttggtatattaagatttaaagttgtgcgaggaatgtatatcaaataaataaaataagaattataacttacttcatagcgcatttaagacaagagagatggctgcaatggttttgaatccgtccattatcggcaagagcagttgcaagcgttacgtttccaagatcaagatcagcaactcctaaaaatgttacataaaattgataataaacacatctagatggatgtttcattggttaaacatatttaaatgcaacataaaatgatatgtacataccgttttcggtgatgtaggtaagtggatttttgtagttgtctttgatgtagtttagaatctgacggaatcctggaggatagtagacgaagctaggagcctgtaaaagaaagagaaaaatagagccaaattaataatctttttaaatatgaaaaggatttgttttctttatcaaatttaagtcgatacttgccacaacaccaataggaactccattgcgataaactgaaacaaaaaataaataaatgaatattgataatagaaactaagaatacacacacacaaaaaaaaacacaaaattagctttacttacatccaagagtaactcgtgcatccgttattgcattaagttgtgtcggaggaggtgcgtcagttgcatattgtgtaacataatagttcaaccctagaaaatcaagtgatcctttaactaaagctgattgctcaggagtgaattctggcaatctatctcctaccatctctctcattatcgttggatattttccgtacaccaatggatccaagaaccttaattcatgtaaaaaaagattcataaattagtgatgcaaattaaagtgtgcttttcacaaacaaattctgactaaaactttctctataaatgtgtatgtctgtttgtgttttgagattcatttaagtgctcatatataccatccaacaaaaaagtcgaatgctcgttttgcagcagccttgtcgagttcgctaaattcatttagcggggcgaaccatctcccgatcaaggttgttcctatcttaccaccttgaaatttctgcataaatgtttataggttatatagagactacaaatatgcaccacataaaagtaaaattgacgcaaaaaaaattatgaaagactttacattatacacgtacctgatatctttttctgtataaagatacagtttttgcatgagctagaagttggttatgtgcaactgtataaggttcaactccagaatctcctccaagttcacagccggtgcaccgtcctggtggatacgatccatctccatagcctttggttgcaagagagaaaggctgatttaaagtgatccaaaatttgaccctgtctccgaatctttggaatagaagctcagcgtagtttgtgtagtcctccctattcacgtatcgcacatattatagatttgatagcagtgttacatagcctaaacaaaagaagaagaaaaaaacccaaaaaactttgaatcaaaatcgttaatgcacttacactatacgtgtgcttaagaaacctccatattcgtcttctaaagtttggggaacatcccaatgaaatatagtaacatatggttctatgcctgtattcatgtaagttaaatgttaaataaaaaatataataaaattatgaaaaatgtatggttaagtacaagtatatatcgaatttaccatttgctttcaactcgttaatgagattgttgtagtatgttatcccattctcgtccactcccccagtcagtcttccctctgattaaggatataatcacaaaaattctgggtcattgaattttaaatttaattaactagttcttttgttaatataagatgaaatcatgaagactatatgagatgtgtgttttctggtttttgtatttacttggtaagacccttgaccatgctatcgagagtctgtaagcttgaacattcattctttttagtagtttgacatcatcctgttcaaggttaagtgaaagttgtaaaattagattgaaattacaaaagtactgaaaaagtatcatatctacaacacattcatcaataatgatagcctcttctcaccttataaagatcatacgaatcacaagcaagatctcctgaactacgatccggtactttttctgtatataaataacaaaaaacatgagtcatgaccatgcatgaataactctttttaacatctaaatataggtattattttctccacattgaagaccatgggaaaaaataatatgttagatgacctggatatctatgcgtgaaatagtcccatccattaagtgctctatgtgctgcaccttcaatctggtagaacaaattaagtcatgttggataaattgtaacaaaatactaataatgaaaaatcctatatatagctaaaaatcaattcccagaagccaagatatatatacttgataagccgaagtagctgcaccaaaagtgaaatttctgggaaatcccgtacggttgaatgcatgagtattatcgcagtggaagggttctttggccttgcattctggattgcaaaccttttggctactcgaaacgacgacaaagagaaggacaagaacagctaaagagtagtgagcttttggaattgccatggtttgtattttctttattgatgtgcttcttttggtgatgattaaacgatgaccttggaggggtttatatacacgggtttgagtgcatgggacttgcatggagattcaagtaaactcgttacgtatatttgcattggatttgatgtcctccatgttctccacctcgctgtcttgttttctaattaagaaaacaataattgaattattctctatagaaaaaaatattaaacacttttgagtttacggcaccatatttctcttatacatttcctgcacatgtctgcgtgagaatatatgttccttaaccataactaatattcaatatattaatcaaattttatatagaatatattttataagaatttaaatgttatgaaattatattggttcgaggtttaagttccgtgtcccattcatttagctaacgttatggtcatttatattagagtttgtttgaagactaatacgtttttaaaacttaactatagaagtaatatatatatattattcacaattagtaatatagtaatatatatatgtacagatatagaccattaatgagcatcagcaaaagtctgagttgaaaatcagatgtagcagaataaaaaagatcctgcccaaatgtcattttcaactatttatgtttttttctctatcatttgatatgcagtttgtttaatgatttttacattttatattatagagcactgtaaagaaagatcactgtacaaatatagaccactgtacagatatagatcactgtacagatataaacctatgtacagatatagactaatatacagatatagactattgtacagatataaaccactatacaaaatgatgcatatgtacagaagatatttgttcgtttaacatttgtgaagcataaagaagctcggttactgttttggagacaaatatgactttatgtcatgtgtatgattgagtataagaactagaaccgcaaacggatcttaaaagtctaagtagtgtttccttgttagaagatacaaaaccaaagactcatacggacttcggttacaccatcaaaactttgagaaaaatatttgttcgtttaacagtaaattatgacttcgtttaacagatacatcattctttacaatagtctatatttgtacattgatctatatttgtacaatagtctatatctgtacagtggtgcatatctgtacattagtctacatttgtacagcggtctatatctgtacaatgatctaatctgtacaatgctttataatataaaatttaaaaatcattaaacaaaatgcatatcaaatgatagagaaaaatatagatttttatttatatgatcaattttagaaaaataaaatttactaataagcattttagttattaaacattgagggaatgtgtaataaaaaaaaaaaattaaaaacttgaccgactaaatatgccccacatgtctctctctctcacccaatcaaaaccgactatattactaattgtgaatagtatatgtactacttttcatattatgttttaaaaacgtattattttccaacatatctctttttttttcagttctcttgtgtctgtttttttcatttatcgattggtttcattttctcttataaaatccgacgacgatatacagaggaacgatagctcgatccgcagaattcggcatctgcatcatcaaatcggaagagtaaaccgatgaaacccgtctcccttccgccgttatcatcatctcaaccgacggtgctcaacatctgcgacaaatcggagagttggatgaagcaaatcggaggttaaggttaaaccatactccaactgctttttgaaggtatgattctttctgtttgcctctgtagatcgacgattagttagggttatatttttaaatgttatcaagtttagggttttgtgaattgggatttgagaaagatacattagggttctctgttttgtatgatagtgatgatacttaagctactctgaaagatacattagggtgtttgaaaactactctgaaagctactttgagatgtttgtttactaaggatgttctttttcgagtagctgagactatgttaataatgttgttttacaatttgttttggtgtaattgcagacacttgttattagagaaaaacttgcgggtttgtatgaatcagagcatgaatggtctaaaatggcgaagatattgagtgacattgatttggattttggaatgaggtgtgttgcgcaatttctagtttctgcttttgttgtgttctgttgcttattttggctttgtgctattcttttaatagggtcgttgaccacgactttaacggtgggagcacttcttgtctatgacatcaccaaaagacagacctttgacaatgtcttaaggtggctacgtgaactaagagaccatacggattccaacattgtgatcatgataactaggaacaaagctaatctaaaccacttgaaatcagtagctgaggaagatggtcacactccagctgagacagaaggtctctctatcttggaaacttctgctcttgaagccacaaatgtcgagaaagcatttcaaactgtgttagcagagatttaccacatcatcagcaaaaaagctttggcactttgataatttttatttgtaataattattaagttttatcaaattaattatctcaaaaatatttttttaaatttgtaagaaactcatctaaagattccaccattaaagattaaaaactgaaaggattcatcaacaatcctaaactataaaattatcaaaatttagtattataaaatgttagggattcctattaagaaactaaccaatggacatgctctaaggctaaatcagtggctgatctttcatgcaactatataatatatggagtgagatatatcaacaacgacacatgaacaatcattacccgctagcacatcttatccgaaccatcgaaaaatctgtctgaaaatctcaccttcatgcgtttcccaacctcaccatacaacttcttctccaaaaatggttttaggcgcaaggtgtcgttatatgctgctaaccaaattaagttttcgtacattccatttggaatagccaagttggcttattctttgtttcttttatttttttcattccgagtttgtatacaattttttttggttgatcaatatatttaacatttcaacaaactaaaaaatcttgatgataaaataacttgtataatcaaaatcagaaagtcatatattttcgtatcgttatatattcatttgaactagaacatatttattagaagtttaaaaatcaaataaactacctggtcatggaaacttacgcatagtcaaaattgtattagcaatgacttaattctaaaggtagaaagactccacaaaattgagaactagtttatcaaatatgaattcattatttgcgctttgtctacccacgatatattcaatttcatgtggcaaataattcagttttgctttggtttgaagcattacgaagttatcttttttgctttgattcgacataatagatcatttgcgccgcgttgaatttttctcccagttgggtactagctggcaatctggcatgtttgattatatatcttttaatcttgcttatttgaccgtatataataatgcatatcatatattcataactaataactgtatgtgatctatatgttggtatgagcaaattcatatatgtgatcatggtatgagcaaaatccatttagagtgaaactttcttcaaatatttgtagtccattctccacaaggaactttcatgggtttatacaccgaatctccggatagaataacacaaggtatgtgtatacatatcttccttttttttttattgaatgtgtattcatattacaccgataatgtgttaatctatacaagttgaaataatataaagtacatcttttcttttgttggtttatttcaagaagaagaagctaatattggagttaagaatcaaccaagagcaacgacatcaatagcttctgatcggtcacaaattctcaagacacgaaactggtggatttgtatctttgtctgctctggttttgtcgtaacaggacgtgttttatcaacacttcttttaaactactacttcatccaaacaggacgtgatgcttgtgacgatccaaaacaatttaaaggaacctggcttcaatcttttctccaaaacgctgcgtttccatctatagccttccttcttctcttgtggcgttctttattctccactcatggagaaactcaatcttcttcttcttttggaaaactctttcttctttacatctctctcggtgtcctcttttcggcttatagccaactctacgcaattgggagaactcattgtgtgttcttcttttggatctttactacacaattgatcttcacttccatatttacagcgattattaacaaacacaaattcaaccgttggatcatattatccatcgtcctttctggagttgctacgggcattacatcttcggatgatgcctattatccctgcgaaagtgaaggatggaaaatgagctacggtgcttggtgtagcttctttggcacggtagccttctctttatctctatgtatcatgcaattagggttccaaaaggttatacctaagacagagagtagagtttccgcggtgatgttgatgcaaaccaatgcttctatgattgcaacgttgatatgtttggttggattgtttgtaagcggtgagttcaaagatatcaaggaagatttcgagacgtttaaaacggggaagccactttacgttttgagtcttatcggattatcacttgcatggcaagtaatgtctttagggcttgtgggtcttgtgtgtttggcttcttcccttttctctaatgttgtcagcttctccgcgacacctgtagcgaacattttcgttgtgttggcgtttcggtttatggatgacgacattggatggtttaagggaggagctctgttagctgggatccttgggtttgcatcttatgtatattccttgtacaaggctattaagaaacaggaaatagcaagccaaactgaattagtaagagtatgattaatgatttgtatgtataattgtgatcctatttatttagtgtttgtccatttcactgatgccttttaaagagatcaagtttgagtaaatatgtttgttagagagttggcagataatctccacaagagcagctactatctctaaaatgatgaaacgtcttgttatctcttacaatgatctatctatcttcaatactcgatgataaataaacgtttgaggaaaaagcattggaagttgcataaatggcttatgcccatagtttagtataactttgtagaatttcacatcttttaatacaaaagtctaccaataatctccacaagagcagttaccatctctaaaatgatggaacctcttgttatctcttacaatgatctctctatcttcgatactcgataatatctttatgaagttatggcaatctccacatatcctcagattcttcatcacccttattgtcgtccctggaggagtgtttataatcccgaaagcaatagctaaccgttcactatgatgcatcaaggctttctctttagcttcttcatcaatgtcgtgaagaacatacttagtctctggtacatagcctgcgtctctcacttctttccctaaagatttcagctttacgtaggccttgcttctatctacaatagctttcttctcaccccctgaaatctctggcttatctcctctaacctttgttgaatgactagaaggtgagatatgtcgtaaagtagtatcttttcgtacagtgtttcttactactgaacctgaaagtcctcttgctgtttctctgccaccgctccaagtatctaaatttctttcaggcagtttatcaaatactttgggagaagtttccttgacttgagtctcaactccatcagagctttgaacttgactctcacccgcaattccctttgctctcgaggtgattcgttgaaaagatgaagtttctctctcacagaagattgctttagggacagagaaggagcaaaaactcatggagaaagcagcttccagagccatccctttgtggtcaatccaagaagcagataagctttctttggagagagaaatagagaaatcaaatctctcacacacatatctacaagaaaacaaacaacttaacaaactgccaataaaatcactggtccacaaaaggtttcctgcataaccaccatcccataaatcacttgtaagctaagtaagaaccacaaaatccttcagcattccaatttgaatactgtttgcttttccatctgaagctgaaaaacttcagagaattcctttagtaacgactcatgagctatatctaacaactgcaaatcttcaagcttattataatgttctccatcctcaatcaaaccctttacgcttccaaccccacggttccttatcccacatggaactatggagttaaagggtgttaaatctgttgtaacattaagagctagaccatgatatgtcatccatttcgacacacgaatacctatcgccgccatttttttgttgcctatataaatacatatgtattagttcactagcaagaatcagatcaaaccacagtaagaagtgaagattatgaacaaacataccaacccaaactccagtaaaaccgtcgagacgagaagcattgatggcgaaagccgaagaaagaacacgaataactacttcctcaagcttccttaagtaccaatgaagatccattttgtgattccgtagattgattataggatacataactagctacatttcacattcattgacaaaccattagcttcaatattgatgaatttgagaagaaaacaaaggagactcattgtgttttacctgaccaggaccatgataagtaacttcaccaccacgttctgttctataaacatcgaaaggagcattctttatgtcgaaattgagataattctctgagcttccagttcccattgtgtaaacagaaggatgttgtagtataattaatgaatctgaacactcttggtttttatcaatcaaagcttttttctcattgagaatgcttttttgccatgaccaagctttcttgtatggaattaattgatcgtagagatcaaaacactcacacctgtaaaaatgtatactctgttatgcattgttgaagaatgcacgtaacgtgttcgttaaaattcctcaaagagaaaataaagagagaggaacattactttcttgggtttgtgtgattcttcgagttcattatcttgagagatgtagatactctgtttctgttgaagtcactaagatggtggtgatgatggagctttgggttcgtaacagagcttgttgcaacggaaaaaaccatgtctttcgagataaattatcaaactttaaggcttagaaatttcgaagaagcagaagttttggagtaatggcggagacaccaaggaaactgtgagagtattttcgaaataattgaacattgttagggctattttggtcttttaacagagggtttgccctaatttctgggttcactatatatataatacaactgatacactgagaagttattgagaactgcaaatctttaaatctctgtttgtcaaaattatcttttcgagctagctaaagcttacagattctggtttttgttatccttttaagatcaaccttgagtttgttgttttacggtatttgcaattttgtatttgaagtttttctgtgaaaacaaaaatggtggtgatgatgaagaaaaaatgaccttttatcacatgattgagattttttaatctcgtgattacctttcaagcacttctgagccaccttttgatttttttgttctttatagaattggttgtaattgataagctgaatttgctagccgcattgatttggccatgaaatgataaaagatcgatttttttgtttaatgctttatttctggttgaacttgaatctgattatttgacgatgattacagaattaacattagcaaactagaaaacttatctgcttgtcacatctgacgatgattaccaaattatattttgacacatgggtaatatggaaaaaaggaccgtaaatgagctgctttagtgtaatatacaacattaacgattggcttttgattatacataaacttgaataacaaagacccaaatattttgaccaaaatgaaaaagacccaagagtattaaagatttttgagataacaacattttaataacgcaacgaatcattttgatattgtagttaaatttttattggcaattgaaagttttgaaacacacaaaatggctaattcataagattgttaatacatttgctaagaaaacggttgatctgattggtatgtcagaaataaaggtctgacccgacaccatcttctatatagcagatgacaaaataatccattttgataactattcaaggaacagtttctaactactcatacagaatatcccaaaatataatcaaaagaaaagatgaaaagcggactaaaagtgatggttccctctggtagggcgacatacatggttacgtttacgagcatgatcttcgttgtggtgttgtgtcctacatgcgtatccataccaacaatcttccctagccgctacatccgctggcaaatgatttctcggcagtgttatccggaaccagtataaaaggaatcccaccagcttatcataacaatcactacatgtataaaacacaatcgaaagaaacttaagagaccttaaatctcaagagtatacacactagaccatgaacttacttgcaaacatgtgttgatgcagttatcgtctcagcatgattcagaggcattctcgagcggtctgaatatgaagagacatcatcaaaactcaatagataatacataagcaaatcaagaatgataagaactatttcctcattgtagagctcaaggaggtaaatcaagttcagctgtttcttaatgtgctatatagctaagctgagagtcttgagattacctatttctctattgttgaaaagcctgagccactctgctacaacatccggcacagttttctccatatgggcaatgcatctttgcgttatctacagtccacagagaatgtcaccaatagaaaataagaaacaataacctgataaagaaaactccttacatcttgttcatggcgattcatttcatgggttatgaatggaatccttgtaattgtgcgttccgagatctgcagatattagtgagaaataatgagaaaaaatatcttatgaacattatcatgcaagccactggagcagaagggaaaccacatggtaaatgtcgaatatggaaagcaaaaataaacaaaactatcttgatcatcgtaatcctaaccacagtgacattttacattacaatacctcatagatagaaacgaaaaactaagttaaagtaagaggtttaagatatcagtcttaactacatcattctaaactcatataacatacagcagtatcaacataaccagcataggtagacattggagaatcatagctcaacctacaggtctaaaagtttcgcgaacgcagactggaccagatacaccttgtgtaacattctcggaactccagtaagcaccgcaaaacggcctatcgcatcccttgcctgcaataaactagagtcaaatgtgtatatatataattgtcagagattcctttcctactgaacatgtttaaatattagtctcttatcagtccaaccttgcaatacccagctctaagaaacatacaaatattattctctgtattctaccagcatcacatttttttcccccagtttcgcagacgacatattagatatcattacataacatgtttaccaacaggaacagcatccattcactcggtacaaattttccgatgtagagcaattgaaagtaacaacaacaatgaacttacaatatcaagacgggaaaaaagtacagaaaccagtcttgagagctagatgttagattatttaaacagtgaacaatgcaaaataaagaatcatgtactgtaacttacagtgtaacggcacttggagattggctctaaagggcatcattccttgacacaggtggcattgcagatgtgcaccatgatgttcacaccgataaccaccaatattagcaactgccaacagagcccaggtcataaaagaataaatcaacttcaggaagacaggaatgctgagataaaacccgtgaatgacagtgctcgtctattttagatttctcaagtacattttcttctttactaggactagaatcactttattttttggtttcgtctgaatcaatttatcttcaataaactaggagattagcacgaaaagagatctgaacaatgggttcaagttctagtctcaaaggttctctgccatcaacaaattttgtagcacaggtttaggttcttactgtaccgctaatttggaaaatcacctcaatcatatactaaatttaaaaagtcaaacactaaagaactacaattaaggtgtgttgtatgtaaggactgaaaaagacgaaatattaaggacactagttaaaagtagtaaggggaaacggcagaagcttagagatactaaggaaaaccttattaaactagatattagagatggacatatgaaaacagagagaatttctggacaaaacgagaactgatagaacccgagatccaccttggagacctaatcaattattagttcctaattatcccacttcacctccttcccagggaatcaatgttgataagtagcctatccactaaatagagagcttttctttactgtaaagagatattaagacgcaaccagataaatttctattaccacattgtgggcattgcaaacgcaagctatctctttcttcatgtgtgggcgcaggcatattcaatcgacgttttctcttgctcccaatgatctaaaatgttgtcaattgtagtattaagatagcatggcaggtacatataactcaagactagttgaaccagaaataccattagcgtgtttaagatatggtaatgatttattagtcattacaccacgaagtcaatgtggagcaagacaaactcatcttgttaaataacggcattatatatttccaaaaatagttacctaatagaagatattgcagcaaatacttacaagatttgattgtatcgatgcagatgagtccaacactgcaatatcttcagctggtcgcctcagtgcagcatccacttttaatatttcctaacataagagctgaattattcatcaaaagctcaagcataaatgaagcacaagaatgagaaagattctctaggagaagagtagcaaatggaaagaacattcatatgtaaaatgtaaatgacgaaaatgcttgcaaacagataattatacctcttgtatgttcttcagaaaatgattttttcccacatattgtactgttgttctgcactgtggacataacacatgtttatgtttttcctccgatctccgcatccattctgaaaaacagccattactgatagcagaacacatcaaccatcaactaccaatagagtgaaatatgcatgtaatgaatgagaactaaaacaaaatcaacatatgacagaccagaaattatgaaggcaaggtgcagctgtgacaacatcatgccatatgtttaagcagatactgcattttgcatgttcaggatctatggaaatctggaaaagagagataagaaattcgacagaaagtttcaaaaatgtaagattatggactataagtagagatcatagagcacctgtaatagctgggttctggattctggagcaggcattattgtaaatctgtactgcaagtaccctaacagattgaacaaattcaaattcaaaaaatttagaaatttattttcaagatgacattcgctgcccttgtactagtacaatcgtatataccattttcaagatgaaaacaattaggctttaggaaataaactcagaactcagagagataaaaaggtaagcagatctaaccttgttcttcagggccaggaacaatttcagatccactaatgatatcaacagcaccatctttcgggacaacagccttgtcaacaagtatagcatccgaactaagcaagcacaccacaattcagaaagcgcaaacaaatacaaataaagaaagatgtgatggtgaactaacaaaacaaaacaccaacacgtagaagattacaaagaaaccgaaaacagataattgtgaagccagaaattaagagttcatttaatcaaaatgggcagctaccaaacgagtgatactaaaagctagttacaactaccctctgctggttcgataaaacgatctttcatattcaagttagaaagaccaatccttttgaatagtcttaataaacttaacaagaactttgtctacctataacaagacatttgctagtgaaggtcaatagttattggcatacctcttattatgtatagtggcagaactttgacccaaattcttagttattctgcaccattcatgtttttccagggaagacggtttaatctcagagcatattaccatatcattgcacctaatctcaatgtcagagaatctggtgtccagaggaactgcaaatttgtatagaattcattatgaaagtttcacaataaatctcaaattaaagtgaattcgtcaatttagaactaaaaatgagaatttgcaatcaattagagaaatgagtaagcaccacaaggaaacaagactgacccagtttggcccatgcatcatcatcagagggtttcgaaccagaggattgcccagtttccgccgtcgtcgtcatcggacttctggaatcaaatttcaaagttcatcaccgcaaataagagatttcaacagaaactaaaggaagtctcttcgcgaggaagaagatgattcgagaaagagagtgataggcacgattcctattttggtctttagggtttctctctgtagaagaatctctccatttttattttttaaggaaaaggtttaattggtgtaactgttgcacacaccggaatatctcaaatgagaccgtacgttaccgatttgaataatcggcgatatgcgaattttgttttgttttgagataatctctttattaaaccgaatcgaactaaaccgggttaaacgcttttataattatttttattttttctcataagtattgtactttatctagtgttgcaaaatatataacagtggaaacttccacttacattttgacatccatcttcacaacattaagcttttaaacacatgcccaaattaatgaaagcccaccagagaaaactaattcctgtaaggaagtaatagtcgtcgacaaagttgagacccgaggacagatgacgcataagtcatcgccgttcatcgtcgatttgataagcaacgaaaggcacctccaaaaccaccggaaaccgctagagcttcaagcacagaagtccatcggtttttaattagagaaacccataatcttcagcatcaaatctgcaatcttccccaggcaattgtttctcaaaatctgaaggacatcaacatagagagtaaaccaactgaactttcaacaacacccacacggcaaagcaaccatgttggcaaaagaaatagattttccggagagaacgaagagagacgataacagagacaactttaacaagcctacatcgtcaatcatatagattttgcattagaaactctcccaatctgaatctcgaaaaccaaaagcttgttaaccatgaagattattcataaaaaacaacaactatatcggataaaagaaaccgaaagcaaagtggcaaggaagcgtcaaaagcaaaccaatcatcgtcactatgtgagccgaacgatattggacgaaagccgatctaacaccacaataaagtcattggttgtcataagacaacccaactaatcgagatcttaaaatcggacgacaaaataccaaaacggtaaactgcaactgcgaggataagtaaagaaacaaacataaactgaaagaagatcaacgttggtgctataggagccaccaaacgttaatctccgaccaaaaaacagcgaagacttgagagctacttgaggagagagaagggagaaaacttcagaggagggtttcatgtctatgtgcgtcgtcttagctttccgcttttataatcaaatctagagtatatgcataaacttagaaaagaattaagaaactatctatgaattagaaaaacatgtcggagagatggaaaaaatgacatatataacctctattcgctgattctaaagcttcaacattttatattgagatggagttatgtagaaggtaaagtttaaacatttatgttctaatatcaactaatttactctagtatcactatttttttattttcacacattattttttttcttatcacaccacccttgacgagtttttggaggatttttatttcttagataacgcttttgtatggcgagcaatcaagcaaattgtagaaggtataaagcaaatccatgaagcaaaaaatcatgcatcgggacattaatccgctaaacatttttcgggatgcccataagaatatgaaattatcagacttcagattgggtataatctttaacttatttatcttaagttttatccatttcagattttggttccacaataagacaatcatgttaaaaaaaaaaactttttaggcaagtttaaaaaaaaaaaacttttggcgatgctactattagcaaagatgttggttcctataatgaacgaggaacaaactttgataaagctccggaaattctagataaatcggatatgattgatgaaaaagtttgtccttgtgtatactattttacattatggttatactgtatacattaagtttactcggttctcttaagtgatgtatctgtattgcaggccaacatttacggtttcagcattgtattctttgagttttggcaccgttttaggtccagcatggagaggattaaaaccttagaggctcttacactgagaagtgaattaccctcgaatgggaaaaagatcatcatgttcaggctgagctgttgatacagaaaaactaggatctgtttcttcaatcacaaacaatcgatcaatcaaccaaaataacacttccgaataatattcaaggataacaatgagctccaatgttcaaaaaacaggggagactctagattcaccttgcaagaacaatgttcttcacagaggatgaatcataatattcgaaacccagaaacctcaaagagaagaacaacaaacttcaacaattttcacgattatgtaaaatcttcattctcagcttcatttaaacgctgactctgtttttggtgtcttaatcctgaccgttcctcaacttctaatctcatccgtccacgtgtctcacttcattcttcttcccatatcaaatccttccctcccaaacaaccatgaccccatggttgagagaatgaatattcctgcaacaaatcgtaaagaaactaccatgaagtttcatccacaagagcttgtcatgagacggatttctctcaatatcataagagcttgtcttgagccaagaaactgtcggctgtctaaagtggcatataagcctcttttgaaacttcttatcaccccacaatttccctttcatctccatctccgtcttgtacttaaaacaccaatctttagaagacttacgacaccaagaattggtaagccaattgtttatgtcaatccaatgtagtacataaaccaccttcagcccacaaacattcttcatcgtctccgttagctctaccatggaagtccttagctctttttgtgccagacgactgtaacattgcattggactgtcccactgagttgccttagctggtaacccaaacacgtttagcccattgtagataagtgtagcatttctcttcagcttcttttcgagaaatccttaagtaccatgactggtttatttcttccctcactgatatatctaattctgcctgcaacttcttaacaaactcttctctatcaaaatagttaacttgaccaaaagcaagttcaccaatatacccatctgtgacaccaagatcaaatgataaatcaacaacaataatcattgctctcttgcgacatctatggcttttcttgaaagatgatacataaacatcttcatatgttgccatatcaactgcaatctttcccataaactgcaatgtcatcagtcttttcttatacggaaacatcttcgttttgcatataaacttgtttttatagtgaaatttccaaaacttaccacacttcaacttcttctttgaactaaccttctcacaccagaacttgatgtatctcaatttgctgtcatttgagattttaaatttaaacttccatgatttaggagacttactaggcctcttctgttgagttaatatgtggcttcgtaggcgcattccattggattcttggcctgcataaaaattgctacttccatcaattgcaatctgaaaattttgaatgtcatttgattcctcatttaagatccatggagtcttttgagaatctccaacaactagtggacttgcagaattccgaaaacggatattatcacttccacaaccagatggtaaatcatctacaacaaatccaaatggtgaccgcaattgactcgttgttgcatcgtctttatcaaggtcggcaaaggttgaactaactttctgacgtgaaacttctaagcagccttttacttccccttcgtttcctgtgcacaactcacttttctcttgattcaccaatttggtctccagattcacataaggagcacaccaatgatccctttcgaagacacaatctctgtcacaattcaactcttcttgctgcatgaagttctccattccagcagtagttccttgaattgagtgtttcccctcaaagcattctctatccttatgtaaggcatcatgcacgtgaatgttactcaacgaaggtcctgcaacttcatttggaacatttaaagtcggagctcctttctcagaatcctcaccaacttttctgataatcagtattttctgatgaacttgctcatacaatcttccaaccaataaacattggcacactgtttgtggctgaaacatgttaacattcatttgagtatctggatgtagaccatccaaatacactctaactaagtaatcttctgacaaattcactcttgctctaagcagctcaaacttcttgtgatactcctcaataccattcgtctcttttaactgctttaattctgaaattggatcatctaaaacttcagcaaaatgttcctccaacagaagcttatacatgttccaattactcaacaatttaaccccaaagtcagactcaaacaacgatttgtaccactttgctgcagctccatcacaaagagtcgatgcaatgcttaccttcaactcctctggagtgaaatcaagagagaagaactgttccagcttaaacaaccaatcccttacccgatctccactaaatctatgaaaatccagcttggatgaacgagtaacagctgagtaattcgaatttgtaccagttctgcgaacatgaaacacttccgacgacggatacaccgtttctcttgatcgttgctgttgtagatgaccactcgatgaagcgttattcaccttaacggagatgagtcgaattgtgtcaatcaattgagcaaaactcttgtcgagcttttgattttgctctgctatcttgttttccaacttttccatacgcaatcccagcggatcctccatcacttctttctccttcctcgcttgagctcgcgtttccattgttgaagaccgagaatcgtcttcgctctgatacctttgatacagaaaaactaggatctgtttcttcaatcacaaacaatcgatcaatcaaccaaaataacacttccgattaatattcaaggataacaatgagctccaatgttcataaaataggggagactctagattcaccttgtaagaacaatgttcttcacagaggatgaatcataatattcgaaacccagaaacttcaaagagaagaacaacaaacttcaacaattttcacgattatgtaaaatcttcattctcagcttcatttaaacgctgactctgtttttggtgtcttaatcctgaccgttcctcaacttctaatctcattcgtccacgtgtctcacttcattcttcttcccatatcagctgttactgcgcatgacatctctagatcctactaccatggtttatcaagcaggacttaacaaagtcatcaataagcctaatagcgggaagttaatattcaggtatcttaatgaattttatcctactaccatggtgaaggagcagtcaatggcaagttttagtatctcaaattataaaactggaaaaatagaaagaaagaaagaattaataatctgctcatacaataattgtaacatcacttgtatccgtgaaatgaccaagaacgtagtaataaagggcgatggcggatatataacaacaactgccttcagttttggttcaatcacttgttttttttacatggaagccagaagtcctctcatttcagttaccccaggaacgttttcactcgggtaaactttggctacgagctgcacgaagctctcgtacttgtccagaaactccttctgtttaaggtcacacaacaacgcattgattcaaacactgagctaataatgcactgttatttattactctcctcaacttttcagtttaaatgggtaccttgcatttatcccacaacgatggtagcaactcctctgatgctaaattcttctgcaactttttatacattgctgcaatcgatttgtccacctacacacaaagagaagaattggaaaatgatctacgaaaaggtctgtgaacaattaatacactcttaatgaacatttgcttacccctgacaggcttgattttaacatcttccggagttccacttttgataaaccaagctggaatggtatctgaaatatagagataatgtatcagttttattttgtttttaccctagaaacctagagtaacacgccaatacatagtttacacaatgagaaagtgaaacaatggtataactagttaactaacaacaactaacctcttcaggggtgatagtatacatgagatccttaatctttttatcaaacaggaaaagtctttcgaattgctgcagggacgagagaacacatgaagcaaacacaaacgggtgtacccttaacaataaatcgaaaagaatggaaaaaaacgggagttatgctattagctgcaaatggggagaaccacttacatagtaaattatcatgctaatgtggcgcgtacaagcttgttcatatgcttccattgcctggtcatagaacttggctaaagtcggcacaacattagccaggtcaaacaggctgcacaaacaaaatgtacaaggttagggaataagaagacaaaccaagagagagagagttagaaaaggacctaccaagtttgaaaagcagcatagttttccaaaaggagaatatctgcatatttaggatcttgttgggcaattttctcgagggtcacaaacagtatgctcacctataaaacattaggagtcagactctatcagctaaacaaggaaagaaacaaaagaaattgacgatagtaaatgcagagacaatctgagatatactttacttatatgttgttgttaagaatgaagtcatgagctaatggtgggtttatacattgtaagtgaactaagatcatatgcaatcagagactgtctattattgcttacatggtttgtgtaatttcattagtcatgttctataaactcataaaaatagctgtactcacaaattttgtgtacgcctgatcaaccaaatttctagattgcccttgtatgtactgttccatacgagtagcaagtgctgcaaatctatgaaaatgagataacaatattaggaaagcctcatgttaatactataacgggttcttggatcacctatagtcaacctgaacaacaatctaaatgggagaaatagttcagaaccacaaaattgactgaaattataaacagggtggacggaagtactaactggtggggacataaataagtattcacatggcacttcaatgtatggacttcttgattaccttggaatatatggcaagacacccatctgtcttacattacgttcatttttttcaatttggtgacaagcttcatccacaaactgcagttaaagtcaacttgaattgattagtaggaatggtatgccaggaacaaaaactaaacaatctctgagtagacggactacatggctgaattgcatagaaattctcgactccagatctccaagcaaaaggcgaacaaatcctgcagcatcagctttctgaccagatagataacgttcggttataccatgcattgatatagaccgtagggggtctattttatatgcccagtcaacaacagcatagaaatcctcctgcgatgacaagaacacaaatctcttatttagtaagacaaatgaacgctacctctaggttttcacatagaaaccttattttgggggacatcttacctgaataccatcaagtaaatcttgaagagattcattcaatgccgtcaggtctggagagtttttacctgcaaaaattggaatattgttttgctttcagaaccattagaccttataatatgtagcgaatgctttactgatggcaagcagtttaagtttaccaggtttcttgtcagcttcatcaatgtccatgatccccaaatcatcattatcattaccatcgtcattgttggactggcttttcttatcattgccagcacctccaggaggagcaagagcaggtacctcaaagcacatgaagtgcgcaaaaaaggaactctgtattatgaagcaaaaaagaaacatgatgatttagtacatatatcagttgcatctaaagaccaaacagaaaaccattcggttgacaatgacctcatctacaagaagcgggatgaatattgttaacatcttggcataagcatctgacactgcagaggtgtcagtgtttgcattctgactagaacccgtagatccttctagccaaacagtaggatttcgtgatacttttgtgcttgcacgaagctccttcgcgaattcacgagcctatatattttgaagaaacaaatctctggtaactgaatatttaacgctaaggaagaaaataaaatgtttgctgaatatccacacattaacattcagtacgttatagcagtcttttagtcaattaagtgtcccagttagtcagcggtcaaattgataaagaaacatatatttgtcctcacctctcgacgaaggagcaagttcagggagctgcagtatgcttttctcaatggtcccaaacaattcttattaagaccctgcaacaagaaaggagacaagcaatcaatgtactgcatggagcttttagcatgtcacctagccatttctcggttttacctttaaatgttgcataagacgagcatatgttctgcatttgtaccgcaaatcagcatggtcaggcctcttcagctgccctctctgtttaaaagatgcggtgataaatattcagaattagtcactagacttcatattggtacgatggaattttataaaagtagtacctgagaaaagtagcttttgtcactgaacttgaaatctaccagactagcaaagtagtctctcaagaactctgaagctctccttacaaaagtagcttttaatttttctagttctgctcgtttctcttttacctgaagaaaatacagcaagagtattacaaaaaagtagacaatagttaatgaatgttacagacaattataaatgtatttttctattcccaaaacgtaatgtaataagcaaggccgatttactataaaattagaataataactagagataccgaattagaaagatctaagtgattaggcatacagctcgcatattagcatagatcgggtctaagttgggcacttcaagaccccttaaagctttggctaaccactcgcaagcctcaatattctgaagcatgtctgcttcatcaaatgagcctcctgttagggatgctgcatactgcaatcaacaacacttctataagcgaaccaattagacagaagagaagtaagcagaaaaaaagagtgaaacaaacctcagaaggcacacgcagtctctcaataactttatcaagttcctcaatgagagctttattgtttacagactgcatctctaacttgttgtttcgaatttctatctggtaaccacaaaacaaaaaaaaagtgagaacatgtgtcgacatataaaggtttaatcagtccaacaaatatacttggaaatcaatttctctttcacccctactcttgcagatttcagaagtactatgaaagaaattaccaaccaaaaagaaaaaataaagcaatgtatgagaagagtttattgacaacatacaacaactaatttctcactgcagtgacattgtccttataataaaacaaagcaaaaaaagatcatttataggtcaagagtcctaccgattcaatgtcttccctcatgtgtctaagtttaatgttgaatattcctaaccattcatccatgtcatcaacgatatttgttgctgcctctagtccattcaaaacctgaaaagcatgaagatgatcatatatacaacaaaatttaacactcgcatcccatgaactgtctaataacaagataatccaaagaataataattagcagaaaaggaattacctcatctactaatggttcgctttccagaattgcatgtacatttgccgcttcaagcgcctgaagctctcgtttcagcctttcagaaaatgcctcagcttcaccaatgccaatcacataactgtatatgacaattatattagttgagtgaataatctgacaaaataagtggaatagatatctgcttccattatctttttatccccagcaagctagttctcaaagaaacaatgccaatagtttaaactaaattcaatcaagaggaaatatgcaaggtactgattctacaattactaatcatgctggacatataagcaattctaagttagtcagaaacctagtctcccaagcttaagatttaggcggactcttctctcttcattccatataacaaatacacaagtagataaaaaaaactcctcctttgtaagatatatactgattttacacttaaaaaaaaggaacaaaatggattaaacaaatgatgaaaggaacagaaaaagacatacgttcccaagagagcctccatatcctcttcctcggcctgagagactagttctttctcaacagtaactttcaaggcgctttctgttacagattcagcaacaggctccccatcttctgtacttctttgagtagtgactactggagtgttatcctagaccaatattatgaaacaaagaaacacaaattagataactttcttatatgaaaaagcactcacatatctgaaaggaggggaaaatgacaataacaattacatacaaaagcttctttcgaatataagagacttagaccaaaatttaaagttagaataagttatagtctaaacctttgcccaaagggccatctcgacaatatctataccaacaacttttggaaggcggcctaatacgtctttgcatatgttcaatatgcaaactaaaagtcggttcctacaatcacgacagagaaaggtatgtattaaatgaggaaaactacgtcaacaaaaataccatcgcttatcatgtatacttcacatcttgtaatagttaatattgatgttgctaactgcagtacctgtcatcagtgttgcgcatggtccactgtggaggagcaacactttgactcctgagattatcaaacccctaaaagactttgcatcagcaaaagcagtgggaacatggaaaatattgaacagtgttttacaaattatttaagtaaaacccctaaaagactttgcatcagcttttgtgttccatctcttacaccacatgctacgaattatttaagtaattatgcatttcttcttgaaatcttagatactaaccacttcatcaaaatcttacgagggtaaatgtgcatccacttgggtcactagttatgacttccacctttgacagatgcttgaggtcatacattttagcaggctggatgaacagagaattataaaacatcatcagtcaatctatattgatttttatcaatcatttttcttccaaattaaaatgttaaaccttgtacgttactcgtgaacgtgtgtctcacatggagaaagaaaatgaagattacctccagaactcctccacttgaatacttcatgactcgaagaattgctttctttcgtggacccttcgatttgactgtagaaagcagaataacaaaaagcatactcagttgattacaactctaaagaacctaaaaccaattggacgagaatgcttgaaacgtggatcagagtaaacatatcttccacttgaatcataacaacacagattctcctcgagtacactagattgattcacctaacagacactaccagaatcctttttgttgctcaggaaaacctaattgagctctcacgagtcataaaatggccaagaacagtagaatttcatcgatttagtattcaacagattctctaaattccataatcaccgaatctaaatgcttagaactagccaatcaacgcgaagaaggtcgaagtaattaaaagtgaaatgaatcaaatcagaacaatcaaaagagagaagaagaaggtaaggttctatcaccggaaagagcgagaactctgggtttagccatttgtcgacccaattttccagacttgccccaaacaccgcgactcttggccacacgtatcgacatgacgatcgattgcttggtgccttcgattgccgcctcgcaagctcgccgaagctcttcatcgtcggcgcttgacttggccattgttgttgttgcggatccagcaaggaggtgatgaccggtagaagagagaagagaaaaatagtgccaacaacgtggcaataagccttattgtagtgccaagaaaggttgaatctctcttttgttcccatttcttttcttttgtttgaatgattcatgatagtaacaacgacatgttcacaatttcaaaaaggaaacgagcgcaatcaaactcattacaataatctaatgcaccagagattgaccggcggtgggttgaagttttcattagaaagtgaaatattttattttaattaatattatttatatatatatttataccacatgcgtatatttttttatcaacaaaaatgaattttgtcttcaaattttaagattttgcgtatagttatatatcattctatattaatatcaactaaaacttattttaccatgtaaccctatcacgtgaaattaaatattattttatctttttttgaaaaatttaaatatttataatatttgaaatttcaaaaaaataataacaacgatctaaactttataattatatttttattgtaatatttagaatttcactcgtaatatactgtctcgtattaatattattataaatatttaaaacgttttatagtataactttttaaaagttttcaaatttttaatatttttaatatttttaaatttttaaaaattcagttctttaaaataatgattcagagtaaaccggataacatttttaattttggatgcttcataaatcaagctttcgacttattcgtattcaaacttttggttctttttatagtaagattttgaatcattgcccaatttcttaagtaatgtgggacattttatacatttttttttctttatcgattgagttatatatgtttgtttttaaaaatttgaattacatgatatgcaacaacaaatctaatattttattaactatatgtattttatataaaatcaaataaattagatgtaataacaaataaaagtaaaagaaaaatcatatatttatatttaatatagatacagaaattttagaaaattagtaattaattgaatgtagttcaataatgataagatttaattaaaaatataaatttagacaaatatgttttaagatagattttgtagagactaaatatgtaataaaagaataagttaattcaagtatttagtgcaaactaataaattataagtttttaataatacaatatttagttgagatataatttgtaaagatctaaatgttaataataaataataaagagatttttggtcaaaaaggctactaaaattatatacgtagatttatcaatttcaaacacattatgtagccaaaaagagtggtcttctgcctacataagattgcactccgtccaccattacgacttttttgttcccatttcagtaaattggtttgaatttacgtgacaactccttattgtagttccaacaacgtggcaactcattattgtaggaccaacaaaaatttgaggaaaaaaacattaaagcaagggaagagcaaaaagctacacacccagatcaaaacaaatctgaacgttatgcaggttttctctctcttctctctcaaaagtttttgagagagaaagcttttggcctttcattttccgacgatgatgatgtcggattttgtttccggctatgtccggttttctctttctcgcctatgtgcgagatcctctaaactatcttggcttttgtttgttaagtttttttgttccttttgcagctcttagttttcttccagcaaggaagaatttatgccgagtgtataatcgaaatctctgaaatcattggaagttcaattccgaccaagaagataataagtcattcatctcctattggagccgtaatcggctgtagttgaaggcttcactttaaaatcgagaattgtgttgagtggagtttggctactagccggcatagaatagttgatagcgtgtttgcgaccaatctgaactctcgtcttctcacgagttccagcgtttcatagatctgatggttcatggatttactcctcatactcgaattactgggcaaaaggatttgagtcagtgattaaaaaaggtagttgttcgttgacggaatctatggtggagataggtgaattttgatcatgaattttcatgggcgatttcaactcggcggcggtgatgattcactaacgtctttccaatcttaacatgcacaagcacacgtgtccttgataattaatcctaatattttatttagttgtaaattttggttgggtttatagttgggctttgatgttgtgtaattgggttttggtcactcttgtactctttccaaaatcaaggaaacaggttgacgacaaaaaaaaaactacacacccagatctaaagatctaatcaaacccaagaaaatcgaagtaaaatagaaaagaatgaacaaaaaacaaatccgaacaaaagccgggacttagccatccaaatcgagagcgaatcgatgaagacagagctagccgactctgctaagagagccaacgacactagacaaaatccgaccaacaccactgaggaaactggccattgccagagccaaattggagcatcagagaagatttcctctctctaaaatattaagagagaaaagagagagaaagtcgtaacatcacttgtaatctcaaattataaaactggaaaaatagaaagaaagaaagaaagaattaataatctgctcagacaataattgtaacatcacttgtatccgtgaaatgaccaagaacgtagtaataaagggcgatggcggatatataacaacaactgccttcagttatggttctatacttctatcacttgtttttttacatggaagccagaagtcctctcatttcagttactccaggaacgttttcactcggataaactttggctacgagctgcacgaagctctcgtacttgtccagaaactccttctgtttaaggtcacacaacaacgcattgattcaaacactgagctaataatgcactgttatttattactctcttcaacttttcagtttaaactggtaccttgcatttatcccacaacgatggtagcaactcctctgatgctagattcttctgcaactttttatacattgctgcaatcgatttgtccacctaaacagaaagagaagaattggaaaacgatctggtaaaaaggtctgtgaacaattaatacactcttaatgaacatttgcgtacccctgacaggcttgattttaacatcttccggagttctactttcgataaaccaagctggaatggtatctgaaatatagagaaaatgtatcatttttttttttaccctagaaacctaaagtaacacgccaacacatagtttacacaatgagaaagtgaaactatggtacaactagttaactaacaactaacctcttcaggggtgatagtatacatgaaatcctcaatctttttagcaaactggaaaagtctttcgaattgctgtagggacgagagaacacatgaagcaaacacaaacgggtgtacccttaacaataaatcgacaagaatggaaaaaaagaggagttatgctattagctgcgaatggggagaaccacttacatagtaaattatcatgctaatgtggcgcgtacaagcttgttcatatgcttcacttgcctggtgataaaacttggctaaagtcggcacaacattagccaggtcatacaggctgcaagaaaaaaaatggttagggaagtatgaacaattgggaagaagaagaacaaccaagagagggagagaataagaaaaggacctacctattctgaaaagcagcatagttttctaacaggagaatatctgcatatttaggatcttgttgggcaattttctcgagggtcacaaacattatgctcacctataaaatagcagtagtcagactctgtcaaccaaagcaggagagaaagaaaagaaacaatctgagatatacttcatttctatttatttgtaagtgaactaagatcagatgcagaggttggttatgtttactgtttgacgtggcaaacattattctttgcttgcatggtttgtgtaacttcactagtcaaatgctataaactcatagaaatagcagtactcacaaattttgtgtatgcctgatcaaccaaatctctagattgcccttgtatgtattgttccatacgagtagcaagtgctgcaaatctatgaaaatgatataataatgttagcatagcctcaagcaatactaaaaacggtttctttgatcatctaaccaacaatctaattgggagaaatagttcggaaccacaaaattgaatgaaattatttacaaggtggaatttctgattaccttggaatatatggcaagacacccatctgtcttacattacgttcatttctttcaatttggtgacaagcttcatccacaaactgcagttaaagtcaacttgaattgattagtaggaatggtatgccaggaacaaaaactaaacaatctttgagtagacggactacacggctgaattgcatagaaactctcgactccagatctccaagcaaaaggcgaacaaatcctgcagcatcagctttctgaccagatagataacgttcagttataccatgcattgaaatacaccgtagggggtctattttatatgcccagtcaacaacagcatagaaatcctcctgcgatgacaagaacacaaaactcttatttagtaagacaaatgaacgctaactctagactttcacaacgaaaccttattttgggggacatcttacctgaataccatcaagtaaatcttgaagagactcattcaatgccgtcaggtctggagagtttttacctgcaaaaattggaatattgttttgctttcagaaccattagactttataatatgaggatgtagcgaaagctttactgatggcaagcagttttagtttaccaggtttcttgtcagtttcatcaatgtccatgatccccaaatcatcatcatcattaccatcgtcattgttggactggcttttcttatcattgccagcacctccaggaggagcaagagcaggtacctcaaagcacatgaagtgcgcaaaaaaggaactctgtattatgaagcaaaaaagaaacatgaggatttagtacatatatcagttgcatctaaaggccaaacaaaaaatcattcggttgacaattacctcatctacaagaagcgggatgaatattgttagcatcttggcataagcatctgacactgcagaggtgtcagtgtttgcattctgactagaacccgtagatccttctagccagacagtaggatttcgtgatacttttgtgcttgcacgaagctcattcgcgaattcacgagcctgtatattttgaagaaacaaagctttggtaactgaaaatttaaagctaaggaagacaataaaatgtttgctgattatccacacattaacattcagtaggttatagcagccttttagtcaattaagagtcccagttagtcagcggtcaaattgataaagaaacatatatctttcctcacctctcgacgaaggagcaagttcagggagctgcagtatgcttttctcaatggtcccaaacaattcttatcaagaccctgcaacaagaaagaagacaaggaatcaatgtactgcattgagcatttagcatgtcacctagtcatttctcggttttacctttaaatgttgcaaaagacgagcatatgttctgcatttgtaccgcaaatcagcatggtcaggcctcttcagctgccctctctgtttaaaagatgcggtgataaatattcagaattataatcactagacttcatattggaatagaattttataaaattagtacctgagaaaagtagcttttgtcgctgaccatgaaatctaccaaactagcaaagtagtttctcaagaactccgaagctctccttacaaaagtagcttttaatttttctagttctgctcgtttctcttttacctgaagaaaatacagcaagagtattacaaaaaaagacattttaaatgaatgtatcagacaattataaatgtttttttctattcacaaaacgtaatgtaataagccaggccgatgtactataaaactagaataataactagagatagcgaattagaaagatctaagtgattaggcatacagctcgcatattagcatagatcgggtctaagttgggcacttcaagaccccttaaagctttggctaaccactcgcaagcctcaatattctggagcatgtctgcttcatcaaatgagcctcctgttagggatgctgcatactgcaatcaacaacacttctataagcgaaccaattagacagaagagaggcaagcacaaaaaaagtgaaacaaacctcagaaggcacacgcagtctctcaataactttatcaagttcctcaatgagagctttattgtttacagactgcatctctaacttgttgtttcgagtttctatctggtaaccacaaaaaaaaaagtgagaacatgtgttgacatataatggtttgatcagtccaacaacaaatatacttgaaataaatttctctttcactcctactcttgcagatttcagaagtactgtgaaagaaattacgaaccaaaaagaaatagtaaagcaatgtatatccatgagaagagtttattgacaacatacaacaactaatttctcactgcagtgacattgtcctcataatagaacacagcaaaaaagatcatttataggtcaagagtcctaccgattcaatgtcttccctcatgtgtctaagtttaatgttgaatattcctaaccattcatccatgtcatcaacgatatttgttgctgcctctagtccattcaaaacctgaaaagcatgaagatatatatacaagaaaattaaacacttgtcttcccatgaactgtctaataccaagataatccaaagaataattattagcagaaaaggaataacctcatctactaatggttcgctttcaagaattgcatgtacatttgccgcttcaagcgcttggagctctcgcttcagcctttcagaaaatgcctcagcttcaccaatgcccattacataactgtatatgacatttatattagttgactgaatattctggtaaaataagtggaaaagatatctgctcccactatcgatatccccagcaagctagttctcaaagaaacaatgccaatagttttaactaaatacaatcaagaggagaaactcaaggaagtgattctacgattactaatcatgccggacatataagtaattctaagttagtcagaaatctagtctcacaggcttaagattcaggcggactctgtaattttactcttctctcttcattccatataacaataacacaaagcagataaagaagtcctcctttgtaagatatctactgattttacatttaaaaagaaagaagtaaatgcgtgaactaaaaggatctaaccaaatgatgaaaggaacagaaaaagacatacgttcccaacagagcctccatatcctcttcctcggcctgagagactagttctttctcaacagtaactttcaagtcgctttctgttacagattcagcaacaggctccccatcttctgtacttctttgagtagtgactactggagtgttatcctagaccaatattatgaaacaaagaaacacaaattagataactttcttatatgaaaaagcactcacatatctgaaaggaggggaaaatgacaataacaagtacatacaaaagcttcttttgaagataagagacttagaccaaagtttaaagttagaataagttatagtctgcacctttgcccaaagggccatctcgacaatatctataccaacaacttttggaaggcggcctaatacgtctttgcatatgttcaatatgcaaactaaaagtcggttcctacaatcatgacagagaaaggtatgtattaaatgaagaaaactacgtcaacaaaaatatcatcgcttatcatgtatacttcacatcttgtaatagttaatattgatgttgctaactgcagtacctgtcatcagtgttgcgcatggtccactgtggaggagcaacactttgactcctgagattatcaaacccctaaaagactttgcatcagcaaaagtagaggatacatagaaaatattgaacagtattttacaattacacaatcaattacaattacaaagtctcttacaccagatgcatgcatttcttcttaaaatcttaggtactgtaagcttcattaaaatcttaccagtgtgaaagtgcatccacttgggtcattagttatgacttccacctttgacagatgcttgagtttatacatttttgcaggctggaaaaacaaagaattataaagcatcatcagtcaatctgaacttgagaaatctgctaccatggtatgcattgatttttatcaatcatatgtcttccaaatcaaaatgttaaatcttgtacgttgctcgtgaaagtgtgtctcatatggagaaagaaaatgaagattacctccagaactcctccacttgaatacttcatgactcgaagaaatgctttctttcgtggaccctttgatttgactggagaaagcagaataacaaaaagcatacttagttgattacaactctaaagaacctaaaaataattggacgagaaagcttgaaacatggatcagaggcaacatatcttccacttgaatcataacaacacagattctcctcgagtacactagcttgattcacctaatagacactaccaagatcctttttgttgctcaggaaaacctaattgagctctcacgagtcatagaatggccaagaacagtagaattccatcgatttcgtattcaactgattaaatccataatcaccgaatctaaatgcttagaaccagctaaaaaacgcgaagaaggagtaattgaaggtgaaatgaattcagaaatgctatcaaatctgaagaatcaaaagagagaagaagaagaaggtaaggttctatcaccggaaagagctggaatcatggatcagaggcaacatatcatccacttgaatcataatacaacacaacacagattatcctcgagtacactagactgattcacctaatggctaatagacactaccaaaatcctttttggtgctctggaaaacctaattgagctctcacgagtcatggaatggccaagaacagtagaatttcatcgatatcgtattaaacagattctctaaatgccataatcactgaatctaaatacttagaaccagccaaacaacgcgaagaaggtcgaagtaatcaaaggtgaaatgaatccagaaatgctatcaaatctgaagaatcaaaagagagaagaagaagaaggtaaggttctatcaccggaaagagcgagaactctgggtttagccatttgtcgacccaattttccagacttgccccaaacaccgcgactcttggcgacacgtatcgacataacgatcgattgcttggttccttcgatcgcggcctcgcaagctcgccgaagctcttcatcgtcggcgcttgatttcgccattgttgttgttgcggatccagcaaggaggtaaaagagagaagagaaaattaagcttacggattaagaaagttgaatctctattttattcccatttcagtaaattggttccgaatttacgtggcaagtcattcattattgtagtgccaacaaaaaatttgaaggaaaaaaaaacgttaattaaaaaactgaagcctggacaaaagaatcgaaagaaccgaaccataattgaaccgaacaacaaccgaaccaaaattaaaaatacttatatggattttaaattttagaatccgaactgaaataaccaaaaatatctgaaagatgaataaccaaaatattaattatttttagatagaataaccaaaaatatcataatcataaaaaaatatcaaaaaatatttagaaaataatcgtaaatgtctaaaaatatctgaaaataaccaaaaatttggttcctatatggatcataaactctacaacagaaagaaccagaactgaatgaaaccaaatcaaatactcgattgaggcctagttccaatagtttcggtagttggtacatacaaatttgtatgcggattagactatttttgccgatgaaacttatcaattgagcggatgagcttgggggcttgtcgtgctcgtcaaagagagtggatggtactatggtagcttgaaacacatagcataagatgaaactggttgaacctcaatttaaatgttgatcccgaaatgagaaaaataaagtattaaataacctcttgaagtcttaccatttttcccacttcatttttggtttgctttgtaaatatactttttttttttcatagagtgatgaaaactaagtaatgaatttgtggttctcgtgaagtcgtgataatagtttgtccaagcgataaatataaaatagtattgcacctcaacaagtgttaagcatgcaaatccatttacgcatacatattaactccgagtgaaatataaatattagagagtagagacagagaaaaagacagagacaaagaagttggccatggcaacgaagtcagtttctaccttcgccatctttttcatcctcgttttggctatctttggtaaactaactcacttcatatttgttaaaatttgtgattcatcatagggttccagagattatttttctccgttatcgaagcaagtttcgttatacatcgtttttttatttgctttttaacctatctatatgaatacaaatataagcagaaactcctgagatagaagcgtatgataggaagtgcctgaaagaatacggcggcgatgtgggtttcagctactgtgcacctcgaatattcccgacgttctgtgatcagaactgccgtaagaacaagggcgcgaaaggtggagtatgccgttgggaagagaacaacgctattggtgttaaatgcttatgcaacttctgcagcgaggaaccctctgatcaaactctaagtcgtatttgaatcttgcatgtgtcatggtttgtgtaacaaatcaaggtaaatggtccaagtaacaatataataatgaataagcgaaataaagaaaataatatgaaatacaagactttgcttgtgttaagaacttaatatgcatgtcatcttttgactaaattaatgactatatttgcgacttcgatctttccgtaaaaatgcacatgtcaaatagaaaaaagggaacgatagcgtaaaccaaaataatcatttttactatctttacaaagtttaattaataggttattgatgtattgtataccatatacaacattgcatgagactcgagttaattttgtctttatttacgatcttgacttaccacaaaatcggagctcttgtagattttcataatatttcaaaaaaaaatcgtactattattattgcaaatatcaatcgtttcagatataagtaaaacatcgaaacttcaatatcttacagtaaaacccaactataagattatcttttgacaagtactcttttttttcttcataaatttccaataatagagattacaaggtcaaaagactcaagagaagcacgcatgcccaaacaggaaaacaacaagacgctaaaccattattaattagttatgtccttaaatccatgcaaatctaaaccattcacagattaaaaaaaaaaaagataagttagactgtaattgtatatatattggttgatttacagagtttgatatatcataaaatgtatcaaacaatataatcattaaatgatgttagtttgatatttcagaaaatgcatttgttaccatattacggaatccattatcctaaccgtgaccgaattgatgaaaaggattagtgcatgggttgattcacaatttgagcactattacttgtttgtgtatttatagtaaatctccatgcgaaaaccaaacatagtaattaagggtagactatctagtatatagcacacagctctcgactgacctaaattttaattcaaacacttatgagatgggcagacaaatttactgctttaacggttagtctgtgaccctgattcatgaattgttgtagtccatctctaatatattgtatcgtcacacaactattttgatattcattttcatcttctttttttctttttaatattcctcttgtttatataagatttgttaatttttagtgactgagttgcaacagatcaacgacagtcctaaagatctgttgctaataccaccactaattagctatgtttgacaaacggtaagatcttcgccttcaaatgaacataaacattggatcaagtctgaccattaaaataaaaacgaaggatcaacaagcttatgaagattaaatctcatacttaaaattaatcaagaactttggcttagcaacaaccatcctagaatctaacataagtctaacacataacaaaccgtacccctctaacaatcactgagagactcgttaactttaagcatatcaaaaaacaaaaagagatgatgttgttctccgataaacaattttctcaacattgaacattgacaaaaaaagatcaataactgatatagtccacgtcctaagggagttgttgatcactcctgcgccgttcctccccatctctgaactcgactctccgcttgctcagcctgcataatttagaattcaaagctaattaatgaaatgatcaaaccaaacacaaaggaggaacatagcagcaactaaaagacaaagtaagagacctctttgttccagttagtgaagtagatgattccaatcaatataagtgtctgcaagcatattccagctaccatacctccccatattccctacaaaaatatacaaatgatttaacaccagattaaaaagaacaaggctaatacaaaatggtcatattagtaaatagctaacctgaacgccgaggtctagtgtgaatccaagaacaagaccagcaggtagtccgataatgtaataacacgcaatgttcacgtatgcaaccagagcctgccaccccgctccaaccgcaacccctgacaagacgggctggaggctgttcaagaggacagtgaagcccaacaagacggctattctcgtggtttctgctgccacagcttcgcttgaagtgaaaagataagggaagctgtcttttgtggctaagacaacaatcatgcacactatcccgataagagttgaagttatggagacgactatcactgagaatttggctaacgctgcgtttcctgcacccagctcattcgatactctcacactgatcacaccaagagacaaagttcaccagttcatgagatttttattagctttccaaatgtggctcctgaaacataaaggtagagaacttacctaatcgcagcgttaaacccgatcgaaatcatggcagtccacccttctatattcatgctgtgaaccccaaaacataaaatatgttactaaacaaacctattttcagtgagaaactaaccaaagatcagcacaaattgattaccaaatggagatggcatcgactggtatcaacgggttaggaaggagaccggtaacaacaaccagaaccatcaagtaccaaaactccaaactgcaaaacaaaaacaactaacctttcattacaagcgaagtctcagctaacgtaagtctaaagctatcttctagccaaaaaaaattggataggtaccaaagcataagagcagaggctaaggaaagtttgacaaatccatagaggtcccgaaacgctagcatagaaaatccagtccacgcaccgtctgatttggtgattaagatatacaaaagctgaccaataacaatcaaccaccacgaggtattgagagtgatagctgcacctacaagtccccacttaaagtaaagaatgaagagccagctaaaaactgcatgtataactaaaaccactccagagatccaagccatcacaagaactttcctctgtgactgcaagaatttctgtatcgggaagttggctgcataggcaaatagttgcgggatcatccacaatgcgaacttccctgaaaattataacaacgcagaagttgttacgtgaacattgactccaaactcaaaaccaattggcaaaaaggaataacaagaatgatacccgcggctttagagatgtgaggagcctcgccgaagaaggaaagaataggaggagcccaaatgtagacgggaagcaaaaacaaagcagtagtaaagagaatgacccatgaacgttgcatatatattcccatcatcctaatctgtcccgcgccatatgcttgtccacacaacgtctccaatgcactccccatccctaactgccaccattttccatcatcaaaatgtttatattgtttgatctctaagcttttttcataggaaacttaaatgacaagcaacaaaattcaagagagcttacacaaggaccctcgtagagattacttgtataacaaatattataacactgaactcaactacattaatatatctactttatttgaatataaaacacactgttaggatttacttaatcacaattacgaaacaattttaaatgtatgggaaaatctacttcattgatattaacgaatattgatattaattaatacaaaaaaagtcctcaaatattgacttttatttctgtggctattattagaacacattatccattaccaagaacctgacacgtgtgaagggtgtttacgtaacataccatgacaccgaaggcaagaccggagataacagagttttcaactgagacggcggcgagctcaagttcaccgagacggccggagaaagtctgagtgagagcaccaagagagtattgacttatggcagtgaaaatcgctggtcctgctaactcccaaagccgcttcgactcttcgccgaactctttggcccatacttttgacgccgacttggttccggtgagttccggtggctcacgagggtcaagcaacggcaaagtcttatcctttcccatgtgaaaaaagctctgttttagtttctcttctttgctttctctttgttctgacttatgatatatgtatataaatacagaagatggagacacactagtgtggtaggtgccataatgaatagtctaaaaaggtctgacatgagatctatccaaaagaaataaaccgccaaaaatgactaaacgaaggtaatggaattatttagtacatattctatagttttggtatgaatcggcctaatttggtagttaaatattatcagcataatttcttaatatgaataaatctcaatttaatgggattgttaagagtatggattggttgaaaacttgaaatgatagtgtgatatgataacaaagatttttgtaatagtttatttggtttttgtttttgggccgaagtttggggccgaaactttaaacacgtagttgaatgcaagaaaaaaaaaaaaaaacttgtggtaatatgaagaagtacgtatgtactaggtaggtacactttagtttttcctagaaggagttaaccgagtcgtacaagtaattaaaattattgtggacagtgaatataatggaccaatgaggacttaccagctcgttagaaatacttcgaccaaggttaaatataatcagacggctctttgagtcctaaattgggttcaaagggtgacaacggcaatgaacatttagtcacttaccctatcgcattgaattggtggatcttgtttttattttctttttaatattaggtgttggtgaaagtgcaaaagaaattaataaaattgatgaaccaaaaaatcgacagcattttgtaacaagaaaagcttttacactgtctgaacttaaccaaaaggagagtgaatcatgcatggtcaattggtcattggttagtgctcaaattaaccattgttgtgagagcgaagttgttgtgaaactaagagaaataaaaagtcatgaaccaaataatcgacatcgttttatatcaaagaaatgcgaaaatattactttgaactttaaccaaaaagagagtgaatcatggtagatgattattgaatcgtgatcaaattaaccattgttgtaagagcgtagttgttgtatcatgggattcttgcggtagtgaggaagctatgtttcagaataactagtctatactgagagggatgaatcctcgttgtatcacatattgcatgtggactcaaaagatttcactccttggttgttagttttgttcacatatttcttttgtttcgaaaactaacatagattaactcttgtgagtatttagttacaatatcaaaccgtggtggcctaagctgcttaaggttacatcgattgcctctgaaggagatatggatggtgtgattgtgaaagatattatggagaatattaaggaaagaggtgatatgaggtttggatcgaggttgcattttcctgattgcagagatgggacgaccgggaagatgaactatgtgtgtgatgaagccagattacggttcgagctcggctctcaaagaacggcaactttatttagaaaacgctctgcttgtcccttgattgtttagcgttcaaactgttggatattccttgcctttagatgttgagttttccctttaataaaaaatactataaaagtgtattgtcctactacagctttgattcaaaattatccaaatttatcccaaagaatcactttctttgcactaatgaagtaatgaggctaccacattttgttttcttacctgaagtgagctaatatctaaagaaccagacattatataaacaagtgattgaatacaaatttgatttcacatttgcatatgagaatttagtagtcatacaatattgaataattgctcagaatgtcctttccacactaccccttttcaattctaccttttcttatttgccattttcatttatacctctttaaatttttaatgaccattttactcatatttcgaaattgttttaggttaacaaaatgaaatattaatattttttcgcctaaaatattccaaaataaatttcccaccaaaaaatttcgaaaaaaaaatttccatcaaagtttttttctcaaaaacatttttcccgcaaaaatatttttttggctggaaatagatttacaagggattttaaaagatctttaaagggtttaaaagggttttaaaatatttacaagggatttttaaagggttttaaaagatttttaaagggtttaaaagtgttttaaaagatttacaaggaatttttaaggcgtttaaaatatttacaagggtttttaaaagatttttaaagaatttaaaagaaaactctttaaaaactcttataaatctttttaaaaccttttgtaaaggttcacaagagtttaaaatggttcaaaattattaaaagggtttacaagagttttaaaaagatttttaaatggtttacaagggtttacaagggttttaaaggatttacaatagtttaaaaaaaaattaaaatatttacaagagttttaaaatcctttaaaaactcttgtaagtttttttaaaaccttttgtaaaggttcacaagagttttaaaatggttcaaaaagaataataaatgttttaaaatactaacaaatttgtttctaagagttaaaaaatgattgtgaagactttataagagttttaagaagattttaaaaggatttacaaaggtttaaaaatcattgtaaatccttgtaaatccttttaaaactattgtaaaaggtttaaaatgattcacaaaggtttaaaagggatttttaaagtatttacatatgtttttaaagactttataaagattttaaaatgatttataagggtttttaataactatcaaagcttttaaaaaactttctaaggatttttaaaaggattattttggttgagaaaaaatttgttacgggaaaaacattttggcgggaaattttctttttggcaggaaaaaagtttggcggaattttgttttggcgggaaaagtaaattttggcactaaaaatttggtgggaaaatttcagttccagttacatgtttttattagataagggttatttggtcattctgttcagatgagtggtattttttaaaatggataacataaaagtgtattgttgcaaaagagtagtaagaaatggtagttttgcatatcttcctaaaatatttctagtttagttgtcagtttcctaagagaggatacatatatcttgtaaaccatttgatgtaatttgttggacaaaacattatttgagattagaaagaagtatgtaagaaattttacaaaaatattatatatgatattataataatttatttcatgtagaaaatggagatggatcttccgaatttgattttcttcttgtgaaatggtgggaattgatattttcaaaactccatcgttaaatatgcaaaaatgtaattttcattatacatatgtaattttgaattaaaaacataaaaatataaccatcaaaattttcatttagtttggaactaaaatatgaaaatgaatgataagtataatctagtaattcgtcatagataaaataatatgagaacaatctaagaaatataaagataaaatttagaaccaaacctttacaatgatgtctcaattaatttttcaacccaaaaaacaacacaaaaacaaagaaaatatttaagatttaagatatggtagaagtgaatgcggaaaaggtataaactgtgatacatgatgtattagatgtgacgcctttgagaaaacaattaatcatacgctttttctttaccatccagcgtatgattaatcatacatgattttattgtgaaaaatgtgttaataaatcttggcatcgtgtgaataaattttgaaaactcaaactgccttattttgagaaggttactcttgcccgttaatcattttttcattgtttttttttttcaaatctatgaagtaagccatgtgacataatatgatttgttaggtgatttgtactttataagataaaggattatacgtgtttgatcaaagtaaaattagtcctccctcttgatatgcaaatgtcgaatattattcttcgatttaaaccggaattctacttataaactattcacaaccaaacaaacaaatatcttaaggggtgagaaattacgacaacgaaagagtctcgtaatgccttttgttttgtttgttgcaactcgtgtcacatcttccatcgtcttcacatcattgggccgactcttttgcctcttaacttcttcatctcctttcggtatgttatcacttctgctagtactagctgtgttattttcaatgaagactttcttccactaagcaagtaagtcttctttgccccgaatgatgcttgtttcagacaatcactatttgaaatatttggtaagggttgctttattcattcagataatgtaagtatttatacacaaatattctaagggttttttcttgtacataagatccattaaggcccgttactattatataaatctagtgtcgtattcaattaaaaaatattctgcctaaactaattggagttctatgtagttataatagataatgccacttagaaaactctctaaacacaatttatgtgtcaatacagttggttcaactcttgtaagctcacactaaacaaatggtgtggtcggtttgttgtctcttcagtacatcaccaattactaaagtccctcagaagaagttaaatatatattacttaagactttatctttaaccaatgtgtatcctagagtaaataaaatatttctgtaatgattattattattttttaattcataaatcttttttttttaattttgtttttgcattcgtgatacccaacaaattttccatttttgaggattttacttacatacaatctttgatgcctttgaagaatttttgagggcatgagtcttgctgtaaaagcaatgttagggactattacaaatcagagagaatgaagataagaatagaaagtttattcattcattcatcataaagaatcaatctgtacaattgctctgttatatacaagtgactaaaccggtctaaaccatctaacttatctaaaccgagtatatacactcaatagtccccctcaagatgagctgaatatgttatgaagactcatcttggattttaaatgagtgaactgatgcggaaacagagctttattgagaatatctgcaacttgatcttctgttcgaacatgaagcagcttgataatccctttctctaacttttctctgacggtgtgacaatccacctcaatgtgtttggttcgctcatgaaacacgagattaaaagcgatgtaaagcgccgcagtactatcagaaaagagtatagggatagagattcgaatcctcaaatctgacaataaagtggttagccataccatttcacaagttgcaagggctagagctcgatactcagcttctgcagaggatcgagagatagttggttgcttctttgaacgccaagatatcaatgatgaacccaaaaacatagtgaacctagtcgtagatcttctactatcctaacatgatgcccaatcagagtctgcaaaacccttgagtgtgagatccggatcagcagaataaaagagtccttgaccaatagttcccttaatgtactgtaacactttgtacacagcttgaagatgagcagtacgaggtgtagaagagtactgacacagcttgttaactgcgaacgtgatatccggacgtgtgatagtaaggtacattaggcgacccacaagtctccgataatactccttgtcttccaacaattcaccatcactcttggacagatgcaggttaggtatcataggggtagaagaatgttgacaatcaagcataccagtggaagtgaggagctccaaggcatacttccgttggcagagagagataccttcagatgtgcgagccacttctaaccctaggaagtatttcagagggccgagttctcttaacctgaaactttccttcaaagcattggtcaattgtgtagcagctgtctccgtggtgctagctatcacaatgtcatcaacataaaccaaagccgcaatgaactcagttccaaagcaacgcaaaaataaagtatgatcaccatgacctttaacaaaccccagctgaaccaaagcatttctcaatttcttaaaccactgccgggaagcttgtttgagaccataaatggatttcttgagacgacataccgcattaggagggagagagtcccccttactgtcagcatatccctctggtaatttcatatagatggtctcttccaaatcaccattgagaaaagcatttgaaatgtcaagttgattcagaaaccattgtttagaagctgagactttcagaagaagtttcacagtagccatcttagcaactggagagaaagtatcagtgtaatctaaaccctctttctgagtatatcccttgaaaactaaccttgctttgtaacgctcaagactgtcatcagataaaaacttcactgtaaaaacccatttacagccaactgctttcttaccaagcggcagactagtgatttcccaagtatccgtgattttcattgcatcaatttccttgtgaatcactccacaccattctttagatttctttgcctcagaatatgattgagggattggaatttgtgaaatgttattaatgtataacatatgtgatggtgagatttgagagtaggaaagagaagatgaaatgggatcattgacttcattgtgtatagagtaacaatgatagtcttttaaatgagcaggtggatgtttaggcttatgagatgaaataggctgtaatggagaaatttgtgttggcggagaaatttgtggtgatgaaagatgagaaggaatgaatgtacctgaagacaaagaatctattggtgtgaagacttcaatagcagcagaagaagaatcctgaggcttcaccaatggaaacagagcttcatgaaagacaacattccttgtgatataaaccgagttactttccatatccaacactttatatcctttgaaacctgcagggtatccaagaaagatacaagcacgagatcttggttgaaacttgttacgcttcttagctgatgtggagctgtagcaaagacaaccaaaagtccgtatctgagaataatcaggtttctgacctgtaagcaattcaaaatgagtcttattagcaagcagctgagaaggagtcatgttgatcggaaacacaatagtgagaatgcaatctctccagtatggtaaagacatgttggattgaaacattaatgcccttgccacattgagaatgtgctgatgttttctctctactactgagttctgttctggagtttcaggacaagaatgatatggaactatccctttctatttgtagaatgctgtaaagctcaattctctttcattatcagatcgaacagatttaaccttagtgttgtattgattttcaacttgagtgatgaaatcaggaaaaacagtgagtacttcattcgtatgtcgaagtagataaacccatgttgctctggagtgatcatcaactatagtaaaaaaatatttaaaaccatcaactgtttcctctgaaaagggtccccaaacatcaatgtgcaacaactcaaaagctgaattacatatgttgttcccagatggaaaatacaactttcgatgtttggctaagtgacaatcatgacagtaagaattatctttattcttatgtttagaagtccccaaatcttcagaaagaacatcaagtcttgagtaggatgggtgtcctaatctcctgttccacattccaacgtccaccaccgcattgagagatatagatggggtctttgtatccagcacatagagattcccaatccgtctaccttttccaattgtcaattccctggtaggatcctgtatttcacaacaagtgggatcaaaaatcactctcgagccaagatcacttgtcaaagaactgatactgagaagactgagtctgaattcagggataaacaagatatttttgagaactatgttcttgtttaactgaatcatgccctgttgggagattcacagaacaatgtgtgttgacatacaaccaatatcccaacaaaacaacaagtagaaggagaaaaggtgatatcagtgtaacctgaaggagcttgagaagaactggcagtgactgaaccagaagaaccaacagactgatttgaaaaagactgattctgaagttgagtacttatcatagcaataacattctgaagctggtcagaagagagattaccaataaccgtttcaagttgtccagagatcttgtcaggtcctggagaagacaatgaaacttgagcagctactggttgttgtttctgaaccttatccgcaaactttgctttgggagtgaatccaggaggcttgtagcatcgctctgcaatgtggccaattctgtggcaacgaaaaaagatgatcggaaaagttatagatctgagcttgtaggctctgataccatattacaagtcagagagaatgaagataagaatagaaagtttattcattcattcatcgtaaagaattaatctgtacaattgctttgttatatataagtgactaaaccggtctaaaccatctaacttatctaaattgaatatatacattcaatagggacgataatgttgtggcacgtcaaaaatttgtgaaaaccatattaacatttttaaaaatcaacaagagattgtgaaatttttttgacatgcaagtcactattaaaaagatattaacattttcttatgatattaacatgtttaaccctaaactatattaaccatcctcattgcacaaaaaatacagtatttttaaaaaattttgaaaaaaataaaataaaataaattgttatttagtccttttaatagggagatccgtgtcttccatgtctcgcaaaaacatttttatacttttaaagacaccacatttagctaataaatgacttaaaattaaaataacattaacttttataataaattataataaagatatttgtaagaggataatcaatgtggatgttctaaaggttgagttctagccttctgcgattaaaaactttgttcggtaaaattaatagtggaagattgtgaagaacgggaagatcccaatggatgtagagagaaagattgagtccaattgttcaaaaaatacctcgaaggtcatcaatatttagaagattagtttgctcttaagaaaaattattattattaaaaatataatctttaattaatcccttcatcttggaaagaagagaagtgacttgacaaatatttatggatagatgctaatctactcattgtcaattcttttaagttgaaaactcataaaatttaacatgcatagtattagaattcaaacatacgatgtttgaatccggtccaattttttaaaagtagtatctcaaaagaacatgatagaattctgttgggattaatggctagaagaaccactatctccaaagatcatgtaaaaattattccacatcagaaaatgggaatgaatttgtccaatacataagagatatagaaattctagcatgtaagtcatgacagcgacatccatcgcttttcaacaatacaactgctctgccacacatgcgaagctaggcttaggtgcatgtcggcatgatgatgaaaacatctttctgtacgagtgtattgtatttggctaagtagcatggatctctccaagccttgaattttttacaaaggctcaaatgcacgttcttacatgataccttcggagatatgagtatcagtatagaaggatcccgttggaaagaccctcaagatcatgcaagtagacacaaggaaatttgcacatggaacctagtcaacctacattattgcaacaagcccacctgtcatatttttattggttttagtatagaaaaagaaaatcaccaaaatattaaatataactttttttttgtcacttgaaattttattataaaagcttattgtggaaccagaggaggaatacatatgcccaaacaagggaaactcaagtcggcagacaactaaaagtctctgaagacattgccggagaaaaaaagaaattccccggaaaacaaagccctatctaagggaaccagggtaaaacgaaactggaaatacaatgcagaaatgatcaaaacacaatcgaaagaggacgactcctaaaactaaaagcagaggcgacaagacaaaaaccttaagaaaaatgatagaactaagagaacagagaaacctcttcttcttttgaaagaccagcaaatgcgacttatcacggctgcccacggccaaaccagaaataatatctattacctcctatcaaagttgaaaaccaatctctcgagaaccaaagatatcagaacccggtaagcaaagagcattcatagaaactcatagaacctcgaacacacttccggatgcgacgaagaccgaagcgtcacttaacgcctagctagaatcctacaaaaaagcaacacaaacataatttatttataactaattaacaataaaataaacactatagtgagccacttgaaccatgaacttcaacgaccaacagcaacacaaacttgtggacaagaataatttatttatatgtaatatgtggacgtgaattatttgttgaacctccaagactagtgataagaacattttactagtaattctgaccttaagaagttcatttcaccacaaacgacataaaatctaatataatttggttaaatgtaacatacagtatgtaactatgggttaggaatggtttacgcttaccaaaccaatttagtcaactgacagttctgtgaggtttattcccaataacttcactagaaccactcatttctcactagaaattcttttgttgcgggctataaaagggataatgctagagaaattaaagcacatatacaagaacaaaaataattctataaagaataaaacgtttagagtaagtaagcttgtagaagtaaacaaaaaaggttggtaatttccgccacctgaattcgagtagcattagccatcagagttcgagtaaaacgtttagagtaagtaagcttgtaaaagtaaatagaaagggaggtaattccgccatctaagttcgagtagcattggccatcagagttcgagtaatttaacatggtttctccagacttcaaaattagtctttagagcatggtcataggtgatactcataaagtatcattaagaactttttagtattatttataatgtttgtttaataaatatattttatttctttttagcaaatgcgacaaattaagagatgacatgtcagatgatactggtatcaaaaatatcactaagctgatactgatcaaacttattttaattatttatcaatataaaaataatttttggacttatgatattttagaaatattacccgtatatatggtattaggtatataaaatttttacgatcacctaaattataaaaagaaaaaacaaaacaaaacaaaaagtaaaccgaaaagggtcttgaacggtaaaaattatctctttccttgccttaaggtccaattccagattaaatccgagccaaaatccatcacaaaactggattaattaaggcatgtgctcgatttagcgtttctgaattaaactcttacgtgtatgatatttggatgtgtatataatgtctggggtgagtaaaggaaaccgaagttgaaaaaacaaacaaacttgacaaaagttaattagtttaatggttaaatcatgaaatgtcaccaccgaccacttgatctcccatgctgtagttgaagaagtttgcctcagaccactttagtagcatacaaaaaagaaaataaataagagggtgttattcagttatggatttttctagaattgaaatgcaacactaaaataaacttttaactcaaccgatccatatatgtagatgagttcaaaaccaacaaaaactaaaaaaaaaactatagataaattggtcgcatattaaaagattaaaaaaacatggtgaattaagtatttatctacaaattatactaaatacaacattttttatgttcaaaaaaaattggactgtcattttatctgttatatatatcggaaccacgatatgtaaaaatttaataaaatatcaatttatttttaaattatactttttcttaaaataaaataatcaatcatgaattattctattctcggagtctaaaaaagtaaaatttaaaacaatttaatttatgtagaataatgttttgtatgaaactaattttgttgtctataattaacaagatcgtttatgtttgcaaaaacaaaggaaattttttttttttttttttttaatatctcgaagttcaagccgaaaggcctacatctccgagatgcaggatccacaccagattttcaacaatggaggaatataaaatatcaaaacgacattcatattaagctatgtattatttaagtttataattaatgattttagttaaccaaatacagttgatttatataaaatttggattatcctattgaaaattatgcatgtccaaaacttcttatgagatttatatgtataagtttatataagggtttatataattattaattattttttacataaaagcctaaccagagacaaacattttttttcttctaaataatctatcaattattaatttctagaggttaaactaatgtatatacataatgtgggtgtgaatttttgttggttttgttacattcgtttatttctgttttctttatttttttcagttaagctagattgctaaggaataaaatttgaaattagtttagctcatttaaacaaaatatcggttagattcagacagttcaacctattttgaaaatctattcagttttttttttttataaaatgaaaaatccgaagctcatttctcagtattatagtagagaagtgattttttttgtttaaattagtttagcataagcacacacaaaattgttttacattacatcacatgtgatgatgatgtggataagtgtatcgatcatccgccaatatttactgattactgtaatataaacattaaaatttcttcaaaaatcaaagattctattgtacctttctatttcctctagagatttcctaatgaagaaaaaaccagcaaagtcattatcaaattcgaccgtccattcgaagacgtacacgtctttgtagtcaacaccatttacctaacttcctagaaaaccacgtaacattgcatgtgcctagtttctcttatataaccccaatcaatatatatatatatgaatattgaagataacatcgttaaattgcttttaggttctcattatatcatttctctttaacttcgcaaacttctcctcgataaaatttctctctctaaaaaaaaacaattagaatcttgccttttacagagtaacactacatgccgacaatggggaataagaattcgatgtgtgggttaaaaaggtaataataattggtatcaaacgaatcttgcttgctacgttggtttctatatatacaagtatttgtaactcttgtagatagacatatgaatatataacttatatgtgttgttgtgtatatcatcaataggtttccgaactacaagaagtctccgatcggttcatttgcgaaaaactcatcatctcacgacggtattaaaacaatcgaagctgttaacagttgcagtttttctagaaaagcagatctttgcatccgtatcatcacatggaacatgaatggaaatgtacgtacgtatatgtaccacatattcatctaattctgccatatgaaaaatcctccttcataagtagattcaactatgttactaaatgtactatattaatacatgtgaaggtttcgtatgaggatttagttgagcttgttggcaaagaaaggaagttcgatttgcttgtcgttggcttgcaagaagctcccaaagcaaacgttgatcaacttttgcagacagcttcatctccaactcacgagtaagtaataactgtttatttctacttatatccataataactatactctactgtttatttctacttatatccataataactaatataccaaaaatttgtcttatcttcatgtaattttaacattgcaaattaaagttctatatcgaattgaaatgcaggcttcttgggaaggcgaaattgcaatcggtccagttatatttgtttgggccaaagaattcacatacattagtaaaaggtcagatttttataaatttttgtttacttcattttaaatttactgtatttgatattctatgaaaatttgttatattaatacttttaccaatttggatctaaggttaaatttttcattcatacaaatatttattttaaattttttacaacacttaatttgaaacaaaagaagtattttggaaactaagaataataattttgtttattgtatgattaattgcagaattaaaggcagagagatattcggtaggaggatgtggaggtttaataggaagaaaaaaaggagccgtggctattcgtattaactacgatgacatcaaaatggtttttatctcttgccatctctctggtacctatttttattttttggtctaatttctactctttttcgtaatttacaattaattagaattacaaataattattagtataatcatgcagctcatgcaaaaaaagtggatcaaagaaatacggagttaagacacatagcaaattcactattaccaagagacaaaaggaaacgtgaccttactgtttggctaggagatctaaattacaggatccaagatgtctctaaccatcctgttcgatctcttatccaaaaccatcttcaatctgtaagtcatttcttcttcttcttcttcttctccaaataacaagaatagaaataacaaataacaactattaaaggaaaaaagtagaagaaaattaataaaaatatcatttactctgttttgtttaaaaaaatatatcttgtttttttgttttcttttcaaaatcttgaattaaattaagtacattaattcattaaggttaatgtacttaatgagttagccttataaaatactattctaatatatgtaaaaggaataaggtcaaaataaaaccgagtaataatatgagacaaaaataagttgtcaaattaccttataaaaaagaatggagtgctttaacaaaagaaaaaagaagacgaatggagtgagtatactctcttcaagtatatgtaatttaagacaataagtttttagaatatttttattcggtttcattttttccggttgcataaatattggttttgatttagcaaaatggactattaccaatcgattataaaaaaaaaaaaatgttttctattttatacaactttggtactcagttaggtttgctaatcactcttaatcctattggttttcatcactttgtgcaggttcttgtgagtaaagatcaactcttgcaagaagcggagagaggcgaaatattcaaaggttactctgaaggaactttagggtttaaaccaacctacaagtacaatgtaggaagcagcgactatgatacaagccataagatcagggttccagcttggacagataggatcttattcaagatccaagatactgataatattcaagcaactcttcactcttatgattccatagaccaagtatatggttctgatcataagcctgtcaaagcggatctttgcttgaagtgggtcaacagttaaataaatgcatacaatttaatatgaaggataatatggtatatatgaacggattattactattttgagattatatagttcaaacactttgagttctttattaatgtttttgaatgtaagaaacttgtaagttcagaacttcttcaaagtgtcaattgagaaagtctagttaagcccttccctcatgctactcagttgaatggttacgctttggtgttagcctcctttagctatctgttaccttggtccacactagatcacgtctctttggttttttatgtcattcatgatgtattgtgtagctctttttatctcattcatgaagttatgtgtagctctcatcatatccaccaatgcatttgttgcctacatgttgccttgttggtacctttatctgttgtctatagtttataaaagtgtttataatttacaatcacttgtcgttttcatttccttaaaaccattttgctctacaattatactcaaaaaacatattttcagttcttccatgtcttttcacatgcatgtaacacaaggttttaacgggtattttacaagctaaaatggtgaattctaaagcttttacgtataataaatagtattaatattgttgagttttggctgtgattaacgacgacattgtattaaaattatgtggtgatagtgtgatactaaggattggcgaaatactgattcccccaaactattcaagtcctcatctttctaggttctaattattctaatactatatgtgtaccataaaaaatagctaagttgttgaggagtaagcctcctcgagacggtccaaagaggctttgagaccatagaaataaaggatatgaaagctaactaagtgttttagattcgttccactccacaacgtcaaactaatgacatgcttaccaaaagagaaaaaaaaaaactcgattggtgcaactcacttctttgatcaataagttcaatagtcaaaaagatcagaagaaacaaatcaaattaatcaatcaaatccaagtctcctaaattactgtatgatttccaccaaaattcgatgtccaaaagatgataaaccctaaactcaagtagagacaagaagccaaccacttttgccttatacctcctaacatcacctaacctgagtgagtttttgttgtcctatagatagatgctcagattaagcttttagtttcctcagctaacttgttgctgatgaccaccgtacattggatagtaaggtgcagcaggatacattctcgggtcaggttgaggtaccatgtatccatacccattgtaaaactgtcctccatagtacggatcaacccattggtttccatacttatctctaggctgcaacacaacataaaacttgtaagaatcagagatgtgtcaagcagagccattcaaagctaatcacataagtgaagtactttagggggtaaaaaccacagcaaaccaaactttctttcaaagagaaaccataacagtagtcttataccaatccataaccaaaccaaactaagatcaaacaaagcaaatgaaccacaatattttaaattaaatatgtatcacaaggcgtttaacattttatgaacattactataaaaaagagaacattttgatacgtttgttctacactaatgcagatagaaagtgggatttacctgcttattggctggattacggccccaagaaagccggactgtttgtttgccaattacagtcccattgagtttttccaaagcctcctctgcatttggtctgcaaccaaatgtttaaaacatcaaatctattaccgtgagaaactacttaatccatggttagataaggcaattatatgttacctgttaacaaactgaacaaatccgcatcctttaccaacaggaatcttgacagacactatttccccgaattcagagaaaggttgctttaagtcttcatcagtgacactagagtcaagccctccaacaaatatctatgtttaaaataaaataaaaagaagatcaaccttctcttgtcacacaatcaaatgaaagatactatgaaaaaaaaaattactgttgtgttgattgtgtccccttcagaacgcgtaaaggcaccactcggcatgtatccacctaccagatccatcaaatagttatgtacacaagagacttaaaacatattgttgcaataccaagaacctaacatgagcatagatacacaaagatattgcattggagagaacttaccttgttgttgataaccattagttttccttggggtagcaggaccgatacgcatagctctactagagcatttaacaccattcatctcagtcattgctttggtcctttcattctcatctccaaacctcacaaacccatacccctttgatctaccagtattagcatcaaggacaactttggcagctttaaccgacggatacttctcagagaaggtctcgtgcaacaaagcatccgaaacatctggcgccaaatccccaacaaatatagagagatcaggtccattgttctctaaccgcttctcaccggtgctaaaactagcccagttcaaacgaaaaggttggtcagtatttggcataggcgccccgttaaactcctgcaaaaccttatcagctacatcatgggactcaaactccacaaatccatatccttccgatgaaccattgtgcttattacgaatcaccttcagcgaaacaatctctctctgcattaaacataaagtacacacctttagaccaaattcacaaagaaagaaaaaaacagagcaaactttaccaacaagtacatagagaaactgaaaaaggcatgtcaaagcattaaaagtcaacgaaacagaatcaagaaactgttaatacacaatctaagacactaatcaagagatacataaatgttttgcaataatgacagagagagagagagagaagcaaacctcttcggcggaagtaaaagcagaattaagataagcctcatccatccagttttgcaaatcaccaacccaaatagttttattctcaccattaaaagcgttttgatgcttattaccacgagattgatggtgaaagtggtggtgattcggatattgatgataaggtgagaacggcatcggtggcggcggcgcgtacatcatctgaggcattaacaccggtggataacgcatccagtgtggcggcggcggagtcggagatgtttttggttgattctcctctacttcaaccggtggatgcggcggaggataaggtggaagtgattgatagtcgaccaagggatgagaatccgaggattcggattcggattgaaccttgacgtctgccattaaattttgcggctatgtgaagtgattgtttatgtgatgtgagagattagggttagtagtttcggtttcggaccaaacaggggaagttttgagagttgtgttttgagagttgtattaatatggcaaagtttaggtcgaaattaagggtttttgattcggtttcggtggtaactggcaaatacgggtccggtttttgggtttatgtgagttactaggtttaaagccatcctagtttagtgacaaccgttggattgtacggagagagtttagatcttaaccgtttttttttttttttgtttgtttgttatatactgctattatgagtgtttgtttttagattctctccgatgttgtactttcctttttttctgacttcttttttcatgcaaccggcttattaatttggacttctaacttatttttcagcttcctttttttatttgctaaagatttttttttgaaacataacaatttcttcgtctattgataacaaattaggatataatctgaaatacactgcatgttaaatattttatttattttttaatttttataaaattagaatttgttatatattagattatggttatttgtgttggttaataatttttgataagtttgtgtatggtttttaatgagtcgtaagtttacgatattaataagtttcatatttttttattttttaggacttgaccaaaagtataccacatgacaatattttattttctatttattaattttgtattaaaattatataatttaaattttcgatgcttttagatttaactcgtagaacatacgtaatttagtaactttgtattacaaatacacatttagatgtgtcaaaaaagattagcatttattttgatatactataatattgaattttattgagatgtctcatattaatatcgatcaaaactcatcccgccatataaacctgtctccttctttcagccgtggggtggtcttgtccaacagcttgttctctgatcatcatgttgtcgccggtgggatggtgctgatagttgggggtgatccgcaatgtcctgccattcagaagcgtctctctttgctaatcgaagattatcgtcccatggaatgcaccttttctgaaaagttagaatatttcgactcttccataagcgccaaaagatccatagcgggagttgttgcagatagtttgttaagttgttgttgtactatgatggatcgtacaatcgggagatgccaagtaaggctggatgggtaattcgagatgagtcgggccaatttgtaggtgcaggtcaagcgacagggaaccacacttctaatgctctagaaagcgagtttcaagctcttcttatcgcaatgcaaagctgttggagccacggtcatagaaaaatctggtttgaaggagataacagggaggtgatggaaatcctcaataggagaaaatcacgttttgatacctttaattggataagagatgttcaagcttggaagcaacggtttcaggaatgcagattcacatggatcaaccgaaaacagaacaaaccggcggatattcttgccaagagtcacttaccccagaatgaacaatttaaattttatgattacattccgattgtaatttcttcagccttacagctggaaaacttttgatcataataacaatggaaaagaagatgttaaaaaaaaaaaaaaaaaactgtctcatctaaatccatcccgtcttaaaaacatgtctcatctaaacctatctcacaataataacccatcccataataactaaacatcattttgttcttttttataataatatttttatttaaaatatatgtaattcgagtcaatttaaaaatttattctaactgattaaaacttattgaaagacaaactaaatattacactttgattttgaactatcattaatttatagtaagtatcttctgtttttgtagaaattaggcaagatccaactcacccgattggattccttaaaatgtatttctaaaatgttaatatagatcattagaaactatctccaaacaaccaaaaaatcttgctttcactactactcgtcatggaggttaattgtagatccactttgattttagaaagcttttgtggattttggattctcagtacttgcttgagccatcaaccttggtttctcccacaattcgcttcctcctaatcggatcggagaaaaagaggataaatctgagttcgtctggttgctaggaacgagattggaagacggacacgtcggttgtcgaatagctactccttttcggaggtttgtactggattggtgggtcagagtgttggtcgataattgagtttctgatttaaaattttatgtattaaggtagttatttgtcaagagacacaagtaggaagagacacaagtatgaagagacacaactcattgtgttgttgagtctacttgtttcctatatatactcattgtatcgtcatgtaaataactaataagtttcaggttcattaaaagttttctattttcgttcttgtcttcttcacaagagaagagatatttatctcttactcaattttttctttttctctcaatattccaacatggtatcaaagcttatcttggtcttggagcatgtccaagtaaaaaatggataacaagaattccgctgtgagaagaagagaaagaaggagacaacaaatcaacggtgagaaaccgaagagaaaaaaagaaaaataaaaagtagaagaagaagaaacaaaaaaaggaagaaaagaataggagagagtacaatcaattacaaacagtttcacatatcgtaccttcaagaggaaggctccaaaaagggatgaagaagataggaaagcttctctaaaggcaagggagaaatggatgaggatttggagttgtggaaggagaattctgaaactttgttcaacaatgtcttggtgaagttcaagcatgcaaagaagcatcacttgatgaagttgagaatccaactgaaacaagacggagaaggaagtcgcctgttgtaagaaacagagcaaggcttatgataagaatgaaactatgaatctctctttcttatccttaaaatcccattacaatgaatcaaaaccctaaattgataagcttggagttacagttctccactcttatctccaaagaacagagcacacaaagctttaatcctctttacacatcaatgatcacgcaggatacttttctctctactctctcttactatttataagtttcttcacacgtgactccaatctctcacgtgtgttctcacgtcccaactcattactccagcttcttctcatgaacgtatcagcttactaacaaaaggtgtggttgagttgtgaagaagactacaacacggagtaagtttctgttggaagaatagtgcaaggctactcagcaaaaaggttaatcgaagaagagacgtcacaaagacgtgattgtgatcaaagagaaacaccaagcaagaaaggaggatgcttaactcatagaaaaaatggtgcataagaggacgcttacctcagagaaaaatggagcaagagaggatgtttaccttagagaaaaatgggagcataacagatacatacctcggaaaaaaaatgaagcacaagaggatgcttacctcaaaaaaaaaatggagcataagaggatgttaacctccgagaaaaatggagcacaaaaggatgcttttctcaaagagaaatggagcataagaggatgcttacctcagtgaaaaatggagcacaagaggattcttacctcaaagaaaaaatggagagtaagaggatgcttacctcggagaaaaaatggagcataagaagatgcttacctcaaagacatggagaaataccggtggtaagagaaaggccacaagttcaattgtcttgcagaagaaacaaaattgacaaagagtatcaaattgtgtaacaaagagaagaacaaaggaagaagtttgaagtaaatcagaaactcaattaagggggaatgttggtcgataattgagtttctgattatattaaagttttatgtattaagatagttatatgtcaggagatccacaagtaggaagagacaaaactcattgtgttgttgtgtctacttgttttctatatatatatattcattgtatcgtcatgtaaataactaacaagtttcagattcattaaaagttttctattttcgttcttgttttctttacaagagaatatatatttatctcttactctgtcttttctttttctctcaatattctaacacggaagcagggaaaccgattgctttcgtcgctttttttcggtctcttgattctctcgtgaagttgtggaccttgcatccgccggaactcatgaacagctgtttcttttcgatggtataccaagattcgagccctttttctgattctgttttgttttccgatatcgttttttgatacgtgtaattcaccttattccaactcattataaaaaattaataatattttttttatagagaaaacaaataaaaaaaaacaaactacaaaccaaatataacaaaactacgtaccaaattaagcacctaattagatacggttgagggaaaaggatttatgttcctctttcggcacttgatgtaggtgtgaaccaatagacatctacattacacaattttttatttttttttgccggcgcattacacaaattaaatatcggttttaaacatttatatttgttatatgcataactctttgtataaaaatgttaaataatgtataatgtacagaatgtttaattttctgtcctaaaatttctcattgttccagcctttcaggccttttcggatttctccttcttcaaagtataagatatactacttcactatgttctatgtctgagatatataaaaggttttacgtagaatcattattgattggatgtgatttacgacgacattgtattaaaactatgcggtgatactaaggattgtgcccaacttttccattgcaagttctgatctttctaggttctagctattctaatactatgtgtgtaccaccaatacaaaatagctaagtttatacgcctcctaattgagacagtcgaaagaggctttgagaccttaaaaataataaaggatataaaagctaacttgaggatcattattagctgtggcctgatggcgataactacctccaaacacaacaacaaaataaaacctaagtatttagactaataacaaaaaatagatataatcaattggtgcaactcacttcttcttgatcaataacttccatagtcaaaagtatcagaagaaacaaataaaattaatcaatcaaatccaagtcccctaaattactgtatggtttccaccaaaaattcgatgtccactagatgataaaccctaaactcaaggagagacaagaagccaacaatttttgccttgttcttcctaacatcacctaacctgagtgagtttttgttgtcctatagatagatgctcagattaagcttttagtttcctcagctaacttgttgctgatgaccaccgtacattggatagtaaggtgcagcgggatacattctcgggtcaggttgaggtaccatgtatccatacccattgtaaaactgtcctccatagtacggatcaacccattggtttccatacttatctctaggctgcaacacaacataaaacttgtaagaatcagagatgtgtcaagcagagccattcaaagctaatcacataagtgaagtacttcatgggtggacgttaaaaccacaccacaccaaactttctttcaagcgaaaccataatagtagccttataccaaaccaaactaagataaaacttagtgcaaccaaataaaatgattggaaattcttcaaaaatactattctaaattaaatatatatcagaaatacgtttaacattcatgaagttaacatttcataaacgttttttacctaatacctaaccaaaccataaacagaagaaagaaaaaaaccaaagaactgaactaaatgccctaggaagttttatcaatgaaactcggatgataaagtcagcttagattatctcagactaggtacacataagggttccaacacaaaaccagtctatctttaatataaaagagaacagttttaggtttttcctacatgattagactgaaagtgggatttacctgcttattggcgggattacgtccccaagaaagccgaactgtttgttttccaattacagtcccatttagtttctccaaagcctcctctgcatttggtctgcaagcaaatgtgtaagcatcaaatcgattatagtacgataagaaaatacttaattcatagttaaataagatacttacctgttaacaaactgaacaaatccgcatcctttaccaacaggaatcttgacagagactatttccccgaattcattgaaaggttgctttaagtcttcatcagtgacactagagtcaagccctccaacaaatatctatgttataaaacagattaaaggggaaaacaaaaacaaaagaagattaaccttctcttgtcacattcacatgaaaggttgaaaacaagaagatactacggaaaaacaattactgttgtgttcattatgtccccttcaggacgcgtcaaggtaccattcggcatgtatccacctgccaaatccatcaaatagttaaagtacacaagagagtaaaacatattgttgcaataccaagaacctaacaatgagcagatttctaatgaaacttcatagaactatccaagtagattataaaacaaagatagtggcattggaaagaacttaccttgttgttgataaccattagtcttcctcggggtagcaggaccgatgcgcatagctctactagaacatttaacaccattcatctcagtcattgctttggtcctttcattctcatcaccaaacctcacaaacccatacccctttgacctaccagtattagcatcaaggacaactttcgcagctttaaccgacggatacttctcagagaaggtctcgtgcaacaaattatccgaaacatctggtgacaaatcccccacgaaaatagagagatcaggtccattgttctctaaccgcttctcaccggtgctaaaactagcccagttcaaacgaaaaggttggtcagtatttggcatagtcgtcccgttaaactcccgcaaaaccttatcagctacatcatgggactcaaactccacaaatccatatccttctgataaaccattgttcttattacgaatcaccttcaccgaaacaatctctctctgtattaaacataaagaacacacctttagaccaaattcacaaagaaagagagatcaaaccgagtcagccagttacatagatatataagcaaactttgtcagcaagtacagagagaaactgaaaaaggcaacgtttttaaggtcaaagcattaaaagtcaacgaaaacagaatctaatcaagagatacataaatgttttgcaataatgacagagagagagaagcaaacctcgtcgccggaagcaaaagaagaattaagataagcctcatccatccagtgatgcaaatcaccaacccatatggttttattctcaccattaaaagcgttttgatgcttattaccacgagattgatggtgaaggtggtggtgattcggatactgatgataaggtgggaacggcggcggcgcgtacatcatctgatgagggattatcaccgttggtggataccgcatccagtgtggcggcggagtcggagatgtttttggttgattctcctcttctttcgccggctgttgcggcggcggaggcggaggaggtggttgattgtcgaccactggatgagaatccgaggattcggattcggattgaatcttgacgtctgccattaaattttgcggctatgaggtgttttgtgatgtgaagtgattgctatgtgatgtgatgtgagattagggttagtttcggtttcggaccaaacagggcaagttttgagagttgtgtttgagatatctattaatggcaaagtttaggtcgaaattaggggttttaatccggttattgtggtaactggcaaatacgggtcgggtttatgggtttctgtgtgtgttctgctaggttttaaagatacggtttagttctgacctagtttagtgaaaaccgttggattgtacggagagagttagatcttgaccgtaggtttttgatgattgtttgttttgtttctattatgagtgtttgttttttagattctctcgtatgttgtacttttctttttctgcttttcttttttccttttttgtttattattttcttaacttattttttggttttactttctagtttttaaatagaggaaaaagaaaaaaattgtgaaacaaaatatctacataaagattgttgctgcaaaactaacatttgagaaatgggattagagaaaactaacattttaagattgttgatttaggaaccttttaacttgtaattttttttttaactaacccaagtttagtgcgacgtagataacttaattagagtagtaattaattaacaaaagagttttaaaaaaaatcaattattatgtgcgatgttgatagtttttgttttgttttcataaagagttaaagacgatgtaggtagtttagttagtgactaattaattgccaaacaaaaatcttcaatgtcatgaatttgaatatctaaagtaaagggtagagtaatataatttttggtaaacaaaacctttcattcttattttttggaaatgaaacaaaatgcctctaaagatttttggtaaaacaaaaccgttcatttcttatgtaacattcgcatccatgttaaaaaatatgaaaatagaatatgcagctccgttaatgtcaacctcccatatgtgagttcctcgccgatggcagatatgagagtacttaataactttaccatgaaccaatcagtaatcttctttccaagtactattctcaaatcaacaaaataaatatacttaagagttggctcttgaaggagaaccttatatttggaaagatgaggatttgaaggcttgcctagggaagagtttgctcatggcaacagcgatgcggagtcgagttctttgaaactgagacaatcatgaatcttcttagaatcaactagatgggttatcgcttgtgttttttccttgttgcgttttattgtagttttcattctttttgttagcttctcagtcttttccgatattcgtgtattttctgttaaattttttgaaaattgtataaatacttagcattgataccaaaaataaaaatataaaagaaaagaagataaacaaagatggtaaagcaaggaaaaaaaacgagggacctaaaagactgagattgggtattaattaataaaagcttcatctcaatgagcatatcgttagtccataaacattttgaatattttaactctgttattctatatcgtctaagaattcgtatttagaaataatttaaccattgacccaaaacaaagcgtgataagtaaatatttcctactaaacttcttcttaaagtgttttcagttaggtctatatttaatgaaacccattgatcaactagcaatcatagacagtttagcaagggatttatcattaatgtatatattaatttttaaaagcaattcattcattatataatcttacaatacgtgacagtgtaacaaacccacgacaaagacataatgatcatagtactgtcaaaacattgaaatgataaagtgatgtccaaacacccctttagcattagaagacaagtctgaatgaaaatacatgtaattttctatatgatataagattatgacgtatgatatgatcgaatcaatgtcgcccgttagagtgtccaacgcctgggctgtttccgggatttgttggcctaaagtctgtggggtgggcaatgacctccttctgaaggacaccacgccgtgtatatgtgaccacaatgctaggatgctcggcctcagtttttttataaattccctcaatctctaacgaagtagttttcaaatgtctctcttctgtgtcctgaattccatgcaaaaccaccaatgcaaggaaaaaaatggatgtagaaactgacctattcgacattcccatgagccggggacaaagacaaatcgataaaatataagaatatgtaaaacaaaacaaggtaaaatatgtctttttttgtgaaagaaaatatatgtgttggattggagaacataaggtgtggaaactagaagaatgtgattttcgatatttatatagaaaatacaagagaagagcatttgtcttaaataaaatctaaaatgtggggaaattttttacttcaaaaatggaatgatgatgttttatgatgtctgagtatattatgtaatccaggtgattcatacttccatatgtttccaactttccatgtctgctctgtattgtatacatggcccatgcatttacatgctcagtttatttcatgtttatttggatcatattattcaggaccaatgtgtgtgaagctccctaggaacttaatatgctactctgtctgttactaaataatagattttttatcttgtttttcaaaaatatttgttttttaaaataaagtttttaggttatctacgcaatatttattagttattttgatgaaatgtaaacttcaaaaaaaatatttgaatattatcggtttaaataatttaaaactgtaaatcataaaaaatatatatatatatatatatttatagtcagcttttaatatattttcttaatatatgtgaaaactctaacaaatgtttttatttagaaacagatagaatataggaatttttaatttaagacgagcattcagagatatattggaggcaagagaggctttatttgaggcaaacaaatagaaatataataaaaataaaaatgtgaatttttcaggttttgtatttttggaaatacagaatcaaattttatatcggtttggtttaattcggttttggattaaagaattatgaaataaaataaaattaattaatcagttttatttaacatatgaaattttttagtatatattaattttgtctatatatttaacttaaagattaaaaattattgaattttggttaatttattctgttggacaatatccagctcaattcggtttcatacttctaaacagaaatttctatatcatacgttaaaacaaaatttggtctggttccgagtgatgaattttggctcagttttcttttatggtgtaattcgtatgcttattttaccacaagaaaaaaaaaactaaatatattcttctaccattttttcacgagtatttacctaaatacattcaaagtgcgtatttttttgttcatgagtattctatcattatacctttagatatttagtagtaagcagcaccgattaaagagaaggttggtagaggaaaaggttgtttgatattacaaaataaacaacatgagagtaaaaatgactatcaaactttcaaatcaaacggaacaggagttttcatgcgtaagatggatcaccttccactatggcttgtccccgaaagtacagtacatgctaggttctctagcccatggcctacgctttgctttttataattatatatgatctcgttatctatcgtattcaactatgtaattacaaccgatttattcaatcgattatttttttcgtggcgaaaagaaaacactaaaagcgtccagattagttctaccgaccaccaaaactaggcctagagtgtatccaacctcctaatcgagtgatatgcagaaatgggaggagaatgtgtaaaaatgagaagtcatgggcgatacccttcagtgtccatgcatatcatgtcattgtgaacataaaacgggtgacatattttatgttctgataacatgttatttgtttattgcgtgtgtattgtgtctttatatagcatgctatatatgttgaaatgtagttagcttaagaaagaaaatcatacgcattataaatcaatagtacgcattatatttaattttaatatgttaacatatatgctatacaattaaataatgtgtcatttattaatcttgtgtgtgatttccaataaatatgatgctatgttcaaatgtgttgagatgaaacaaagcacatgatataactcaataacacgagaataacataaattgcggttaaacctttaacctctgtctataaccatgaggagcatttgaaagctgtagatgggtaataagatgcattaaagttctgaaaataactgtttgataaaaggaaactgtgttgggccaatttttgctaaagtccaaatgggtttagtaaaatcaatttgtatgaaaagaaatgagccaggtggtttggtccagatcgtggtggaactcccaaaggtttttgggccgaatattgaacgtgagaaaataagtcgttctatttcacgtctctgatgactcgcttttcatcgcttcctcaacaccatgagaataggagtgttgagagatcaagtcatcgacacccactattgctagatttctgactgacgtgaatatatttgttggaaaacaaattcaaacctagtaatctcaaacctctatttaaacccacgattcaagtcatctttttcaccgattaagaacttgatcgtttacacacatatagcagaaacaaaagctccatcaatctctacatgtttgagtaagtgtctcgaaagtatcatagtttaataaaacgttagaaccatgtgttcgagtgcttgtaataccgaatgagtttggttgtatcccgggactcttagatcacatatttccatagctctatgagtgattcaaagggttaaagaaagagattagtctcgtctccactttccttaaacgttttttattttaatttgaattacattttctgtattgttactaatttagctcctgcacactatattatgactttgaagcaaatctagatcagacaaggacatcaatttatgggctagctagttatcaccaccgctggaatctttattatttggacactgaatttgcaaaaggtagaaacattacgacttttgaaattgtcaacaagtaaataaagtatatggcccttaaaaaatatgttaatgaactgtcgagtaaattaggtttcaaagaagagtgtgttaaattcttacgtgattcatgaaatgacttagcccaatctattttgtcttgttcttggcacgtagatggagtaaacggagtgataaatcgaagagcttagaaaaaacacaaatttaaccacatataaatgtaatacacaaatttaaaagaaaagacaataacaacaacattaacaaacatgtaaaaattatacaaacattaaaaaagccatcaaattttggcaaaacaaataatatcaagcttcaacttggtttataaagagagccaagcatcgtaccatctccatagcttcatcacaatctggctcgaaaatatgaaaaacatgatctttctctttcgtctccataatctcaacctttcctttccactcactcttcaccaatctttcgtaatacatcttccctctctcattcaatatatctttctccgccacagtaatcatcactctctcacaccctaaccctccaagatccggtgacccgtccgcaaacggattaatccacgggtcatcggatcctttctcggatgggcacacgaattcccaccatccgtccaccatttgtttcctcgcttcgtctttgatctctgctccgataggttgtgtcccccaaaaatatgggtggatcattccaatgcctttgattttcaaggtttggtcagattgtttggctcgaaatgcgaggtggtgcgagatattagctcccgcgctatctcccactaggaataaactgtccaagtcggcgtagtcgttgatccacggctcgtttatggcttggatattctttagcgcagtccatgagtcttcgtacgctgtaggaagtggatgttctggtgctagtctatgtccaataattgatcaaaaagataatataaaacaattttgattattgttatggtggacacaacaaccaaatcaaaccaaaataactcaaacccaatttctctataactatattaagttttcaaaacccttatgtttttaaaaagagttatcgagtaccacgtcatcactacacgggaggactgtattgcgggtgacttttgagattgtaggattgacttgcataattcatacttggaaggtaaacttgcaaacaagattgatttgaatggttgttttgcagaaaaccaagtttaataaaggatgaaatcaaaccaaagccaaccattggtaatctaaccatattaatcaaaatatttctaaagttaactactaaatatataattaatttaaatatttatattataatttgcattttcaaccaaactcaaatccaaatggaaccaaaattttcaaaccaagctaaaatgatctaataactcggttttatttcgattttaacccgaactaaaccgaaaacaacaaaaatgcctagttgagttttaaattcaatacgttcttgcattcaacattaaacgaatgcgagcggaccatgtaatattgggttaaataagtcaacgtaaaccggattagctttcgttattgacaagacagcgatggcattaaaccaatgcgaccggaccattcaaaattgggtgaaacaagtcaacttaaaccggattaatacctgtaattgacagagacggctatgacgttagcctgattgacaattttgttaagactggtgtggtaagaggggaaggaagtggaggagatgagaaatgcaccgccatgaaaatagagcatgagaggaatcttctgaccgggttgaatcgagaagggtcgatagattcgggcagataaaccggttttcggttcgataatgatatctttagagaaaaccccggttattggatccaaaccgggaggacaaacctcggttcccgctagtctctctaccgttccatcggtgtggacaactaaccatggaagtagctccaacgagacttgcttctttgttgattccatgggagagaaaaagagagtcaagctttgatgtatatgtttggtagaaaattaaaagttgaagagagagccaatataagactttttgtttaaatgatgattttcggtaccagcattgaaataatgatagattgagactaataaaatattcgtgtttaacttgttttgattaggtgactcgagtgatcaacgtgtttgatctttctaactaaaatttaatgatgccaccaaccaatcgaaaactatataatattcatttttttgttttttaggtacaaatataatattcaggtttaattgtgaaattttagcctattaatcaaaagggtaagaaaaaaaaaaaatagtgtagttaaaaggattgaatttggtacctttggggcatgcaaatataggttccccactgtaccacaacataaataacttatcaccttctagatatattattgtaatttctacgagactacagtttcatgagttttatagtctacactcggatatgaatcatacgaggatcactttttgcaaattatatgtatagacacttacaataacatagagtgatggaccacatacaatattcttattatcttggtagttctcaaggaattcatttagatacaatacaatgattttctttagggtttggtgcaaaaaaagctttaaagtcgtttatttttgtaacattactctctatttttgaaaaatgcgaaataatttttcaaagtaaaaaataatatgcaatttaggctttatacatatattataaacgttttttcgttcacatacatttgattttcaaaaatagaaaggtaagttgaacttttcgtctcgagttctttgaattgatatattacttatcaaattttaaaaaatatgagaaaacttaacaatagcaatattatgtattattttttactttataaaattattctgcaaatattgtgaattattttttacttcaaaaaattattttgtattcttttaagatgaaggataaagttataaaaatagacgactacaagaatttttttccacaaatctcctttttattcagatggtcaaacatggtcaaattgatacataatccacagaagttgtagagagattatagatgatggactctttgtatgtcattctgttttttcagacagctaaacgttatttaaaaaataaaaatacaatgcattaaaaacaaccatcctcgacttgtgctcacgcaacgctaccgtcttcatcattttaacctctctcgaccattttaacctctctcgaccctttttgtttttcattttttttaattaattattttcaaactaaccgaacccaatcaactaaatttacccctatttaactcaattttgaccagaaaaccaaaaagttcgattaatttcgataacaaaataaaataataacatggttcttaaacccaacccacacgaagaatcggactgccttttggggccacttggccattgtgtcaaccgggtttgaccacaagtcaattaaaaaaaaattatttaatatatttaatatttagaaaagttatatagtttatattaaataaaaataaaaatagtaataccaagtttaacaaaagtctaacaataataaacaactaaattttaattaaatttgatgaatactaaatcattgtaatattcgatcgtcattttagtctaacaataataatcaattaaaattttatttattatttttaagtccaactaaaatctaaaaccataacagaaatactagagatcattgatgacgaaaataaactaagaaaacatcacgaatttaaaataatgaattttgttttttctctctcacaattctattcattctttaaaagcgggattgtgaagtcttcaccaaatctaaaacattaaatgatgaaaaagttctaaaaataagtgaatatagtttgaaaccctagattctattccaaaatcaaatgaaaattttaaaacccatagccggcctgttttaatcgcttcaccagatcgcaagttaatgaagggtttttttgtggatttttctggttttagattgtcgagtattagttctaaacccaaataggaaaaatgtccgggtagcggattaccatgtcggaccggacggtccggatcaggcgtgaaaacaatgcatgtaatcgtattgtgtctaatatagtatttttgatttgtaataatttgaagaaaaaagagagtgttgttatctttaagtttgcccaaaatctacagtaatgttcgatcatagtctttaaagagagtgttgttatctttaaagttacaactttgtaaaattagcatagtctttaatataaacgtatcttaaacaaaattattaaatgttgaagttagtaacatataactattaattaatgaacaaatatcttttagtgattaacctataaaatctcttgttttcttgtttcatgtcatcaatcttacattcaatactaaaagtattcttacatccataaaaaaaatgacaaaatctctactcatggtaacgctcgtgtctattgtaatgttttacatggctcgtccaattttctcccaagaaattgatccatattcacaggaggtgccaaaagatgtggccatatctccatcttcaaagtttgatatttacgtcgaagctcctggtgaagctccattcgaagaagctgattcacccgcaatggaatatgatagggagcttgctcaccattactcgcataaacagctcgattttcttgaggcttgctctgaaaagccaagctcaaaatgcggaaatgaggttttcaagaacatgttagatgagacagtgccaattacagatgaatgttgtcgtgatatattgaagatcggaaaagattgccatctcggattggttaaactcatattcgccacatatgagtataaaaataaagcatctaaaggcattccaaagagcaaacaaacatggaacgaatgtgtctttagagtagggagcaagattggtgctccggtctcttttgaacagtaaactaatatttatgtgtgttatgtgtctgcgggtttttgtaatttgactattaccattataaaacaactgctaccattttatttttggtaatcaagaagccaaacccttacaatattttacgtttttattcatcattcaaattaatccatccaatataaactaaaaacgcatatgcacactgaaaactttcaaatataacatgatttcgctggggtggtaaaatgttccgaattcaatattcattttcgatctaatcggatatgaagtttaatttatatatatagactttcaaagttgaatttcaaaatattatttctaattttgtattattactcttaaatattttttagtggatatggatatctataaagcacggatcatatgaattttctatcttctatttttttttgtatcttatattaaattatattcaaagaaaaaataacgtttatacaactagtacatcgtgttttcgatggagagattagaaaaacatactaaatcttgatacaaaatgaaaatgaatcaagaacaagctcgagccaaacttggaaagccacatcatatcgcctatcccccatgcatatgattgttgtgatttggttcttaacttgtttatgtatccaactgattaattgagccgaagtgtttggtgattaattatgcagaattttctcctattttcatgtctaattatagaggcctattttgacatatagatcttgacctccggcgacataattcctcatacctatgagctctccggtccaaattacataacccgacccactatttcggatatccttattagcaaacctggtacaattacaatccttagaacacctctccttacattcattcaacccaattgtctggtccacaattggtgtgcttgtctccggcatcctcatcctcttcattagaagaaaaaatccatctccgtggcatacagccgtgacttcctcacacatccctcgaatatatctcccaaatctcaaccagtcacattctttggaacaaagcctttgatacaattacatgttggtgacgttttcatgtcgtaataattgtcacgaccacatatttggtacaaatcgcatttctcggtcggtaaaacgccaaataagttccattatgatgatatcgtatcccatctggatatatgtaataatccttcaggagtcagtgtacatctcatagtgcatgctatggtcggtgactttgaaactgcaagcaacttcctctctattctctatgaagttgttaacaacgtcaaagtagctccagttttgcatcgtcggtatgtagagctgtcaaatggtccgtttatagaccattgggcgtgtccgaacagatagattttttatgggctgattttgtgtagtccataatggacaatggtctcaaaaaatgcccatgcccaataaagctcacgtctagataggaggaccttggacaaccaatttcattaattttattaaaggaactttactcagatgtcatagaaattaagtgtatttacgagaaccatacaaaacttttttatatttctttcatattttctttttttttttgtatacccatcgtgccctactaaacgtcacagaaaaaaacataattacaaagaatgccactgccacgtcagcaaacccacgtcgccatgtcagaaatcactgacgtggattaatgatctcagccgtaaggcgatacaacggtagttacggctgagttatggtatgttgcggctgacttaagacaaatttatttgagttataagaaaacgacggaattatagtataactcagccaataattacggctgatttgtctgagttatgcgataatccagcctacatgacggctgagttaatgaattttgtctgagttatagatttttgagcataatccagacaacgttatggctgagttattagaaaacaactgacttattacctcgacatgactgagttatcttttttcggctggttgggttatgaaggacggcttagttatgagatgttgttacggctgagttattttcgagtgtcataaatcagccgtaaagagttgggttactgaataactcagtcttgtaatggccgactcagttgcaaaagattaattactataatagcatgcagttacgaccgaattattaaacgatacgacagagatatttattatcggttgagttacgacattaaacggctgaattaacttggcgtttttttgttttttaattactgtaatagtattgatgtcgcaactgacttatagctttgtttgatagctgaattatttaggtaaatttacatgttcgtttggtggcttacttgccacctcatcagttcaaaacgacgtcggctgcaatattccatatcagcatcatcaatggaccaaaaaatagggccaaattttttcaactcgtcttcttcacctgcgtttttaataccaccggaacttccaattcctcatcgtcttcctcattcttcttctatttctttcatccttctcccgatatggttgatcaggttacgtatttaacaccgatgaaatagggtgtagagttgtgcagattgatgcggaaacaacgtaggacaaacttgtgaagttggtgctcgatgataaagttagacgaaatgttgcgtctcttattgtttcagagaatatttacatgtcacagctggcttatatgcttaagagaagaagaaaggtttggtcaaattacatgtcacgactgagttatatgttccaaagaagacgtaaggctcggtaaaattacattatggctgagttatatgcttaagggaaggcgaaaggttcggtcaattaaaatgtcacagctgcgtgatatgctcaaaggaagacgaaagatgggtgtaaattatatgttacggttgagttatatgattgaaggaagacgaaaggttcggtaaattacatgtcacgactgagttatcattcaaggaagacgaaaggttgtgtaaattatatgttacggttgagttacatcatgttatagctgagttacatcactttacgactgatttataattcaaatcggaaagcaaatttttttgggggaagacaacaatcaaattaagaaacgtaagaatatgtttgagggatacataggagaaagactaaaccgtatgaatcaaaatattgatagaagtataaatgtctccaaagaggaagactaaacgagagacatgtaaaatcaaagtaaaagagtagatattcttgatttcaactcaaacctttaacgaatcatgtagaattccatagatctcttttatttgggttttgatttatgatgacttgaaattcgacaccaatgaaggatttcggccggaagagacgagataaaccgagaacggcgacgaaattagggtttcgtcgacggaacaagaaaagagagcgaccgttttttttacgaggatgaactgtgaaatgtcgagaaaaaaaggaaaaccgaaagatttaagggaatttttggttccgtgtaacgtggattcggataataacgtgaattagggtaaatgacgtggattagtaacgtggataatgattgttttatttatttatttcttaattgaaaaacgaattaaataatattatttaataaaaactaatcatggatgttaattgtaattacacaaatgctcaaaatatataagtaattaaaaaaagatgtatattattcttggaataaacatacttttctatgatatccgagtaattaattctatcaatattttggtgataaaactatagaaattcattttgctacccaaactatgaaatcgaaaaattgtaatttttcgccaaaaacaaaatatttggttttccaccgatacaattaaatttggattttggcggaaaattgcggaattctgttccctccaaaaccgtaaaattggataattacgttttctactaaaaccgtaaattaaataattgtgttttcccataaaaaaccgaaattgtgtttttccccaatacaacagaatcacgaatttgatggaaaattacagaattgcacttttcggccaaaaccataaaattggattattgcatttttccgtcaaaaccgaaattgtgtcttctgccagtacaataaatttacgattttggccggaaattacggaattacgtttttccgccaaacctaaattgtgtttgtccaccaatacaacaaatcacaaatttggcgataaaattgcggaattgtgtgtttcccgccaaaactgtaaaattgtgtttgcataaaattgtgagttgtgtttttcctaatatcacgatttactttaggggggggggggagggtgtaattatagaaaatcatttatccttcaaaaccataaacaatgtaataataaaataatttattaattttaaatattttataaaataaatataaaaattagaaatataataatttaaaattatttagctgtagtcgaatttaatttataacatagaattaaaatggatgtcaattttagtaattgggcatgctcatatggtccgcggacaaaattggtcatatgcccaataatttgtccatttgttttttgttctagaccatatcccgtccatgggcagctggcccaattgacagctctaacggtatgccactgaacccgaatccattccatggaccggatcggtacaatagaactcatgtagccttgagttccgagtttgaacgataagcctttacttgagggatcataagggattctccaagaacaaaggaaagtctcgtgtcctgttttgagatcccaaccaatcttcatctccgggagtaatgtttccaccggataatcaaagctttgccacaaaaatcggttttgatagttgcttttggagtctctaagcacgaacttgctgttatcgagcagctttgccaccactggagatttcacagttctcgtcagatttgttgaccaaacaggagtaccagaatgatcaagaaggacgaagttaccaaaagagatctttaatattccaatggacttggaaagaggattatttttgttggcaactgttgattccgaaagtcacacaatgaatttgtttaaaggggaaaacaaattcacttaactctcttgttattatatactcaaagactcaatataaaagataaacaaggttgttttgagacagagttagggtttttgctcaagaatgatgtaaaaaattagggtttattttatgaagcattttccaattatgttattatggaggttatggttaagtcgaaacaaattaatcttttagagatcagctaccccgtggagaaatataatccgattcgctcgtaatgatgcacaataaaggtaagatgttgaagactacactaatatagtgacacctcaactgagatagacaaccagagaacatcgaagctccgcttaggaaagaccacaaacaaactggataaagtgcaactaggacggtacctttgctcctcgactaccatcaaaagcgggttgggtaatgagagacaacaaaggaacctatttaggagcaggtcaagtgatataaccctatttttattatttttacctatgttttagatatagattttgagtctttttgttatttctagagtcctttttgagtcttttcaggtattccatggagaaggacaagaatagagataagaagatgttttggagcaaaagctgaagaaaataagccaaaggacgaattcactttcagatcaagtcgagagtgttgattgatacactcttggtgtcgatagacaccagttgcagcccagaaaagtccatgatggtttagagtttgaagatatggaaatttgcccagaagacttttctattttcgttatgtcatgtatatataatttttaaaggtcattgtttagacctaagtcttttgctaagtctcttgagaacaaattgttctagagcactttcataagctattcatcccctattttcagagtttcatcagagatttcaataacaatgaagaaatcttttctaactctctctttattgattttgtttatgctttcttattcatacatgttgtttgtttcatccatcatgtttgagtagtctgcttgttagagttagggtttctcattagagattcatatgatttagtagatcgccccttgctaggttatctataggattcttcatctttaattgttcttaatgctagttctagagtagctaactagaacttgatatcagataatagatatacccaccatatgtatatgttaccataactactatttgatgagcctggtttatagtgtgtaataagaatcggcctatctactaaggtgaacttatcgaactcgtttagcatgcatgtttaagtatagaatttcacggcacatcaccgggaatcttagctctaggcataatgagtttcattgaatatcaacggttattctgtaactagagtttgagtttaagaacggttcgataacaacctagctatttctatatctactaatcatctgtttcctgtgaatatcctaagcctgacgttttattatcttgtcttataacttccaatctgctatttgcttattttactttcttttatttactcattacctatctagcttaatttcgatactttagcctattgtgtgaacaaaagagctttgtggaattagacccttaagtactatcgatgatctcttatttgagatagtggtcttaaggcaaattgaaccatatcaaatttggcgccgtttccaaagttcttgggaatcaccattaggtttagtttacagattttgtctagatttttttttttttgatactcacgcgtttcttgtttttcttcttttcagtgtttcaggtgtatgtctaggcttacaagaagcactaaacagaaaaacctgatcaacttatatgtacttgatttgggaatactataccgcactaaccgcaaaactcagaaattagcaatggctaacagagtaatgagagctcatgagcaaggagttttaagaaatgaagatggacaagcctacaatgtggctggtcagagattggatgatcatagaggacataactgaggaacaagcgcgcctcaacgcacagttggctgctaggaacacagcagggctcggtgtcgagcaacaccaactgggtgtcgaacgacacccgcaggatcataacgaggaagagctcggtgtcgagcgataccaaccacagattcctgccgcaactcatccaccagctatagtacaacgtcgtactcttggggatttcaacatgcccgacctgttctatgccaaccgatcatcgattgtacctccacctttctagaagaacgactatgagctgaagccttgctacttcgcactagtaggccaacaccatttccatggcttatctcacgaacatccaatgaaccatatcaagctttctgaggacctcgtactgagcattaaggctaatggagtctctgaagactacttactgtgcaagctttttcctactcacttgttggggaagctgcttcttggttgaagcaattgaaggctggttcactcactacttggagaagcatcaagatagccttcctgaacaacttctatgatgatgctaagtctgaggagctgcgaaagaagctgtctaccttcactcaaggtctgacagaagcttccaaagcagtctgggttcgtttcaagaaatatcaacgggactacctgcatcatggcttcggtgaggtacaacttctcggtaccttgttcagaggatttgattggagatatcagatggcttgatttagcgagcattggtaacttcaataccaggtatccagcagatgctactgatcatctatttcctgagaataccctaaatctgacgttttattatcttgtcttataacctccaatctgcttattttactttcttttatttactcattatctatctagcttaattttgatattttagcctattgtgtgaacaaaagagctttgtggaagtcgaccctaaagtactatcgacgatctcttatttgagagagtggtcttaaggcatttgaaacatatcatcaagcgaaaggaaaacgaaccaacaatgccttagaaaggggaatttcaagctctaattttcgcaatgcagaactgttggagcaaaggaattattagagtgtgttttgaaggggacaacaaggaagtaacaaaattactcactggacaaaaacttaactttggaatcttcaattggataagggaagcaagaagatggaggtttcgattcacagattgcaaattttcttgttgcaaaagggataataacaagccaacagatcatctagcaaaacactacttaccaattaacacttcttttgttttttcataatttgatacctcatgtaatatcttctatgctacacagcgattttgctatataaagtatagttttcaaaggtactaattcataggatcgtgtcacgtgtcaattcaaacgatcagatgtttacatgtgtcattaaagatttaacttttttattctcttaaaaaaatagaaaatttaaaaaagtaaacaaatttacatatactaatttatatgtctaaatatatagaaacaatttacttttattcaacaaaaagaaaattaacaaattagtttttacatgtgaattggtcatttaagtgtaccacatattaaattttttaaaaagaataaattttcgaatacgtatgttttattctaagaattttaaggcatcatacatcgtatgatggagcgtcttgcatcctttgatgtgttactatacctatgttttattctaagaattttaactcatgtaatcataagtgaaaatagaatattttgagatattatataaagtatagttttcaaaggtactaattcataggatcgtgccacgtgtcaattcaaacgatcagatgtttacatgtgtcattaaagatttaacttttttattctcttaaaaaaatagaaaatttttaaaagtaaacaaatttacatatactaatttatatgtctaaatatatagaaacaatttacttttattcaacaaaaggaaaattaacaaattagtttttacatgtgaattggtcatttaagtgtaccacatattaaatttttaaaaaagaataaatttttgaatacgtatgttttattctaagaattttaaggcatcgtacatcgtatgatggagcgtcttgcatcctttgatgtgttactatacctatgttttattctaagaattttaactcatgtaatcataagtgaaaatagaatattttgagaaaaatagcttataggatttaactttttagttactttattgagactatttttatttattataacttttcaattactttcatatatctaggatatagatttttatttgttataacttttcaattactttcatatatctaggatatagatttgatatgtcataaatattattttgatatgaaacttaaaatgaagtgtgtagaatttaaatcgagtttattatgatgacatagatagttaaattgtgttacaaaattgaatgtttaagatataaatttgtttttcttttctttttagatattaaattaaatatagaataagggtcagttactatttaaaattcaaatatcattgataagattgagtgggtataattaaaataaaatgcataaaatagaaattttgtttaaaacaataattattaaattaaatatcaagaaaaatatattgattactatacaaattcaaatactatcgataaaaatttatttttgtatcttatacccgcctaaataggtgggccttatctagtagtataatacaatgatctattcagtagaaaaaaaagagacaaacccctctatttatacaagattatgacggtttatcatgaaaagttaaacttcctattctttagggcttggatcttcttatttcctgcatctccgagattctcctttgtctaaaaggaaaactttttttttctctgatttaggaagtcggccaggcgacctctttacaccaggttgatcggacgatctcttctttttggcctattaacaagctaaaccagagtaccccggtttgactgaattctcagtttaattcttaattcttctggtttaagccgatattgtcggatgtgctaattcttgcatcaacaattagtcttcccccattttcggaaatttccgaattaaggaagtgaatattggcttatacattaggaagatgcgaattaattataatataattgcgtgtcgttccacattctcggacgcatcaggctgcttttgaaacctgatatcgctggagatttcactgtcctcgtcagattctttgaccgaactagagtaccataatgatcaagaaggacaaggtcagcgtaagagatctttaatgttccaatggatttggaaagaggattgtctctattggcaacccatacataagttctctcagagattgacttgtagcaaatcccatgataccaacgatcaccatttagagagcttgctgtagttttgaagaaacctagctcgaagacgttaccgtgagacacaatggttcggttgcttgagattgttagagtttttgtagatgacaaagtattgatcgagaacacataaaaaatagagctaataagacaacgaagaagaaaaagaatgtgtacgaatggtaatagtttggtgttacgcctctcatcttcataatttggagaagttgtagacagattatagatgatggactctgtgtgtgtcgttctgtttttcaaacacctagactttattttttcaaaaaagaaacacagttcattaaaaacaaccattctctcggcccttgattttgtttctcataaaaaaaaccaattcgtttttaattgtattaaaatttaaaaggtagcctttttattttttattttttattttttataattaattattttaaaactaaccgagccgattcaaccaaatttatcctaatttaactaaattttaaccagaaaactaaaaagttcggttaatttcgataacaaaataaaagaagcaaaaaagtgtaataatttcgataattgtgttgtgtctactatattactttgatttgtaatcatttgaagaaaaaatggagtgttgttatctttaagtttgcccaaaatctatagtaatgtttgatccaagacaaagtttaaagttacaacttgtaaaaatagcatagtgtctaatgtaaacgtatcttaaacataattattaaatgttgaagttagtaacatacaaatattaatgaataaatgtttaatcaattaaataccctttagtgattgtcctataaaatctcttgtttcttgtttcatgtcatcaatcttacatctaaaactaaaagtattcttacatcaaaaaaaacaaagatgacaaagactcttctcatggttacgctcgtgtctatagtaatgttttacatggctcgtccaattttctcccaagaaattgatccatattcgctagaggtgctagaagatgtggccttatcttcatcttcaaagtttaatatttacgttgaagctcccgatgaagctctattcgaagaagctgattcacccgcaatagaatatgacaaggaccggtacaaaatacccgattttattgcggcttgcgctatgaagcaaagctggatatgcttaaatgtggttttcgaaaacatgaaagatgagatgatgccaattataaatgaatgttgtcgtgaaatattgaaaatgggcaaagattgccatttcagattggttgaaggctggtccgccatgtatgtgtatggtaatagtattgcatctaaagacattccatatagcaaacaatcatggaacgaatgtgtccgtagagtagggagcaagtttggtgctccggtctcttttgaacagtaaactaatatatttgtgtgttgatgtgtctatggatttttttaatttgattattaccattataaaacaacaactactattaaattggtaagcaagaagcctaaccgttacaatattttacgtttttattcatcatttgaattaatccatccagcataaactaaaaacgcatatgcaaactaaaaaatttcaaatataacatgatttcgcaggggtggtaaaatgttccgaattcaacattcattttcgatataatcggatagaaaatttaaattatatatatagactttcaaagttggttttcaaaatatttctaattttgtattattattcttaaatattgtttagtggatatggatatctataaagcacggatcatataaatttccgattttctaaaatatatcaagatatccagttttcatatctaataataaaggccttttttgacatatatatctggacctccgtcgacataatttctcatatccatgagctctcagtccaaatcacacaaccgacccaccatttcggatatccttattcgcaaacccggtagagttacaatccttagaacacctctccttacattcattcaacccaattgtcttatccacaattgttgtgcttgtctccggcagcctcatcatcttcatcagaataaaaaccccatctccgtggtagttgtcatgtcgcaataactgtcacgaccacatatttggtacaaatcgcatttcgcggtcggtaaaacgcaaaacaagttccattccgatgatgttgtatcccatctggatatctctaatatataatccttcgggagtcagtgttaatctcacgtagtgcgtgctatggtcggtaactttgaaattgtaagcaacttcctctctattgtctatgaagttgttaacaacgtcagagtagctcctgttttgcatcgtcggtatgccactaaacccaactccattccatggaccggattggtacaatagaaactctttcttgtaaagataaaactcatgtagccttgagttccgagtttgaacgagaagcctccgcttaagggagtctccaaaaactgaggaaagtctcgtatcctgttttgagatcccgaccaatcttcatctctgggagtaatgtgtccaccggataatcaaagctttgccacaagaatcggttttgatagttgattttggagtctcgaagcacgaagttgccgttatcgagcagctctgccaccactggagattttaccgttctcgtcagattctttgaccaaacaggagtacgagaatgatcttagcgtaagagatctttaatgttccaatggatttggaaagaggattgtctctgttggcaacccatccataagttctctcagagattgacttgtaccaaatcccaagataccaaccatatccatttcgagagcttgctgtggttttgaagaaacctagctagaagacgttaccgggagacacaatagttcggttgcttgagattgtcagagtttctgtacatgacaaagtattgatagggagaaacaattgattgtcgcccccaaaattttgggaattttttctttacaaaaaagcccccaattttttttttcccttttagaaattttttaggccccccaaattttagggctgacagtgagtattgttcgagaacacataaagaaacagagctaataagacatcgacgaagaagaagaaagtgtaagaacggtaatagtttggtgttacgcctctcatcttcacgattttctttctttttttggtaggcgtacgactctctttcttatgcttttctttgtttcttaaaacctatatttatagatttcttcacatgttttttttcttttgaatttaatattaaattatattcaagaaaaaataaacatgtttacatcaaagtgcatactgtttttaatttaaatcatgataggaagaactcatagattaaaactgttgtcatgattgaaaccaaaattgtatgcctcctgcgtactttgagtcccctccactctgaatggtgcttagcctgctgcgaatgtttttgtcgatcatttttacaagtctcataattgttgagtgatcttcactgtgtttcctgttatttcgctctctccaaatagagtgaatggcattctgaaaaatgtaccgaaggatgagacactttgttttgccaagatcatttccttgtatcaacttgaggatgtctctccagctagctgtgaagtcggtggtgagaatcccctttgctagttcccgccacacctgaaaagaaaagggacataagaagaacagatgttcccaagtctccataggatcttggcaaaagatgcaacttgaatcagcttgtctattccacttgagcatccgagctccggttgttactctgttttttgcgactaaccaagtgatgaaggagtattttggagtcaagtaggggaaccagattcctttgtaatcctccatcaatggcctagtgttacgtatctgcatccacgtttctttcgaattaaaaacgtttcggtgatggtcatttctccctttccatagcccgatatcagtctcatcattttgttgtgcaggtttctggcttttgatagcgttttcaaccgtatttaagaggtcctgcctatgtttctttcttcgattcatggacattacctcccccacagttgcagtaactcagattcccaagtcaatacatcctcttatcccaagtttttcatatagacagcctatattactccattcatcaaaccaaaatgaggtcgtttctccatttttgacctctactctatagaactgttgtgctatccctctatattccatatccaagaaccgcaagttgtagtgtcttttactgccgagaaggagccttttcttatgaaatatttctttacccattcaacccacaaagatcctttagccgacagtatacgccatatcaactttaatacacttactttgtttgcttcttcaatcgaccgcagccctagtccaccttcattctttggtgtgcagacctcagtccatgccacttttacctttcaagggttcatcgatggtcttgaccacagagaacttgaacacagtttatctatttcttgaaagcatgctttgggcagccggaaagcagctatccaaaaatttgtaagactgaagatcaacaaaaatttcttcacatgttgattttcaaatttggaaaactctatacaattgtttctagcagacaagataaatgtaaattttccacgttctatgacttttcagtacctcattgattcacttcaacagactactgtcatcattagtcgataacgtcaccatgtgaaattaatttgctcgtgcaacataacatatgttgttcaacaagtatatttattcatccatgatcctcgtcccaagaaagtcatgctatggcacttgtaaatgcatccaacgttacgttcgatgtattttaatctcctcgatcatggccgtgctatctttttttattatttgttttggccatgcaaaaatattgctacttcatttttgtaattttatcacatatataaatgtttgaactatgaaattctattaatttataaaagtattaatttatcgataaattaataattattaatttgtagagattttagactaattttgtaatttaaaaaaaaatattatgtctgaattttttcttcttctttataatcattatatttttaactttacgatggtaacgttaaacctcaaataataataaattattaactttagaaaataaaaaaaagaacgttttcgatgtagtaaaaagatattaaataaactttaccaagaattaatataaataaaaataaaaatattagcaaattcatatttcactatttttcttccgtataacatatatatatttaaaaaaacttttacaattattaatttatgatattaatgagaccatatatttacataaaattttcaaaaatttattatttaattaatatatcgatttgtgttattttttacattgatcttaactcttatacgataatctgaaaacaatttaggctcttattggtaacacacataatgcagaaaatttgccaataaaaaaaatctgcataattgtattagaaaacgcaaaaacgtaagatttgtatttttgttttaagtaaaaattcattatgccaaaaagtgtgtatataattatttatttgcataatataatcttattattctatgcatacaaatattagcaattgtaaaaaaaaaagtatcatagtttacacaaaattatatcattagtaatacaaaaaaacattttcataactttttaataaattttaattatcttacatttttagtatcgaaaattactcaaatatactaatttgttttaaacattattttttattaagtttatatatatatatatatatctacatatatattgttaatataatattttttttttaacaacttcaactttattaaattgtataaggttgatacaaataagaaagtaagaaacgaggagggacaataaagaactgatacagagtagtagtagacagaacgtattgagccatcttatctgcagcactatttcgttcacgattgacatggagtagagatacgttggatagtttggccatccaatgacgaatatcgtaaagaagagcccctatcagagaatgatcatcaccattattgatagttgctataagttcttggttgtctccatcaaaacaaacattttttattccacaagcccaaactacttgaaggacatgtaacaacccggtagcttccgcctgtaaaggtgaattagtcgatggtagttttcaacagcctgtaattaaaacctttccttcatcgtcccttatcaaccatcccgtatttgtaaaggatcgtcccagcataaagccactgtcaaaattacacttcacccatcctcttggtggtggtcgccattgagaacctctgtcatgaaccgtattcttgtttgtttgactacctcttgtgccttcagtataactgtttgcttccagccattcatttgcctcgtgtcgtcctatgtgttcttcggtttgtggcagtctcatgatcttcttgaaatatttatttgtcattttgcaaaatatatccaattaatatattttaaaattagtttcattcgacgattttttagtttgcaaattttcattctgcgaaatttttattctacaatttatgtcattatgctattatgcaattttagcaatcggaaccttaaggaaaaaaaccgacaagcgaaccgttctgtatgtatttcggttattttcagccagccctatttatttggttaagcttagattaaaaagtttcggtttggttcaatttgatatggtttggaggtcaacaacaaaatcaacgaactgaataaagcgatcgcgttggttctcttcttcaaaacaagctctctctgtccctctctgtctctctctttgggtaatcggaaaaatcagaaaaatgggaaccctaggacgagcgattcacactgtgggtaatcggattcgtggaactgcccaagcccaagctcgcgttggttctcttcttcaaggaagccaccacatcgagaaacatcgtaagcttccacttgcttcgctctattgaaccctagatccaattctgtatctctcatttgtatcaataatttccttttgattcgagaaatttgtagtttagattgaaaactttgatttgagaaatttgtggtttgttttcagtgtcgaggcatcggacgttgattactgtggctccgaacgcttctgtgattggtgatgttcagatcaataaaggctcgttcatttcgtatgcaagtgtttctcgtggtgagcctcctgatttctttacgaatgcattttgtagatacattgattaggtgttttgagaggtctatttgtgcgtgcacttcgtatttgactgtaaaaatacgcagatttgcagtatcctcgtgcaatgggaatgggacaggtccggagatttagcgaagatgtttctcacatgcctgaaatggaagactctgatgttctgaatgcattcaaagacttgatggctgcagattgggctgagcttccttctgctgttgttaaagatgctaaaaccgcgatatcgaaaaacacagatgacaaggcagggcaagaggctttgaaaaatgtgttccgagcagctgaagctgtagaggaatttggtgggattctcacttcgattaagatggaaatcgatgatagcattggaatgagtggggaggtttgtttgtttgtttccttcactaaaccattttcttgatttctggttgtttgatgttttagttgtattgtgtgcagggtgtgaagcctttaccaaatgatataaccgatgcgctgcgtactgcttatcagaggtatgctgagtatctagactcctttgaacctgaagaagtctacttgaagaagaaggttgagatggagttggggactaagatgatccacttgaagatgagatgcagcgggcttggttctgaatggggaaaggtaatcaaatctgatctatactctcaaaacacgtactctgttgatttgcatctttgacagcatcatataagctagaataagcctgattaaagtatgagtttgcataattatttacgatttcaacttgtcctccaaagtctcactcgtactatatgtgatctttttttctcaaccttatgcatcttttaggctagctatccgaatgaaatcatatagaatttggcagaaactagtgttttcatttagacgaaaccactgaaccagtagttgtcttgctaacgctttgttttaatatttttgtaggttactgttcttggaacctcaggactctcgggatcttacgtggagcaaagggcctaaaacaaaaagagaagatctagaattacgtgcgaagcttgttatgttgttattgcgttattttgtcttagcacataataaaggtcaatctgaccaaaagacatatcaggtgagtctgttcattgtttcctccaaatgaagctttaaaatttagagcttaacaccaattgaaaaataaactcacatgaatttgtgttcatttgttactgtttccttttatgagagatcttttgtttataatgattcaatattttgagctacctttttgtcaaacaaaaggaactggagtaactcttgtaggcttcctccaagaccatgactctgcaggtgactttggaagcggtggaagcaacgcagcttttcgtcccaatccaaatggccatccttggcaatgacagaactcttgaatcactgatcctttcttaatttcattaacgtaatgcatcttccattgattctccagctctaaacctttcaagcttgaactccttgagaactcagttttcgctgtcatgtatccttctatgctgatatcactcatgcaacattccgaaaaactgcttcttaccgaacagaattcgttttcgatgtcatattcttttacgaatttgtaagttagcccctccattcctgtccttcgcttcttccttagtttttccatcgcccgacttctgatctcgaaaacaacaacctgaaatcaacaatcacaaaacgaaaggttgtgtaattcgtgtaattcgtgttgtcgaagaatagttatagaagaaagcaaaaatgaaaaacaaaggcaaatgaatgagttttctagttacttcatggtcgtagtcaaaatccccgataggcttgttatcatcatcggcttcgtgatcagaaagtgtaacttttctgcctttgcatctgtaacaataagtgatagcatctctcacccctgtggcaacgtcgtcaccgcaaaataccattctcagctgcaaattttatttctaaactcaatgatttgtaatagaatacaaatgagtgaaaggttgaaatctctagataatttctgagtttaggatttatagacaaaactgagctgcacaatgacagtttatctaacatcacttgtgttcttttcaatgcacgcaacaccactttcgttttcatacctttctactgtttattatctgatgaacaattaaagaaatattacgaccattgaccaagattagattctgaaagtacaaaatcatcctaattaggcttccggatattaagacaaatcagggttaagtaaatagaaaacaactttacgaattc

SEQ ID NO: 81 - DNA, 102077 bp, Arabidopsis thaliana
gaattcttgaggcagctattgaagcagcagcaactgtagtcatcaatctgaaggatagtttgaacgaatgggatggaaaagtaggtgatggggattgtggatcaacagtaagtcctgtttttcaaatgttcgttttgcatttctaaaatatcttatgcactcatcaccattcacagatgtgcagaggtgcaacagctattctggaggacatgaagaagtagtgagtcacttcactctgaacacccattttacctcttcttctcctctgtttagcttgattgtttacttacaatgtataccctctttttctcgcttttatagttatccgctcaacgatgctgcggaaacagtgagtgagattggttcatcgattagaagagtcatggggggaacaagtggaataatgtaaatcgacgcagttaattttaacaattttctttccataaaattgatcatgcatttggcatttactgatgtaagacatgacactgtctcatatgaaaccagttacaatctcctctgtaaggcagcatatgcggagttaaaagctaacagtcaatcagaaaccacttccaaacactgtaagatatacgttgcttgcattgtcgttaattattccaaaaggcacatcttggcctatgaatctgatttcttcttgtaatcagggtctgaagcactcaagtcatcaatctctgctgtcagtaaatatggtggagcaactgccggttatagaacgatgttagatgcgctcatccccgcttcaaaagtccttgaggaggtgactgatcaataggttactttttgttattaaagattgatatttgttaagtagtaatgtgccttgctttgcttctgagcagaagctgagtgttggggaggaccctattgctgcttttgttctgtctgctgaagctgcgaccgcaggagctgaatctaccattcatatgaaagcacaggtgagctttaatgactactagttaatagcaatcactgacatcacaattatctgttggttgtttgttttttgtttctttttgatgtgacggattatgattggagggtaggccgggagatcaagctatgtatcagctgagatttttgcatcaattcctgatccaggagcaatggctgcagcggcatggtacagcgccgctgcaagagccgtgaaagagcagaggcagaggttttgaatctgatggactaggctctgtaagaggttataacgagctttactgatttgataactgcctctgggctttgttgtctatatgtatctagttctaatgtttctgagttctgactctgtttatatacaaatgacaatgggattcttgtgaaatgcttcccctgtttatatgcaactgagtgttttcctgcacatttgttaaaacaatttcatcaatattgggtggataaaacccttagcctaacaaaattttaaaatgattcgattgtaatgaataatccaaaccatgtacatacaaatcgaattgtgaactgatcaaacctgaagttaatgcttgttttggaagtaagcttttgaagatttgtttttttgtttgggcaaaatgtttttgaagatttgtttcctaaaattgtagtaaaatctactaatatttttacacctagaatttttggaaccaaatcttcaaatattttctactcaaattattaaaatggactataaaaagatatgaagagtagcttcaacttcaccacttgagtaaaacaaaacaaataattaactcaacattagcttggagaatgaagagcatttccttaagatttatgttattcgtttctcttcttatcgtcgtctatcgtaagtatactctcttttcattttgcagtttgatacattgaaacatatatgagaatactatttgaaaaatccgagaatgaaaatttatttgttcaagttccatgttttaaatgtgtcataagttgatatgagaatgaaatattttaccaaaaataaaaagagacaataaaataaaatcgttctaaaatgtttatttacaaataactctattttcaatatagaaaaggttatatacaaaaaaatcaaattcaaaaggtatcgtatattctttaaaagttgtttttcttttataacaccaaactagattttaactcgcggtataccgcggaacgatttattttgtaaaagtaatatatattaaaacttgcaaattttatttttataaaatatttatattttacagtttataattgttgttaagtaacgctataccacgaatcaatgagacaattgttaaaaaactgaattttaacccctattaaaacagcatattaataatattttaaaattttttaaatattgattcaaatacatccaccatataacccaattccaaaataaaatccgttctataatttctttacccgtcccgtgataattttaaagtaataattttaaaattttaagaattattttttatatataaaagttttgcaaattgtatcattctctaatacatttatattttatagtttaattttatatatagtaacattatacataccacataacatttttggttttatataatcttttctaaatttggatgatttgatatgtttaatatcagtggtcttaaaaaataataaattaaagatttaacccgtattgaaacggtggattaattatattttacttttttattaatgtttattcaaaaacccgtccctccaaatctgtcttaccaaaaagccatttattttattaatgacatgactatgaattataatctaaacattttagctaataacataggagtgcactatatttatttattacgggaatataccttataacccgaatgcacttttacctaaatccaccaaaaaaaagtcttgtaaaaatattatagagataataaacgatagtcggttttgataggtataagattagcaaatatattagttagcttttattagttaaagaatacaaattaaaaaggtatattacactttattcaaatatagtatcaaaacttatataacacagagatttgataattttttaattgttgaatactttttttatgctaatttttatgtgattaagatttaattgatttcgtatataaaattattaaattgttttacgaacttatttgtttataatttggtaacagatagatattcgaatattcagtatattttgcttcagtttaggaaatctttgatgacccgtttttagatccaataagccctataatctagatattaacctgcagtataccgcatgtacgcttatattttagttaaactaaaaacttttactgtaaagatgatttaaaaatatatgatattattttatttgtttataaatgtatagtaaactgtgagttgtatatgttttgttgatattatctatattgtttagtgtttaagattatacatttatagtttgattgttaatttaagagttttacctgtagtataccatcttgtattaatatcgatctaaacccgtaaattataggattttccaccttgtattaaaaattgaatcacatcatacacataaaaaaatctaatatgttattaattattgtagtatataagattataaattttcaatataatatgtatgaaattgaatataaatatttcaaattatgacctgttactcagtagaaagttttcttaaatctatttttcacccgttataatatttttttatgtattgaacaatttatattcgtttttaaaaattcaaattatggcatatgcgaaaaatctaattctttttttataatgatgattttattttttcgaaaaaatagaatcatataaagatgagaagtgaactataataattaataaaaaattaatatgataatttagatatcaaatctactttgttgattttaattggttattttttcggaaattaataatgtattttgtttttctaattaaattaaattaattgaaatttatatatcaaatcttatatgttaattttgattggttattatttttggaaattaataatgtatttcgttttttaattaaatttaattaattaaattagtatttgactttttaactcttaaagagataaattaatttactctttaaatttttatttctaatggcatacctatgtaattacttacaaaaattaaggttatatttaaaatatacttcccaaataatatagtgggatgggatcctttgttttgtttaaaagtgatctttagaattagcctaagaaaataaaaatgtaagaaaaaacaaatgattggaaactaatcttataaatcattttgttctttatgacaaatcttgttaaactaacattgcttatacatgtgaaggacaagatctagtggaagccaagtgccaaagaaacgatgagtgccatcttctgccttgtgccaaaggtctagcatattgcaacaatggaacttgtgagtgtactcctcctcctaagtcatacaccgtggaaaaatctacaaacataccatgtaccacaaccaatgagtgtagacagaaaaaatgtagagacatatattgtcacataaccaataagtgtatatgttgtctcccaccaactgcaatacttttatgcgtagatcgaagatgtgagtgtatccatgatatataagtggtgtaaacttatatattggatatgaaatttcaaaagacattaattatgaaattgttattgtttttgaataatgaacttagttatactattgaagtacttggtacttaaccaatttttatcaatttggcaaaattgaccaacttttttttattgtaactctaatccaaaaatgggaaaatatcgttttatacttgaacattaaaaaaatagttattcaatacgtggactttgctaacgatggttatcggattcgttaacgccagttaacatcttgggaattttggtctggtcaatatttggttttgtgttaaataccgggtcaacgtttttatcatgttttatttgaccgacctaaaagttcacgtattaaatgatcattttttaaaaattcatgtataaaaaaatatttttctctgccgaaaattagcaaactttaaccaatatttcatcaaaataacataactaaccgaaattcgattaccggtaaaactgaaaaatgatttatcataaaagtattgatccgaattacccaaaccgacccgacccgagtatgaatgggccgaggcccataaaagaggaatatttgagagtcaacaactgaagaagaaagaagcaatgagaggacgaagcttgacactctcaagagtaaagctcgagcttgcgagaagaagcatgtctgcaacatccgtaccttcaatggcggattttctcaccaaaaaaccttactctcctccttcttgggcttctcatcttcgtccgcttccttctcacactttctccctcgctcacgtacgttaattttcaattttctctatgtttcaattctccttctccattacttttcactgatcatcttcttcttcttcttcttcagcttcctactccgatccatcgatggaatcttcctggtcttcctaatggcacagaactctggatcaagcgagatgatttcaccggaatggaattgagtggaaacaaagtacgaaaactcgaattcttaatggcggaagctgttgatcaacacgctgatactgtaatcactatcggcggtattcagagcaatcattgtcgtgctacagccactgcatctaactatcttaatctcaattctcatcttattctccgtacttccaaggtctcgcttctgattcttcaccttacatcgattcacttaccttttcgtgaattcatgtttatgtgtgtgtggtgtgtttgcagcttcttgctgatgaagatcctggattggttgggaatctccttgtcgagcgtctcgttggagctaatgttcatctaatctctaaagaagagtattcttccattgggagtgaggttaagtccgttgcattaagttttacttactaagaacaagaaatgagtagtttttacttagcctgatattgttgatcaaaacttgttcttgtgaatggtaggctcttactaatgctctgaaagagaaactggaaaaagaaggaaagaaaccctatgttattccagtcggtggatcgaactctttgggaacttggtgagactgtgttctcatagatactgttttgatatagctaagtgcagtaaccggtttgttgttattattacttgttttagattgttgagaccatttaaagctgaattccctgcaatgatcgtctaggggttatatagaagcagcaagggaaattgaggagcagctgaattatagacccgatgacctgaaatttgatgatattgtggtagcatgtggcaggttctgcttttgctttccttgtaattttttcttgccttttacttttgtttgcttcactctcatctaagttttcttttggattgctagtggtggtacaattgctggtatttcattggggtcttggttgggagctctaaaagccaaggtatattctttaaattttagttggttcactcactgtgaagttgacagatggctcagttaagtttccattcattgtacaggttcatgctttctcggtttgcgatgatcctgattacttctatgactttgtccaagggcttctggatggacttcacgctggtgttaactctcgtgatatcgtcaacatccacaatgtgagtttcatgacttctctgtttatgtgttgtctatttcgcattggtgatttctcttggctccttcgcaaataccactaggtggaaaattgtgatacaagctttttctctttaagcacacaggttctggtattgattctcgtgttctttttgcaggccaaaggaaaaggatatgccatgaacacgtcagaggagcttgagtttgtaaagaaagtagcaagttcaactggtgttattcttgatccggtttacaggtatgttagtctttctaattcttccttgttcctagtaatgtttatggtcgtgactaccccttgaatctctcaaagtagtgagattgacatttgggttttcgagtgtttatctagtgggaaagctgcgtatggtttgataaatgagatcaccaaagatcccaaatgttgggagggaaggaagatattgttcatacacactggtgggcttcttgggttgtatgataaggttgatcaaatggcatctctgatgggtaattggtcccggatggatgtttcagaatccgttccaagaaaagatggtgttgggaaaatgttctagcacaacaaaatctgatttgtaataatcctgtgaaaataagacagattgaacaatttgtgcatttggcagtgaataaacacatctctgttttctattctgatgtattatgttcataggcttgggacgattacgataaataaatggtgtgtccacactctctttgtctgctatcgtttttcttcttctgttcaacattgtcagctgaagtcaagcaatactgcttctctacctaagcatcagaactccgacgaacaactcatatgtttccagatatgtctgtgttgtgttaaccaggttcttgtcacttgtttttcatggttcctctttcagttgtttcatgttcaagtgggtataatccatgtgtttgcatgttttgaaacagactcaagatgccatacaggtctgtgctcagatacgctgcttattgagtcaacacagtttccctgatttgacaaactaaactcatcatggattctgcaaatgaatagcttcaggttcttttctttccttccattgtaataccatccatagtgcctgcttccacatcctaattctctcattgtttcccaattttatgcttttccagaatccgtgtgtaaaacataatagctcactttggtccatcagagtctacattgctaactggctttagcttttttaaggaaatgaaaacagaaaagaagatcctaatggtcaagtctaagagtctagtttcatgtttcaaccattgcatttgctttcgatgttagtcagagtatacaaagatccagacatctcaaacttgtatgtgctaatcagtaaggttagattttcgatgtatttgaggcatggtaattgcaaccaaccactccagggtccaaagagtcttgagcaattaaatttgtattcatttttcttactggtcatatttggatcatatttcaattctccaaagtaaaagttaaattcacttagagcaatgcacatggctgaaattgacatgtataatcattgatgttttttcttcttcctttgatacataacagaatatttctgttccgtaaaataactgagtcataaccaagaactagttagtaatagtcaatatctaacctttggttttgtttcgtctttctgctgcattaaattaaactgtccaatacacaaaatcgaatcatcaaacagtccaagaattgttacaatattgagtgtaaatgatctattattgggagctcgcggttttgaaactcgtatttaaaaaaaaatgacctatgagaatcaagatagtacttagtactaacactgatttacatcaatcatatcgtttctgcatcttgatatcttctactcctaatatcaagatattattatttatatgggccctagaaatgaaatttgtctgaaaacaaaagaaatatgtttgtagaaaacttaactatttctctaaatagtccataggttcattattgttttatttgtaattattcattttcattgatatctatcgtcgtgtcaacatgatgtatcgtccgtatacgaatactcaattaccaaaacaatgataagaattcaaatgggttttctatcaagtagctttctgttgagtataccaatttgaggtaaagaccaaagtaaccagtgaaaaactaaagagccgtcaaatcaatttagatgaagaaaaagtaacattgaatactactattaaaacaaacaaatcattccacgtgatgactccaccacattcccaaagtttagaaaaattatcaaaccctgtcataaagtaacacttgcctaaaatcgcaggtctttttttctacgaaaacgaaagagagttttgtaaagtaaattcatatgatctgcccccaccaattcatcatttatctctttttttttaccgcttgttaaaactcataatcaatgcatcccttgaccttagaacaaaacctgatgagtcccacacacatgtcacttcgctgtccatgaagttttttgaccggaggtcaaagtaatttaattgacttgatgttaagaaatgatatgtgcagagaatcgaatgtttctttgtgtgtgtggtgagtgtgtgatggatataattattggaattgaaatgtaatttatgtaaacttctagatttcgaaggcataataactctctaaaataattgagaattggataatatccgatgattaagatagcatttacttacaagtaatgttttcgatagaattaatggtcactatccaaattccaaaccatacgctaatggcttccaaaggaaaactaagactttatggagttttacataaagtcttcgttcaaacatcattttcataagtcttttgtaactttcttcctcttaacggcttcctacaatatctcgatttagaactccaatcaacatctaatattttgtctacaactttatgttttttcaccttactatatgatctagacaatcttttgttaggtaaagtgtctagatattctttcacctaattaacacggaaacgtaaacttgtacaaaaacatctattgattatagaagagaaccgagccgtgagagtcgtttctcgtcaagaccgcaccaatcgactcaaacatgagccaaactgtacgtagttcttataaggaacacaaacctccatcgtaaaccaacgttttcgatcggttctagctagactcgccatgcatgcatgtgcgttggtgcccgtaattacgtacaccaatcttgattgatatcaatgcttatatgccgttaatcttcatctcgactctcgaggtagtagtacttgacgagttctaagttcttcttccgttatgagaaatcatatataagttcttctatacatctcgcttgattattataatctttcgccttttaatttctcgtttgattattataattaatgtttataatgaaaagaatcattatttcccaaagcaaacgaatcattttgagatagacttacagttatcacaaaaagaaatctaaacgttttccccaagatttagcctttcgtcagcatgtaattactcgtgacatattctctagctcatatttcttcttcacgcacgagcaaccaattttgttatatatgtataaatcatctttgacaattatatataatacagatttgttacgagtatatgaatttttttgaggtacagaagcaaatcaactagtgaaactaaattaaagagctaaccatcaaataaagtaaattgaattaaacaaacaaatcataccacgtgatgacagccaccacattcctaaagttagaaaattggcaaacctgtaaaaaagcatcacttccccgaaatcgcaggtcatatttctatgaaaacgaaagagagttatctatatagtaaatggctatattcatatttgccccaccacccatgacccatctcagttaataaatagttcttctattcacctctatactataatcattcactttatcttatatatagtctataaaactaaacgtaattcgcatgattttgcctttcgttgcatgaaaaatcctccttgacaatgtacaattcgttagtactactcgatcagtcgccttgactcacgacattttctctagccactgttttatcttcacacacaagtaccaattttaaactgttgtacttaactgtataacatcctttatacgtaacgtaagccaaaaattatgatctaatcagttactacagattaataataagattaataacggccggtctactaattttgaacacttgtgcatgcattatctctcgttgaaatagtaaattaatgcaactaactttacaagattaatcgaggtatattatagtctaaaacaaatatttaaattaatgcaactaactcttgaagattaatcgaggtaacgcatcacactaatcatatttaatcggataatacatatactgttagtaaaataaattaaaaaagatttggtagataaacgacaaaaatgtttttcgtcttgttgttttcgagaagcttctttttccggattaaaaaaacattatgcaattccacgtcatcagcgcattacaaacaatgaaagactacacacgaccttgggtcagcattccaaagacccaaccctgactcgccacgtcgacatatgccagctattaatgaagagggtaattccgtaacttactctaaccacagaacccttgaatttaaagtgtagcagtaaaatctcatttctttgagttatctcgtttgttcggagttagagagagagagaaagatatagagagaacacagagaggcgagagcgacgtagggttggtgtttcgtacggattttctcggtcaatcttagtttctccggcgagagattgcttttcaggtaaaaatggcggcggttttggtgtttgttcttcacttaatctgtgttcgatctgcgtatgaactcgatttttccactcgattgggtggatccgcttcgttttggtgttatggttcactgatagtgttgtatgtttagttgatctttgcgatttcggatctattagcttcgtagctgttttggtgtgtgtgttcgtcttcgaagatatttaggttttttttttttgttgcttcaaatttcttactgtttcgtgcttgttttcttacttcgttttctgtttaggtctttgattgtttcttactaggttttctatgtttgctttgggctgttgaatttggttttctatctctctagctaatcactggttttcgtgcttctgagtcgtttgtttttgaagctagttagggttttcttctgttgcttctatatttcgatagttttgtgcttgttttcaatgtttgcttcttattttcaaggataattttaaaatgacccactgtttttgggtggttgtgttattttcacaggaatcatcatggtgagaaagagaagaacggatgctccatctgaaggaggtgaaggctctgggtctcgtgaagctggtccagtctcaggtggtggacgtggttcacagcgaggtggtttccagcagggaggaggacaacaccaaggtggaaggggttatactcctcaacctcaacagggaggtcgtggtggtcgtggatatgggcaaccaccacaacagcaacaacagtatggaggaccacaagagtaccaaggaagaggaagaggaggacctcctcatcaaggaggtcgaggagggtatggcggtggccgtggaggtggaccttcttctggaccaccgcagagacaatcagttcccgagctgcatcaagctacctcacctacttatcaagcggtgtcttctcagcctacactgtctgaggtgagtcctacccaggtaccagaacctactgttctggctcagcaatttgaacaactctctgttgaacaaggagctcccagtcaggcaatccagcctataccttcttctagcaaggctttcaagtttccaatgaggcctggtaaaggacagagtggaaagcgttgcattgtgaaggctaaccatttctttgctgaactgcctgataaggatttgcaccattatgatgtgagttttgtgttcccttagtattagctaccatacatctaatgtctatttataaatttacctgaccaactgtgttctttctgttaggttaccattactccggaagttacatcaaggggtgtcaatcgtgctgtgatgaaacaacttgttgataattatcgtgattctcaccttggaagtcgtcttccagcgtatgatggtcgaaaaagtctttacactgctggtccacttccctttaactccaaggagttcagaatcaatcttcttgacgaagaagtaggggctggaggtcaaaggtctagttcttatggtttcttgttgatttttttaataaggaagtttcagaataataacatctttcctattttacagacgagaaagggaatttaaagttgtgatcaagctagttgcacgtgctgatctgcatcacctaggaatgtttttggaggggaaacaatcagatgccccacaggaagctctgcaggttcttgacattgttcttcgtgagctgccgacctctaggtactggttactcatcctatggatgtttgcttctttactaccatgcttgtaagtctcagctggtttagttttgctaacatgttagaatcaggtatattccggtgggccggtccttttattcccctgatataggaaaaaaacaatcattgggggatggcttggagagctggcgtggattctaccaaagcattcgtcctacacagatgggcttatcactcaatattggtgtgatggcttgctgtattacattcaataatttttgatatctggttctccttgaatgtttaactcatggttgtgctgcaattttgtctgttttgtagatatgtcatcgacagccttcatagaggcaaaccctgtgattcagtttgtctgtgatttgcttaaccgggatatttcttctcgacctttatctgatgctgatcgtgttaaggtatgaatcaattgtcattttctgtagtaagtgaaatgttgtattaatctactcttctttgcttagtgacttggaatcttcttctgtcaacagataaaaaaggctcttagaggtgtcaaagttgaagtgactcatcgaggaaacatgcgccggaagtaccgcatttccggtttgactgctgtggccactcgggaattgacgtgcgtatttgttttagatttactactcttatttcgcgaatgttgaacttgatgaaattaatttttactctctgtttttatccttttcagattcccagtagatgaaagaaatactcagaaatctgttgtagaatacttccacgaaacatatggttttcgcattcagcacactcaactaccatgcttgcaagttgggaattctaataggcctaattacttaccaatggaggtaactttgaaatacgtcatcaggttttattagctcaccagtacttccgattctaatgtgttgctgcacaggtatgcaagattgttgaaggccagcggtattccaaaagattgaatgagagacagatcactgctttgctgaaggttacctgtcagcgcccgatagatcgagaaaaagatatcttacaggtatgtttctttattttcgataactttgttttccttcacttgaatcaagagtatctttttgtccgcctatcttgatagtcgttttaaataatgtatgctggtgataaagcctcattgtggaatagatcattgtaaaatctgtttattcttacttggttgcatgtgtttacttgaagtaagtgattttctcaattcatatctaacttgtttttaatcatataaacttgtggctgaaaggatgttatggaatgaatggcttaaaaacctgtttcttctttacttggatgcatatgtttgcttgaagagagtgatttaccttgagatgatgcctttacttcataaatagtgaggcagattaccatcttcagagttgtgctcttaatttagcagcgcgtgtgtcttctggctgctgttgttgaaaactcaattgtttattgctaacattatacaatattttctgatttctagacggtgcaactcaatgattatgctaaagataattatgctcaagagtttggcatcaaaataagtacttctctggcttctgttgaggctcgtatactgcctcctccatgggtatagtaatcgttcccattgtctctttgctattacactttttctctgtatcttaatgactcaaattagggttccaatctgattttaatgttctgcagcttaagtaccacgagtctggaagggaagggacttgtctgccacaagttggtcaatggaacatgatgaataaggtaactagacgaaaatgttcctggttttcaactatgcacttacatgtttcttgcttgtgttacctatatatacctatgctgtcatttttatgtgaatattttgtaaatcatggctgagctgtatatttccaggtaattggcaagaaaattgtttatttatttgtctgttatgagacatattactctaaaatgctattctcttgatatgagtatgggtgtggcacttgactagttgcagagagtattttgttcatgtagctatgtagatacacactgaatttgtctttgttattttttgaaagtgatcacaacgttttctgttgtctggctaatatgagtcttctctgcagaaaatgatcaatggtggaacggtgaataattggatctgcatcaacttttctaggcaagtgcaggacaatctagcgcgtacattttgtcaggaacttgctcaaatgtgttacgtatctggcatggtgagtctttggaagcacaaacttgatcagtttattaacctttcctacactgattccttccctttaattttttatttcttacctgcaggcatttaatccggaaccagtcctcccaccagtcagtgctcgccctgagcaagtagagaaggtcttgaagactagatatcatgatgccacatcaaaactctcccaaggaaaagaaattgatctgcttattgtcattctgcccgataataatggatcattatacggtatgagccatggtctcggatgtttcattgtctacttctgcttaggaacacactctcaacttattttccttaataatatccattgcaggtgatttgaaacgcatatgtgagactgaactcggcatagtctctcaatgttgcctgacaaagcatgtctttaagatgagcaaacaatacatggctaatgttgcgctgaagattaatgtgaaggttggaggaagaaacacagtgcttgttgatgctctatctaggcggattcctctagtcagtgatcgacccaccattatatttggtgctgatgttacccaccctcaccctggagaggattcaagcccatctattgctgctgtaagttagcttctcctttaagatctacttctgtatatggatgcttttgtttattttcatggccttaaccttttcaaattgtgcttgttttgttgacaacgaaatttttgttttcaggttgtggcatctcaggattggcctgaaatcactaaatatgctggattagtttgcgctcaagcgcataggcaggagctcattcaggatctgttcaaagagtggaaggatcctcagaaaggtgtggtgactggtggcatgataaagtacgtgtggatgttatttaatattttcgtgattgggttttagctttagcttgctcttaagtaacagatctgtacgtttctccccttacttttgaacagggagttgctcatagccttccgtagatcaactgggcataaaccactaaggatcatcttctacaggtattaactcttcttatggcacttacttgactaaataactttctgtctttctttctgaaatgtattatatggttattctgcacagggatggagtcagtgagggacaattttaccaagttttgctctatgaacttgatgccatccgcaaggtaacagttacttctaacaaatggcttgtgttgcgtgctcgttttcttctgtttaatctgattattatttcaactcatttcaggcctgtgcttcgctggaagcaggttatcaaccaccagtgacatttgtggtggtgcagaagcgtcatcacacgaggctgtttgctcagaaccacaatgatcgccattcggtggacagaagtgggaatattttacctggtgagacaagtttggatctttgtcaagctttttgtgcgtagacctaatcagctgaaaatcccttgcattggtttttaacccctttgttaattgtaggcactgttgtggactctaaaatctgccaccctacagagtttgacttttacctctgtagtcatgctggtattcaggtataatttacaatctcaaatgagtttgtgggtgagaatttatttgaagtgtttaacaaatcaaaactccattaacagggcacttctcgacctgctcattaccacgttctttgggatgagaacaactttactgcagatggacttcaatctctgaccaataacttatgttacacgtaagatttcttacctttgtaacatattccttgttacaagtgtttgcaagattgcaaggaaaataagagtaacatttaaactacctttttgatttgtacaggtatgcaagatgcacacgctcagtttcaattggtaagttttgtgtttcccatcccttaatgtcatcttgattttgatataaagaagagagagatttagtattcaatgttttttttttttgttttgggatattgtagttccccctgcatattatgcacatctagcagcttttagggctcgattctacatggagccagagacatcagacagtggctcaatggctagtgggagcatggcacgtggaggtggaatggctggtagaagcacacgcgggcctaatgtcaatgctgcagtgaggccactcccagctctgaaagagaatgtgaagcgtgtcatgttctactgctgagttgattcaccctctatctatctttatgacctaaattaatgaagaatatcatgtatgctttctaagacttatcgtgtgtttggatatttcatcactctttctctatgagtatgagatgctttatgactcttgtttgacaactactaaaatttattattcaaaacagactttgatcctttctttaactcgtcttaaatctttattcaagagattttgtgtttagagatgtttaggttgtttgtattgtcgaccacactactacattgtaggtataagcgttgagatccaggactaaaatcctgactacaattctttatatgtagtcaggactaaaatcctgacgttatcacacaagtaaacatgtggttttgatttagaggtttgcgtggaaaatgcctaaagtggaacatttacaaattttaaattaggctgattttactgcctcttttatgctttctagtttctctcaccctgtcggatatttgcagcatttatggtaaattcttcaaagcccattaattgccatatatcaatctctctcactgatttcatgcgtttgcctttctttttccctataatttgaaaatggggtttttgaattttcattgagcttcccttgtttggcagtttctcttccatctcttaaccagcaaagcaatcgacagaatccatggatgcctctcagtctcctcttccacagttgccatctctctccggtacacttaaaaattcaaactttgtatattgtttttgtgcttactttgtttgatatgttggtgaatatggacacagatcttgagtctcggatgcaagtaatgcgggtctctgctcttgatgataaccaaaccggtgaaacattttctcaacgtgctgaatggttttaccagagaagccctctccttctctcactctgtcaagatctctacgatggttacgccactctcttggaccgtttcaatcaaaaccctaaacaagtcattcctcatgacaatgataccgatactgacatcacttctgaagtagagagcatcttgtcctttcaacagatggaagtctccacttgtgatatgcaaaagaacattgaagacttagtctcgcagctcgttactgcaaacttggagaaagataccgcgaagcacatattacaacgcagagaacaaacgttgcaagaagcttgcaagacaattggcttgctaaagaagcttgtgatgttgcttgatatggagaaggaagtagctgtagaagaaaccgcaaatctcggacacaaacttacttccctcttggaagagaaccgagagctcgccagtgaagcgctgttcatgaaaaacgaagcagttaagcttgctaggtgcgttcttaagatgagggatgaacattttcacaagatgtgtcatctccagaaccaaatctacgagctgcagtcatcgagagagcctgtctacgaaaatgaatcctcgcagagctgctttggattggaaaatagtaagaaaaagagcaagaagagaaagatgagtgaaacaagaagtgaaactggagagaaaatgagatccaagtggttcaagagactcaataccatcaatccctttaccaaatgtagcattacgccattatcttctcccctctatcatgctgcactctaaattagttactactctttacattgtatttcttacgatggataataatgtctgcctatgttctatttgccttgttagacaagcaacatttaacatcaaaataaccttgtgattttaggtgcaaactaagtcgaacaagcaaattccggtaaaaatgttcgataatatattatgtacaccgaatatataagaaaaggttcaataagactacagactaaaaccctatgattcaccactcatctgaccacaatggagacattgttgttgtgagaaagtgggggaataacataccgaaagattactgtctaagtaggatcatcttgtttgatgtcttttgtgtttttaacactctttctataccaggaataacataccgaaagattactgtctttgtcttaaaagtcaaatatttcacgaacctcgcctgaaccctgcaacataatactatgatttgaatttttgaaggaccatcatagatgactcaagctacataatatctgcaaccaaaatctctaaacggttaaaaaagaagacgcaaaaactataatgagatcgaaaaagaagctttttaagtttattaaacccacctaactgaaccaactagcccaacatataaaatccacaaaagtcgaaactgttaaatacccaaaatgtatcttttaattagaaaccctccaaaacctaattctctttctctcagattttcatcgtcaagcttttggaacacttcctcgtctctctgccatcgtaagttccaaaaactttctcttcctgtagttaaaaccctaatttatggctatgatgagaacttctcctagagattcgataagcaatttgccagatgagattcttggcaaaatcttgtctttgctcccgacaaaagtggctgcttccacatcggttctgtccaagaggtggaggaatctgttgggtcttgtagacaacctctgctttgatgagtcgatggttgtttatcccaacgaagaagaagaaacaagtggttcacttcgcttctgtgatttcgtagacaagacatttgctctgttaagcaattctcacatcaagaagttctctctgtctcgtgtatataagtataacgatgatgtagacggtatggtccggcgttggattcggactgtaatggaacgcggtttattggaaatacacttgcacgccacccccatgtcttttgttgccatagaaactaagctgttaacgagcaacacactggttaagctcacactatccgctcgatgttttgttgaagtagagcgtgtgtttttccctgccctcaaatcactttctctcttctcaattctgggtgattataccaactatatacggctcatcgatggctgccctgtgttggaagaattatacatgcgtgatggtgattatccgttcttgcggcttacttgtggtaccaacgtggaaagtgcatccctcaagcgacttgtgatttttacccataatccaaatgaaatgatttggcacgaactgatttattttgaagcaccaagtcttgtctaccttgactattccagttatgtctcggctaagtatgatgttgttgatttcgatttgcttgtcgaagccaggctgagtctcaggttatgggtgtcaactaacgattatgattattctgatgatgatgatgatgatgatgatgatgatgatgatgatgatgatgatgatgatgatgatgatgatgatgatgatgatgatgatgatgatgatgatgatgatgatgatgatgatgatgatgatggtgattattatattgtagaaccaaaggcgcctatatttggtgatgttacagaactacttgcggctatacgcaacattacgacccttcacttgtctcctgattcccttgaggttagtttttgcttcgtcttagtgtttgttaccggagctagcaaggtctcttacttatttatggtttttggttgtgttcgtttataacttaggtgtttcatttctgctgtaaatccatgcccgtgttcaacaacctccttaatttatctattgagagtaacaaggataaaggttggcaagtaatgccacttctcctcaagagttgtccaaatctacacaccttagtcatcaaggtatgatataaaccttgctgagattcttttctgttgttagtgttgccccattaatttattcatgtcaaattggtctctggtttcagggtcttgtccacagagtaactagtagatgtggagatgcatgcgcttgcatacctaagaagcagaggaagattgtacagaaagaagaggcattatgttgtctgcggacatgtcaagtgaaggtgctacagatttcagagtatggaggttattttcaagagctgaaacagatgagacatttcttgggcaagttggaatgtcttgaaaccgtgaaagttggtgttcacgcagaaaacaacaacaacagtgagttcttgcgagctaatgtgctgactcttcccagagtttcagcaaagtgcaacgtccacttcatctgattttctttctttatctttctttgttatatatatagcaatagtttatggttaagagaaacgcagaatattggggaattatcaattatgcaagtttagttgtgcttgtggcagcaatcatcaaaacttgcacatcaaattgtataagtgactcttttaggtaaaaaataaacataccagaaacacttgacaaggtttgtcatctctaatttacgcgctgccgtctatgaaaatgtatcctcacagagctgttttggagtggataaaactaagaacaaaagcaaaaaaagaaagatgattgaaacaagaggtgaccatggagagaaagggatcaaagtggtgaaacaatactatcaatccgttttaccaaatgtagtattagcccatcgtcttctccgctatatcgtgctgcactctaaattcattactactctctacatttgaatttgcataggatggataagtaatatcttcttatgttctatttgccttgctagacgtagccgtgttcttaagctcttctagtatttcaagttgcttttgtaaaacttatcttttgtatatccattggataggagaatgatataaattcttcttccatatctactgaaccatcataaatgactcaagctacataatatttgcaacacaaaatctctgaactgttaataaagaagacgcaaaaacaataatgagatcgaaagaagcttcttaatgtcatggagaaagtgatataaaatctacctaattgaaccaactagcccaaaaggcaaaagcacaaaatacgttttttttcttagattctgaaattattaacctggttaggttacagtagtataaaaaagagctttgtctttctcttagattccattgtcaagcttttggtacacttcctcgtctcctctgccatcgtaagttccaaaaatctttcacttcctaaattacactctctccttcgatttaaaggatccatctttgattctgttttttttttgttcttgcttgtttagttgcaaaaacgtttcaataggataggaggaacctaatcgacagttgttttagtgtgtcgtaggtaatttttggggtatgatggattcaataaacaatttgccagatgagattcttggcaaaatcctgtctttgcttccgacaaaagtggctgcttccacatcgattctgtccaagaggtggaggaatctgctgggtcttgtagataaccttgctttgatgagtcgatggttgtttatcccaacgaagaagctgaaaatggttcacttcgcttcgtagatttcgtaaacaagacatttgctctgttaggcaattctcccatcaaaaagttctctctgcgtcatgagcctagactttactgtgtagatgcatacttacgttggattttcactgcaatggaacaagaacgtggtttactggaactacacttgtacgcggatcgatattattatcctgttggtatagagagagagctgttcacgagcaacacactggttaagctcacactatccggtagatatgattttcaagttgagactgtgtttctccctgcccttaaatcactttccctctcatcttctttcgagattggttttgacaaatattgtaacctcctcgatggcttccctgcattggaagagttatacattcgtgaagctgtatctgaactttctaatgctttactatctagcggtacgtttgtgaaatgtgcatccatcaagagacttgtggtttttaccgattgtccaaagtttaaagaggatgaggatcaccaagaaccttgttttatagcaccaagtcttgtctaccttgactattctagttatctctccgaaaattatgaccttattgatttgaattcgcttgttgaagccaggctgaatctcagactattggagtcatttaacaattatggttcgtctgataatgatggtgatgtttatggttgggattttaatgttccttttgattattatggtgatgttacaaatctagttgcgggtataaccaacattacaacccttcacttgtctcctgattcccttgaggttagtcttttgctactacttcttcgtctatctattgattgttttttggtttgtggagattgataatccattgtatatagaaaagctagtttgcaaagtctttcacttatatatggttctggatatataaatcaggtatttcatttccgctgtaaatccataccggtgttcaacaatctcctccttaatttatctattgagagtaacaagcgaaatggttggcaagtaatgccacttttgatcaggagttgtccaaatctgcacactttagtcatcaaggtcttatcattttccttgctgagattcttttgttgttgtttgtgttgcccattcatgtcaaattggtctctggtttcagggttttgtccacagagtaacaagtaaatgcggagacgcatgtgcttgcatccctaagaagcagaggaagattggaaagaaagaggagatttcagagtatggaggttcttttcaagagctggaacagatgagacatttcttgggcaagttggaacgtcttgaaactgtgaaagttggtgttcacgcagaaaacaataacaacaatgagttcttgcgagctaatctactgactctccccagactctcatcaaagtgcaacaacatccaattcatctgaccttttccttccttgtcttttttcgctttgatctcgcaatgtgaaagtaacgtgacatgaatatgattatatcactaaagttggttacaatctgtttttttgaaagatccgttgttcttcttcctttgagttcaaaaatgacatttttatttttgtgcctttttttgttgttaaattgacaaagacatttaaaagaagaattttcgaagaaaaattagagagagtagaagaagcagaagcagtaatggtacgagcttcatcgtcgaagaaaggaggatcaaaaggaggagacaaagacgacgcagagtcaaaacagaggaagagattaaaaaccctagctctcgataaccaattgctctctgattctccggcgaaatctcattcctctctcaaaccttcaaagcaagttctcaaacaccatggcaccgacatcatccgcaaatctcagcgcaagaatcgctttctcttctccttccctggtcttctcgctcctatctccgccgctaccatcggcgatctcgatcgattatctaccaaaaaccctgtcctctaccttaatttcccacaggttagatcctaattggtgtttctcaatgttgaggcattgctactagtactgtgaatcttaatcttcgaaaattgtggttctttagggtcgtatgaaactttttggaacgattttgtatccgaagaacagatacttgactcttcaattctctagaggaggcaaaaatgtcttatgtgatgattattttgataacatggttagtctcttgtgctttttcacatattcggagatctctctctgttttactgtatcttgactcttgagtgttttggtaatgcacatagattgtgttctctgagtcatggtggattgggacaaaagaggagaatccagaagaagctcgtcttgatttccctaaagaactagctcaggttgatacatttcacctatttttacattttctctttaagactatggttgcgacagagatgtttaacatgatcaggagaattctttggtttcaggcagagaatactgagtttgatttccaaggcggtgctggaggagcagcttcggtgaagaagctggcgagtcctgaaattggtagccaaccaacagagacagactcacctgaagttgacaacgaggatgttttgtctgaggatggagaattcttggacgataagatccaagtaacaccaccagttcaattaacaccaccagtccaagtaactccggtccgacagtctcagagaaattctgggaagaaattcaagtatgatcctttcaacttcttcactaagttaaaacacattcgtagcgatgatacgtttggattttgatgagttattagatttctttactgggaatcacttcctgttcatttgatttgtatatatctttatgatgctgcctagttttctgttttggtagtgtatacatttgcctctatgtgactttcgtggttagtatcaggtttaacagcctttctttaatcttatcccacagctttgcagaaacttcctcagaggcctcctctggtgaaagtgaaggcaatacatctgatgaagatgagaaacctctgttggaacctgaatcttcaacaagaagtcgtgaggaatctcaagatggtaatggtattactgcatctgcaagcaagttgcctgaagaacttccggctaaaagggaaaaactaaagagcaaagacagtaagctcgttcaagctactttgtctaaccttttcaagaaagctgaggagaaaacagctggaacttccaaggctaaatcatcctcaaaagcttaaagaaatcttttccagaagaaaatagaggtctgttgtttctttgctgtgagaatgaacagtttttagttcttttaggtatgtttgtgtgagaaattgctacaagactgatgtattcatcatgcagttggataatgtattcattatgcttattcgatagtttgtgttcatcgagctatgtataaatcatctctgctctttttaatacaacaaactgtctccatctatctacacgagtgactaacgcaatatacctcttatcattgttttcaaaactgaatcatcattacactttacttcttcaacagatccatctcattgagctttaaaaaaactaacactttacttctcaacagatccatctcatttagcttaaaaaaaaactaagaggatccttgcaggaacttgtcgactctgtgattagttgcagctgaaagaaacttcatgcaaataggaggtttaactccagctatagcaagcactgaacttggcaaagtccagattccatctccacatatcaaaccagaagccactgctgttgcaaatgcttcagcctttggcgcatctaacctctcccagacaaacaaaataaaactccccacgcacatgtcaattgcaaagtaaggccccaagaaaaacggtatagccattgccatgggaagaggaacaaaccttccccacctgttaccaagacaatcttttattaagttaatgagtatggccacaccgaaaaacacgtagcacagcataagacagtctcttggtagagacgagacgccttcaaccccgagtttagccatacttcggtacacagtagcaaacggagcagggtattcactgtttggtagaccaagatcatcaaacgccttgtagaaaagccagaatacgcagggtgaaaccaagcagcccatagctgttccaattacctggctcacaaacatggctcttggagatgacaatgttaggtaaccagttttgaaatcctgcgtcaggtctgaagctgtcgatactatattcatcatgactccacaagccgctaagcctgccagaagacctccatgatccgaaccagcccatgctccaattgtaaatatggcaagctttccataggttgatgctagcgaccaatcagtgagcccggctccgtaagcattgcagaaagctaagataggagcaaagatatagatgactataatgtagtaccatctcagctgagagaacatgtgaggaagtatagctgtagacactgcagatataaccacatagcctccaacagcaaaccaagacggtatttgatccttgaggaagaatcttgttcgtcgttggtcatcataagatatccttggggtcaatggggaagcaggggaagcaggagggtcttctttgtgtgcaagagagcttctcgaaccagctttacctcggatctgcgagatcagtcctgaaaaggttcggatcaacaccttgcaaaagttgtatagaccatctcctaggatcgtagcgacagctatgaacacctgaagaagcaaaaggacaattgtttcagcagaagcggcgtgtaagagagtgagagatggaggaatttaccttgtaagcctgaagaccgttcatgctgctagagtcaacattagaagggaaccaatctccttttctggtttcaatgagaggccacattagtccccaagagagaattccacccaatagaagagagatgttgattatgtatgggcatatcataccaacacccacatatgttgcagaaaaatcaaagtagaacctgtcgagacaataaaccagcttatgagacaaagacaagacaataaccccagtttgtgagctaaagacaatgcatcaggtaataatatcataatgcttacttatattggtaagctctgagtccaaaagtagggaagctgttaaacccacaattttcacctgcagtaaagaaccattggaagaaaccccaaaagaagctgaaggagaagaatttccccaagactcggacttgtttcctgatacagagagcacaagtcaataagcagagaactcaaaatgtatgttaagctacgaaagcgaaagtctcatacttggctagctttgccccttgaggagtatgaaagctgttgataagatgagcagttgcagtgccacttgggtatggtagtttgaagtctattatcattatctgcaaacacaaattggtaactgtaagattgcatcagctgctcaaagtctctttggtgtttccacaggagaagaagaggcagaatcaaaacctttctaagaggaacaacagagaagaggccaagaaagctgacaacaaagagaaaagctatcatccaacccaatgaaggatccttaacgccacgggcaacgtctcctgattggtctgctattcgatggctcattgcaaataggtaagtcccaaatcctcctattgcagtttaatttaataaacaacccagaaaagagagaaaagaagggtcaggtgaattatgtgtgaaggaagatgacctcaaagattttgtctttttataagaaaaagtcagaaatcaagaaaaaaacaccaatcttgattcaaattttgagttcttttagatgaggttcttgtttctattaccgctaaaggcaattcctgaggaagcaactacacaagtctgaataacggtgttctcttgtcttgtaaagggctgtttcaaaagaccagatttatgaagcatcttagtccatgtcttgacgaagaagaaccccaaaagaccagcagatacattaagcgaaggaatgattcctgttgtgaggttaagcttcatcacaatgaagctaaacaaaatgcttagcgcaaagctaaccacaaaagccctaattgttaactgcttcttccacgaaggaacctctctgctttcgaatattccctccacggattcttcctgttcctctctatcttcttcctcttcttctctttggtatggtgtagcattaatgttcctctttaacctctctatgtcaggacttatcccagtttcttgcaactcatgttcctcaatctgacgatctctgtcaggagttaaacctccttttctcatggtttttttctctttagatctgcgaaataagagagatggtgaacaagaagaagaagagaagtaatattgtaataaggtacaaagaagattttttcagaaagagtcaacgaaaactgaagtctctctcatcagacaatgagatagtttaacactttaatacttttcacttttttttttctttttttaactcaaggctctttttttttttttttttggtgggattgtctcccctactttattaaaccaaaattaaagcatagtacaaacgcacctgacgtggaaaacatgttccaccggtatcttctaaaaggatatcccgaacatgctcgggaacacactcaaaagaatgaaaacctaaaggtaaagaaaagacatagttcgccaatccgtccgcaagacgattagcctccctataaacatgaacaatacgaactatccagtcccttaatatgaagccatggcacaaacgcaccaggaaggacagcggattagcttcactaatccccgtcgtaagtaacccgacaaccagctctgaatccacctcgatcaccactcttgaagcccgccgctctgaggccatgtacaaaccatagtagaccccccacagctcggctaaaggcgctgaacaaatccctatattgagagcaaaaccaccacaccaattcccattctcaaggctcttgtcgtcgctatctgtgactcatttctcagaaattgccatttgtttttggtatttgaaatcttattaaacttctccatatatagttttaattactatagactgtattaaatttgattttatgcataccactaagtctaagtgaaaaataatattattcaataaagatgaaatgacttcataatattaaaattaagaaaatcctatcatgcatacacaattgaattgttatattaataaaaattcatttttttggataaattttaaattaaaaagggatacttttatatttctattgggttgtaacacttctttataaaatggtaacacttatgggaaagaaagaaaaaaattatgttgaaaaagttacattgcaaattttcttttctggtatcattacattgcaatttttattaggatgtatctactatatataatagtatacataaattcagtataaataattacatgtcaaatcatattacataatctataataactagaatgtcatctagtattaattattaaaaattcaaattgattctggatcccatccccaaatggcatattcctctagagaaaatgaagctaaaaagtctcacaaaaataaaagcaaactaaagcataacataagaatctactaacatgtgaggaccacccacacacattgtccaaatttacaaatctctttgaaaagtttatggaagaacaaaatttagtcgtctttttatggtacaacaaacaagccacaacgtctacttcatcaaaacctaacatcatcaactattctcattctcagatatctatctacacgtgttactttctactcgagaataatcaacaacaaataaaaaacaaatcacttttgcataaagaaaaaaagaaaaaaagtaactatccgacaaatcgtgtgttctccttttaatttggataattaagttttaattaaagaagcaggtcttactttgcaaatctcaacattaaagcctgaatccattagaagtagaagccaagctctttgctgttctgataacctatctttctctgatttcacttccacaagcttagcttcaccttcataaccattctccttgaaccgccataccagtagatcaggcattccactgcaccagctcctatagtcttgagctaaatgccggcacagcgatgctatacacatacctccaacacaagccactgctgctctcagttcctctaacgaaaaccgctcccaagccactcctctgcacgctgttccacgttgtgtttcatatgatatgattagtatttcttcagccattccatttgcgactttttcgagctgagattctattgtttccttcctggttagatagaaggattcagtctctaagtccagtggagcagtctgcataaggggaacagaaaacagaatgagagttttcatttgcgtcatatgagacaactattgagtttcattcacctggaatcgggtttggaaaacgccagggacatcggaaaatagaatatcccacatgagaagcccgaaaatcgttaaccagatactactctctgtatgaattccttgccatcctcctccttctccactgtaatactgcaatgcgagctgctccactccacattgttctccatcttctccataaaacctattttttatgccaacttcacagttcagtgatctcccttgaatagtaacctgaaatgcaaaattgcacatttgaggacaaagtaagaagatgaacaactttatattttatcttttcactttgaatagaagtataacctcggggatcttgttgtcgacgagatttgaaaaagtgggagttttccagcgtcttggaggttttgccaaacgaagaatccgcctttgcaaagctacccttgaaccagcacgcacccaaggatccaatagtccctgctctgcaactgtaagactctcatttggacgtcccatgtgctccaaatccgttgataacctgactgtccagtatcctcgtctcccatcacaattaaaacagctgagcaatcgcctcagtagataaactgctcggttgtacctgaaaccaaagaaacaaatctcaacaggcaaaaagataaagataatctgaataactaaaaagacgagatggattgtttacatgcctcttctggttctcaaaaaaggaaactcctaagagaaccacctttgagttaacccatggagctgtaaagcgattaaatgcagcagcgtgagcagaatccaaagaggaactggatatgcgggtttcagcaattataatgcatttcaacactgtctgaggatcctcattgtcaagagactcatccatcaactgagccacttcaatggcctgtaattgaagctttataatattgtagaaaaattaacccggttcctttttttcaatatagacaagtaaacacctcttcatatgctaaaagcttggtccgattcgagaatatttgctctgagtcaatgcatttgtaagttgggtatttgataataccaagatccagcagaacaaaagacgatagatcttgctccccattgaggaagaaaagcctctgcaacataaaaccaaaagttaattcttcccaaaataaaacccaagtacgtggaaaaaccaaaacttcacctcaacgcgccatatgagagattctgctgtacttgataccttagcacatagtcctgttctttctagaattactgttgctagatttattctaaatttaaacaaaacaaatcaacctcaaagtgaaacagaaacttctacgaaaggaaagaagctttataaatcttaactataaagtaaaacaaacggacctcgttccatcattgtaacaagaacaaagagaattaataaggtctctctttcttgaggtgcgactgaacacctggaccaccaacatatttcaagcaaacccatgagagaactaatccttgacaactttcaatgaacaaagcatacaaatttaagatagtgtggtctaaccttgttcatagataagatatcacgaagttcagtgacgttaagcaactctgtgatttccttcatcttttggttatcgagttcatttgcgtccttcactgaactcataaatcccctgactgaaaatcatatatatattagcttttgacaatgcactaagttaagcaactaaaagaatttttgtgtgtgaacgtgttcaagcacatatcattcacctgtcagatccttcagggcttgaagagaatcagtcacctcagggtatgatatatttgatagcctaaaccaaggtcctgaatgaacaggtatggaaacatttcacaaaagatcataaggtacataagaactgcagcttcggtgaatcaagcaagagtgttcccgaagtactacaatttcaaataaaggtatctgtaaaaagcagacaagagtcgtggccaccagaagtgaaactacctctaaacaagaaaggattagaaaggaagccagttccagttgtccaaacactacaactgagaccatatagctttctccaaaacctaacatcattctacctattgcccaagtgcccatcagatcagacaatgatcactgaaagttcattcgaaagagacaccagattcattaactatgtccgcatacttgttttcaattgtttcaacgccgcttcatatcagattgtctagtacaatttacaccataacgagagcaaacaaacaaaattacaaggggaaagataatgtaatagatcagataccttttcgtgtgtaaagccggatgaaaagtctctggctatcctctgaaagtgtggggaaagattctgtaagccaaaataagtagagtatagaaaagttaatcattcattccaaaaacatcaagaaggacaccaaacaaaatttgagcaatcataggtgaatacccaagaatgccttttcatcggctgtgaataagtgagagcagcttcttagaacttcttgtagtaatacgttgaagttcaactgatatcttgttgttttaggcggaaattgcatctgatgctcaacaacctgaagaactttctcccaaagaggtttaaaatctccatacaattcacattccttccaaccatcagatctcatcttgtgacaaacaaccttgatcagaacagcttcagaagatttcttcggaacagatgttatcgttccctgcaaagaatgcatagctacatcatttgcacctgacgttgtatacctcaacttttcagcgtatatcagaacaagcataacaagaagaaatcagtcaccaacctcaaacttaaggtcatagtcatcgatcagcggggacaagcactgggatatatctttaggtagatacccaagcatttcagagtctccagaaataacctagtgtgaaagggcaaaaataatgttaacagatacagagacaataattcacactcaagaaaacaatgttaagagaaacgaaaacaaaaacctttatagcgtttcgatctttgacattctcaggatgtctcaaaagaaaaatgtcacccccaatttctaaatcctgaacatcactgaacttcctaccaactataaaggtttcaatagcctcaccattgtcttcatctaaagtcacagttttcaaactctcctccctacttggagaacatgaaccatcttcaaccttgcagcaaatagactcactaggctcacttctttgcaccaaactgaattcaaaagtttcagaatcgagtatcgatttctgctgagtacaaattacaagaccatcttctaattgttttggcactgacaagaaacttgactgaagaagagtggtctgagttaatctccgtttcttcctcgtggataaactcaaatcatctgaaggaagtttgaggcaatttgttaacttcaaaatccctaatgaagaagatgagcaaatagacaacaaaacaattgttaaaacccaccagagaatttactcgggtcatctgaagaagtcggatcctctgataaacgacaatcatctccggctaatgagacaagattgccatagtcgttgaactcgagatttaacgaattctagtggaaatttgggataaaggatgttactttgatacaattggggggaaaatgagggaaatttgagggcaaaagattaataccggagtatgagcggagagaagaaggtggcgattggggagaaatcgccggcgctttccaatcaaccggagcaaactctcccgtccggtgagcatttcctgccgatgacgcgggaaatctttagattggcgctacagtttctttctttgcccttttggtttaccattttgatattttttggtcggagaattctttttctgttttgtctttttgttcaaggtttctctattttttcattggttaaaaatatatatatgtaagaaaaatattaaatgcaaaaatctttaaagcgattcagagacgtttctttgaaatttgtagttgttctggaaacactcttgcttaattcactgaagttgcagagttcttatgcacctagtgatactttagtgaaatgtttggataaatgttttgttcagggccttggtttaggctgtagaatagttatagaaaaatctcaacatttcaattggggaaaatgggttctctacattcatacactgctgttcatcggaaagaaacaaggaaagaaaacgacggttaaaactgaagaccgtgttcacgtgctgcagcagcaagagcctcaatacgtccatggtaagggtaaccaccacggtcaaaggctacctttgtgatacctttctccaagcaagattttgctatcacttccccaactttcttcgctacctcctacacaataccaaaccgaagcatatcatcaaattgagtgccaagtgactcgtgctaagtgtgttaccaaagttgattacaaagatgaacttacaatggttggtccagaggtgtagtcgaactcttcagagattggtttctgcttagtggaagctgaagctaaggtgtgcatcttggtatcatcaatcacttgaacataaagatgcttgtttgatcggaaaacacatagccttggcctctccgttgtaccattaacctatgtgtgcatcgagtaacggtaatgagacagaactcaaggtaacaaatagagacacatcaaacatgccacaatagcaccaacatcaagaaaaactgatgaatcacatttctaatttcattgtcaaattacaatcaactttgaataaatgcaaaacccaaacataagcttaaaattgaatagaagtggttacgaattacgatttcaattatcgttacaatgtgttcttcgaactctaatgaaacacccaaatttcatcgcaattctacattaaacactatcttcaagagaatattagagacattggagatgaaattaaaagcgagaagaaagagaacaccttcttacggatacgagagtggcgggcgattctgtcttcgctgctggttttggttttggcttcgacaaccatggaccgagactgaagcgaagaagacgaccatggtttaaggaaaacggcacggtgttgaagtccgtttcccaagaacgcactgcggttagttatcagactcactgaaccacacccactcacgctcgtcattctctcttactcactctctctggctcgctctctgttcgtaaaagcaaatcctttttgccttatccctttttcttcttgcagcttcctctgtatatatttgctttatttctcttttggaccctaactttcctaacttcttttaattcactgactattgttctgtaaataaactcttaatccttatgttagtgtgtatatctattattaactaagtagccaatctcttcttcttttttttttagagatttcacttttatcttttatagcaatatagcatacaaactcatctacaaaacaaatactagaaaaaaaaactaatttgtccaaccaaaaatttgggattgttttatgttatggccgtaatttatccttaaaacctcatgttcagaaaaatctttaaaaaagaaaaaaaaaaaaaaaaagataaaatgatgttaaattggtaaaaattgaagttattttttttttttgaatatgatgttaaattatactcaaaagaaaaagttactgggtattacaagtgaatgtaaaaacttttcaaaattatttacaagaaatttggaatttctagacatgatttcttcttgttgcaaaccaaaggactatgccttcttcatactttgaattacctcccctttgaagtgtgctgagccggtttcggatgttcttatcgatcatcttgactagtgttgcagttggtgatggttgttccccatacctcctgttgtttctttcccgccacaatgagtgaatggtgttttgaaacacgtactgaaggatgtaaaaattgaagttattcttcctcttctgattcttttgtcctcatgtatggaaaactatagatgtttgacttgaggaggtttgggtcgttaacgttaacatactctacatggtctacaaagcaatataatctacaacaatcgtctacaaaaacgtgtagtcagaacactacatgatattattcaaaactttaaatttcaacacgttggagagtgtttttatcgggattgaagtaggaaagattgtttagatgtataatccgccatcgataaaataatttcaccagtagcaatcactccaacgatggaaacgtaatgatcctagaatttatcatccctcaaagtgtaagcatattttgactgttcatgtttctcctagtcttctagaacacacacacgcaactcaacggtatcatcaacgttatcatcataataaaccaaacctaatttaccattatagcttcatgatagccctctggataaataaactcgaatttctcagacctaacattaaagcaaactatcacaaaagcagtagcagtcatggtcttagacatgtcacctaagtaataataaaccccattgatccatatcccttcacttgcaatgccatgtgttaaggagcattttatctttctccaactcatttctccagttccaagtttgtgatatacatttattgattgcgtaaactcaaaatgttttttttatatggcagaatgagcttattagagaaatttttacatagacctatcacccatgtaacttacaatattttaactagaaagtaaatgtttgctttggtatgtaaacttttaagtatagtttgatacacagtagatcaatgattcccttatcaaaccaatagttttatagactcgtgggctataaatatctcgtttatgttgtttttctgtgtcttgtatcgaaaagatgtttgttattaaggcatgtacatgaacttccaaaagtttgtagagatggatttgacctttaaaggggccatgttaggttgcagaagtgaggccagctctctgatcagatgtttgaacatgttagggatgttaatgaagatgatggagaagacaaggcacgttataggaatcatgttgtcccactttcaatttattaaagtttcacatcttattatcattcatcacattacctcacactctgccttatacggctgtacttttttttttgtttctcttcttagtttttttttttggtttcaatgattgggattttcctaagtttaagggctatcatcaaaattttatttaattattttttcgattttttgtaatcttatacatgtatattttatgaacaccaatcttatatgaagattattgatatgttgtttatgatttatctcccgcatgttctactattcaagatctattattatgtaatggcaaaacaaccaaacatgtagacatgatgatactattgaaccaacacatctgtttaacttgctttgatttcttctaaacgatagcaataaaaccaacccaacactgaaatttcattaaaaatagacattttgtagcaaaatgtcacatattttaattttatagagataaactgcacataatcgaaaatcacctctctctctctcttttcttctttgtcggcaatcacctttttaatctagttttggctcattcatgcaaagaaaaaaacgaccgtaaaaacagaattggtccactcgagttaaaaacttaaaaacagaattggtccacttgagttaaaaacttaaaattaattgtctttggggttacttataaatttccaaaagatttggcaatcaatgagcacaactctagtgtctctgaaaggctattggataagagagtgtggataacattatctcccatgagacttagaaatccgttactgagataaagcaatcaaagttttacaagatacatcttgtaacgaattattagatagttaatttccactagttatatttatttcgtattaaaccattatggttataatttcaacgtgattagataactattttattctatggttccgtaaaccgctccaataaacaaaagtacacaaatgaaaccggaattaaaggccaacaacaacatgaaaggtattcattcatttgttccaaaccaaaatgaaaaatctcaccgtgaattagatagatcatcacagggattaataacatccgaatccaaattaactagtcatcggataaaaattcactaaaattctaaatttagaaaagccacgaccacataaagacaaggagatagaagagaggcatgacgggcttatacattcctatacacataaaagagagaaaataaaaagagaaatttcggattccttctcattctaatcaagaagagaggttgtttgaagagtttgacttgtcaagaattgaccacatgacgaggacatcttcataaccacaagccatgacatcaccttgaagctcctgtaccgttcgtttctcatgttcttctctcgcctttgcgtttgcgtggcggttcgtttgctgcggttggttaaagaacgttgccgctttcttgaatggtgttgcgattgttttcttccatgaagccattttttatgcttttgttttttgtttagaatttaagacttcttcttgaaaatgcttctcttttggagttggattgaagaggcttctatgtatttatacaccacatgtgaacacaaaaacgatctttctaattttttaatattttatcaaggaattgtttttataaaatgaaatttcaaaagtaataatattggagaaagggagagagagagagtggtcaagagaggcaagatccgcgataagagcattctcatgaacccatcaattcgttttcttatcctcccacgtgatcttttttgttcacacacttacaacaattttaccacttctctctccttcttacattcaaaatagttcaaccgtttgtaataaatgtagagaactactacattttactgatcaaggtggtttacgtagtcggtagtaaatttttgtggagactagtagttttaagaagtcaatggtcattgatgtattggccagagttgaatttattgaactatttacactctttactttaggtatatcttacatgatggctatctatattccatgaattagtttatgctttctttcatgatctttggttattgaaaaatgttatcatattaatgtcataatttatgagtgttatatcatgatttaatcttcttttttctccttttttttttttaatcgggtcaagttttctcagtttggtctaacgagttttggagttctctcgtatttgcagattttttcgattaagaagatttcagtagagtgatttgactcttcttataaagcatattttccattagcttcccgttctaaacttaaagaaactacgtacaagaaagaaaaaactcacctaagaaagtagagaaccaaagctttaactaaactagatgatcaagtcaaaattggttcttctagtactaatggctagctcaataaaaataaaaagactttgagtaagttcttatggttataaatagaaacatctctatacaatttctagaaactaaacaaaaaacgatttctgaccataaacttgaagatatttttgaaatctccatggtagatattttttgaagctcattggtagttatgaataagcaagcacatgacacatgccaatgataagaaaaagtcaagaatttgcctttccggttctaattactgacgacaaacaccaaacacttacatcgacctttctactggggtctcactttctatttttgttttttttactcaatcaccttttccttcatcgatcgttgcgctatttctagatatttttctcatatgctcaatctttcacacaaatgatgacacatgtacctacaaatatagtcaaatgtgtaataaatatttcatatgatcatcaaaaccagaaatgatatctaccattattccattaggacttagggagatcgccaatgtgtgaagtttacggatacctaagttgcttaatttattgtagttcttgtttcactattcatagtatacgggttgagaacatgtcttattcgcatccattttcaaagatctttaactcactccaaatacatcacttccatttcttgaaccacatttctaaactctccaaaacattgacatgatcgctttcacttccttccagttactcgactcttcattttatcttattttgatttgaacgtcataaaacatttgagcaaacaaatcctagtttatatccaaaaaaccaatatgaccgtgttgtgttaggaacctttccatgtacccgaaaatcgatgagcaaaaccgaatcacattccaacaagaaactaaattaaatttgtttcagcagtcaagctacctacctaaactcactaaaaaactatacaacaaccatctttctcatcttccactaaagtaatcttccaataaattttaaatttttgttcaaaataattaagaacaaaaaaaaagaaaataaaaagactctaatttaactgttaactttaacaaataattaactaaaattttctaaaaatagtaagacgatgcaaattgacaaattgttgggtgataaaaaatgttgtagccagagataggtaaacgtgagttattttacacaatcaatggattagaagtttgaggtgggcagagtaatgcgcagagaatcccatgtgatctccacatgtctttctcttttttccttctctcctaatttactttttttctctctttttcctccgataaaatgattttctataattttaaaattttatttttaacttttattttgtcaatcaatgattttctatgattatatcttgacatatgtaagtcaagataacgtattctactttcattcgtagcatgtggaacggcataattaatttacgaagcgcataacaaaagttatatagtatagtttgacaaaataatttcctttcatgtaatgatttacttttctttttttgaacattttttctatatgattcgtcataccactagttagtagtcaccaatggaaacattttttacagtgttaaattttacaaaactcgaatgtatttaacgaaattaaatcctttttctctcgttatgcgttacaaaccaccgattatacaatttggaaggagaggaacgggagaagacacggtgaaaaaccacattttgggactcttatcacaagatggatcgataaatcaacaggattacaactattgaatgggagatagacgatatgacaaggcgtatcaaatatggattcttactcgacttaaattccagagatcttcaaagcaagtttcacgtctaaaaccgttaatttatccatttctttaaatttttctcagtcacacgaatcactaatttgtacaaacggtcattttctagtataatttaatattagatttaaaaaagaaatatgtagagttgtatattcttgaattttttataaatactattgaaaatattaattagatgtattatcatattgaagatgtcatttgaatattattttctatatttattgttttttacaagtacaatatacatgtataaatacataactagacatgtttcgtagtaaaaatcaccgtcatttgacttcggcagctttagttctacataatttaaaagtgaattttggttatttgtgttatttgtattgtattcattaaatatatgttattttctctccctattaaattagtttacttcaaaaacataatttaatatttaacttttgcatacgaatttaatataatttttcttaaacattttatatagcaaagcagaattgtctaaaacattttgtagtatgaaatagagggaatagtagtttacttagtaacagtgttgacttcttgtgttaccttcacctggtttaatgtgtatttttttcaaatgtgtatatttaattatttatgttgctgagaaagaaaagaaattaaatactgaacgaatacgtgattgttattaatgtcacattggttagaaacaatgaattaatagtaaccatcctaatcataaaaggattcaaattccttacattgcaggcaatatgttttgatgtatttatttaacttatttatatatgacttctgcaagagataaccaataacaaaacatataaacataacgcattaattacttgtaagttgcaagcaaataattaaattcaccgtgtctctaggtcgagggtacctcctaatgtgtgatcaaagaactacgaacctaaacatgttcacaaatatataagagaatatataacactaaaaccaactgaaagaatacattctttgactcaaaattagtccgttggctctgtcatgtgagatattgctataaagttattatctatttttttttttttgccaaagggttgagaattgatattagaagttgctcatccttgaaactttttggctcattaaacaaatgagaaacgttaactggggatctataacgcggtgtattatgatccgaatggttgataatacttgttggttacagatgaataaatgctaatgcatgtgtactatatagtacaatttaatgtttgttgcctccaatttacttaactccttatagataaaaattaaagctatctactacttgtaagttgtaacgttattatatttttggtcacaaccaaagtaactaaataataaataacaatgagtttatgttataaagagaagaaaatgcatgcactgtcacgtttcctttgatcatgcataatatgcttttggtcttgttatacttataatattgaaaagttgaaatcattatcaaaattccattacatgtacctttaaattacgctaatgttaattatcacaccctttggatcccttctacttaattttacataaacgtgatgagtcttctaggacgaagtgaattagatattgttactttttaatgtttttctatttaaaattttagaatttactttttaatgtttttctattttaaattttagaatttactagtaaattaataatcaagtagtttagaagaaaaaaagaaacaaacaagactggtatttgtttgtttgttggtttgttgggttgttgagtcttctaggacgaagtgaaggttttggtcggtccaaaagttaggtgtatgactgactttgtggtttctaccaatccctcggctatcgtcccaccgaatctttctactattgtaagcttaactttgggtgagacatatattaattactgtgttataattattatttaaccagtataaatatagataaatattttaaattaaaataaacgattcggagcatatattttatgaaatactaaaatgtagacatcatttagtaatctcttacatgatgaaagatcgagttaagaataattctgtatatagaaaagctatcattgttccaaagcaatcgttatataacatttgtctgcgccataaaattccacacaaaatttcgatcaagtccacaattccttcattaaaattttgacagtatttacctatagtggatttaaaaatagagttgtatcccgttgtccatgaataactaacaattttcgttaaatcccatggtaaagatgatacaactcgatttttaaattagggaaaggagagtgaggggaagaagcgctacgcagcgtcgcagagtaggcattgccattcactagtatagctataacctaatgatcaagtttgataacgttaaaaaacgttctcgaaataatatatggaacaacaacccctcgatcatccgctgtgaataggctgaaggaattggatcttgtcattcatcatagatattttgcaaaatggcttccagattattgggctttatgcctcaacatatatagatatatgggttagttttctgtcagcccaatgggtcttaacgattacgtgggtataatattttagccatactaattgtttcgtccaaaattcgtcactaatgccacttgtcaagtagcttaaggcaatgtaacgttacctacaaattagtttaagctaatcatttactacaacttgccattttaacttttgaatcatttaaaccgtgctagagatttttgatgtttcggtccacttttagaaaaaatcatagtaactcggataggtaggatgacatttgattccctgttgattcggatcgctaacactactacttagtgcataaaacattcgcagatccgtgactcaaaaattaaccggaataattgtataaaattaattaatataatccatagtaccataattaaggcttaaaaacactatttaatttataaattatatgtgtgagattttcataaacttcggaaacttatgagcttttacaaaatcatccaaaatctccccaagaacacctacacacgttgaaatttcacttaatttctatcatattacggattgttacacttgagaaaggtaaactttataaaaccttccagtaatagagagttattctctggaaaataagcgtgcatcctgcgaaagaaaaaatcgtcataactaatctcatgtcgttaaggatatatagtctagtgtattaataatacaccacatctttgttccagaaattcctcgtgaccatctattatattgtgcagcttagttatacaccaaactaaagtttatttcagatcaccccaagaccatgaagatttccgaatccgtatcgttacaacttgataacgtaagaatatatacgagtatgcatagtttctttaatttgtatatatattaagcaagatgaatacacaagactttaaaagaaaagggtgttgataataaaaaccaaaaagtctaagaaaaagagtactaatcattaagacatatatatattacatcttaaggagcaataatctttctattcagtatcttgtattggagtttcgtgaaacttagcaataaaagccgtggctctcctatcaatacaaggctcagcaatcgtccaagaacatccatcatcgtcggtggtcatgattcttggtctaacattgatcattctctcttcgttccaattgtctttttccttcgaacaacgcgcaaacaacgattttactacagaaaaagatgatgatgatttcctcctcctcccgtgacctcccattttcatgtatactttgtagagagagagagagagggatggtatatatataactatatattgtgatttgaacaaactcttagattagatttatatagtacagtatgtttaagatatcctaataattaatagtacaagagaataattgtaagttacactggtgtattagttaatgaatcagaaaattgggtttatagaaaccaatagaggtgtaaaataatagtgcgatgtctagagaaaatgtatgggaatgtttagagagattaggaaaagtcttattattcttctttttattgggaggaaaccattaccttatacacttttggcaaggatacatgtaaactcgattcatgtatatatgtagatccatgtgaataacaatggattatctccttgataaaacactaacttacacattatatttataatattaattaagatccaaaaagacccaggttcggccatgaaaaatactattagtccatgtaagttacgtatatatactttaacacaattttataggtatcgaacaaaatgtgtatagtttcgtggggaaaacaaaatgatatataaaaaatagcttaaccaaaggctattgatgagattcgatgctcttgtttttattaatctaagaacgagagtgtagagatacactaagaattcaattgtgattctttaacaaacaaaaaaaaagaattcaattgtgattgtagaaacaacatctttgatttgatcgaatcatattctttttctcttctcaaaatctatttcatattcctttgttttgtttagtttatacatattccatcaattaaaaaagaaaagaattatcgtttttacgttagtttttttttgttttcttacgcattataggcagactgattatagttgcaccggcctatatatgtcccatattctccgtctacccatttgaggatgttttatttagtctcatatatataggaacttgtcgtcggataaagagatgaatacatctgaattacccgtttagatactgcattcagataaccttgacaatgttttgctcatccttgatatcttgtgtttagcttcttactttttcctgaaagctctttctttaattacttacttcgatactctattgcataatccaatcctctgaaaccctctttattgttcagatagccaactagttgcccaatttggtgccttgatagtatatggattaaagtctatgataactccgagtacactatcacttgataattatattgcatcgcatacatgtactttattattattccatctcttcaacaaagaatatcattttttaaagttaatttttgttttctgttgtcacttgttagttgttagtttgttactccccaattacttcattaacccgttcactataatgggaaaaaaaaaaagagttattactaatgggcctttacggtagcccattagaggagctcaactttcactttcggcctattaaaccaaactgacaataacgtctccaacgtgtcaaaactatatgactttggtccgaaagactctcaccaacgcccaattataaagtgtttttggacataaaaggtctcagtcaagtaaacgtctttcacgcacctacgcaaaaaacccatttcatcgaaatttccacttgacgttaatcccaactaccaccaattcaatccatttctcaaactctcttatcatctctaacacacccaccctacctacctccatctctctctctgcaacagagcacaaaaatggattctgcatcgtccaacaccaaagctatagaccctccacttcacatgttgggtttcgagttcgatgaattatctccgacacgtatcacaggtcgccttcctgtttctcccgtctgctgccaggtttcattcttcttcaatttgatcattggccctttgttctaaccccaaattctgataaagattttcaatttcctttcaaaaagcctttcaaggtgttacacggtggtgtatctgctttgatagccgagtctttagcaagtatgggagctcacatggcttctggtttcaaaagggtcgctggaattcaactctcaatcaaccatttgaagagtgctgatcttggagaccttgtcttcgccgaagcaactcctgtaagcacagggaagactattcaggtttgggaagtcaagttatggaaaacaacacagaaagataaagctaacaaaatcttaatatcttcctctagagttacacttatctgtaatctacctatccctgataacgccaaagatgcagcaaacatgctcaaaatggtcgcaaagttgtagatttcttcaggcttttttgttttacttgtattgtatgtaatgacccatcttctcgaaattgataataagcttaaagtggataagacagtgataacaaaatgtcttggatttgtgaatgttaccttgtttcttgcaacagaaactcctctactgtcctcaacaggaaaatgactttgtctctccttgatcaagaatggacaatttttcatctagccaaaacttgcaaagataattagcaaaaatgcattcttctttgggatctgtttgtcatggaataaagatggaaactttagaatcatgtacttccttcggagttgttaagacagcttcttgtatttgcagacactagaagtagcaggagctagaatgtttgtcaggtgtagcattcgcagggccaccaccacaaaatcctctgcgtttttgtgataaaataagaaacaggcaataagaatattgagcatactaagaatagagatgacaagtctctgtctaataagcagtttggtgagtttcatgtctaagcgacatcacagtctcctctgattacacactaaaaacagagctactgtattccttcaagcaacaaataaggatttgttttagattgcaagaaaaatggcaagaagttatagaaatagtttaaaagatgcaacttttatccgtacttagaatcaaaacaaaagctcagcgagaaaaaaatgcaaacaataatctgcgatttatctattgagtgaagaagaagaagacctaattcgtcaatatagtttaccactggaggatgatgaagaagaaagagagaaggcccagagagacgaaattgaagctcccaatctccatctcgcgctttcaacactctcacattaccttcgtcgcagtcgcagtcggagtctctctgagcaactccggcgaacttttgtaattaggatgctcaagctggttaaagccgaaatcgtacggaaaaatcaatttgaaaataaaatcgatcattggatttaatgtaaaccacaattgtttcttcagaaaaccggttagtggattccataaaccgaattatttgaatcgacccgagttaataaccggatttgccctgaaactggtgcatctgtcgcccttgtcatcatcgaaagtaaaccgctctgaaacggtgacgtttgggaatgtaaactttgaaaaggcgaagacggagagagagggaaagatcgatttgagaagagagattcctccgccattgaagaagctcacatcacatcatccgaaaaaagaagaagaagtggaggagagggaatatcaaaatggatgatttctgggatttgactgtggaagagatggatgctattgaaaacgaagctcttcagagaatcaaccagcaacgcaattcctcttcttcttcttcattgccaattcccaacgaggtttttccgcaatccctctctctctctctgggcgattttgttgcggtagttcgggcgatttcggatggcttagagtgtttgtaaatgggcaattttgcttctaataagcccttatatgtgtgtgttcttattctcaggttcatacttcgtctcaaggagccagaatcttaccttcaactctcgcccctaaaccgaacactggtctgttgatttttccagtaccattcatctatgtattttttgcttactctttgtttttttgggttgttcacgtttactgtattaattgtgagtgctagtctctgttccaatagatgctggctctaagccacaagagcaaaaggtctctgtcaaaattttgcttcattctagtggagttcttgctgcaaagttcccatataaccaggtaagataacagaagtcacaagtctttgtggggaaatacttggtagttaagtctttggcacttctttttccaggtggtggtggatgctgtgcgtaaaatccctaaggccatttggaatgctaaagaaaggtttgcctttttatactcttcatatgcatgactcatttgtgtgtagagttctttattatttctaacatgctttatttgatctgtaaacaaagcagataaataacccttggcttgtaacacgttgtttattctcttgtggaagtccaggttatggacctttcctcattcttcactgtcttcagcagaaaatattctacgagaaatttccagcgttaaagttgaggtaagccacattgattcgttaaaactgcttcagaaagttcagcttaaactaggtcaagcgtttcttagatacatttgctatacattttgtcccttgaactatcagatagagaacttagatcctcttgtgcaacgtgcaatagcttctgcctcaagagttccggatctacggcgtaagtcaggcatcctgtttatcacttcataagcattagcgacgtgattttacctaaagatatgttcatttttggaccacttttaagggattttcatgtcttactatctcttgttttctgatttccctagatctgtatgaaaagataccaagccatattgagccaaagcttcttccttttcagcgagaaggcatagagtatgtcagccatatgtagtacctgtggtttttctttattaccaaatgagtagtaacttgctctggctgcctgatgacttttgcctcattattggtctccacctttctcgcaaggtttattttacagcacggaggacgtgtgctcctagcagatgaaatgggtctgggaaagactttgcaggcaagttgtttcctatatatcttttcatttcttaatttttgagaatcctactcccctttcattggagaagatttctattgtcacttgtgagcagatctctttgacattgttacacatatatcatataattagtctaacaagtatggctccttgcaaaaccagcgagaaacttatttaggagaattgcttgtatcatctttttacatcaatctcattttacatccattatctgtgcaggcaattgctgtgacaacatgcgttcaggaatcttggccggttctgattattgcaccatcttcattacgtttacattgggcaacagtaagcttacgatatttgaattctacttggacattgtttatgacactggagatgattcataatgctgctttcttgcagatgattcaccaatggctgcatgtgcctccgtcagacatagttgtatgtagtttagttcttgtatattacttgtagctagaacatatctattctatattattttcgctctcatctaagttatccttttagtaggtagttttacctcaaccaggtggatcaaacaagtgcggatttactatagtttcctcaaacacaaagggcacaatccatcttgatggtgtcttcaatattgtttcctatgatgtggtcactaagctggacaaactcttaatggcattggactttaaggtgattacctagacattgcttcgttctgatatttttgttgattgttcccaatatcttgatttataatgatcgcgttggttacctgttaattatgtgaaattgagacttttgaattttaagaggagaagctaatataaggaattgacaggaaagaggcatatatagattctgtgatctgtaatttgcaaataaggcttgtagtgtctgtctcaaatatttgaggttttactatgtacaagtcctttgtttcaggtcgttatagcagacgaatcacattttcttaaaaacggtcaagcaaagaggacaagtgcttgccttccagtcataaaggtattattgatatatcattcactcattgttttgcctaccaagctagttttagttatcagccaacagaattggaaaatcagtttcttcttggtgcaactgtgatacttttgttacattattaacgagtaatattctcgtggtttgttctattctattaagatccatacctcatccttttatttcagaaagctcaatatgccatccttctgagtggaactcctgctttatctagaccaatagagctattcaaacaggtgatccttccattttattagtccccatttctttattttatttggatttgcgagggaccttgtgtatctctggatgtaatttgattaactaaatactccttttgttctttcctcttggcagctggaagctctatatccagatgtttatagaaatattcatgaatacggtggcagatactgcaaaggcgtaagtccattgcacattgagaaactacctagaagttcatataaggtagctcctgtgcatcataaaatttatattatgttattcaaattttcagggattttttggaacatatcaaggcgcaagcaatcatgacgagttgcacaatttgatgaaggcaacagtcatgattagaagacttaaaaaggatgtcttaactgaacttccgtcaaagcgcaggcagcaggttattagtcgtaactctttctctaagtccacacatctaatgtggtatctttagtacttgtttatgatttcgttttacattgttaattttatctttgtttgattaggtcttcctagatttagctgcaaaagacatgaagcaaatcaacgctttgtttcatgaggtaacttgatttagtttttaatacttatactaattaccttcctcgacgaatgtttttgagaaaagaaatgaggtttactttctcgtttacagttaaaggtggtaaagtcaaaaattaaggattgcatatcagaagatgacattaaatctctgaaatttatagagaagaaccttattaacaaggtactaatttgctttttccgaattatttctttacaaccaacagctaaaaggatttgtgattcatttgtgtgcactttttcttgccactatatgttcttttatttcgctggacctgcttgtttttcatagtttcttataacattccctcgtttttttaattcagatttacactgattcggctgtagccaaaatcccagcagtgcttgactatctggaaaatgtgattgaggtaatagctaatagcaataagatgtttaaaaactcctatacatgtctgatacctgttcctgttgtttctcttcgagcattgttatgcaggctggctgcaaatttctggtgtttgcacatcatcagtccatgcttgaggaattacaccagtttcttaaagtaaggcattgaactatcaacaaagcttccaaaagcccgtctatttctcattaagtatgcaaaaaaacaaaattacagaaaaagaaagtgggctgcatccggattgatggtagcacccctgcctcctctaggcaagccttggtttctgactttcaggataaggatgagataaaagcagcagtggtaagtattttcaccaaacttgaacacaaagtttcttacccttctcttactatattccactgttcaaggcaatataatttttcatattaactagattaatatttgtactgtgaaacttgcaagtcactaagagaagtaatataagaaacgaatttatacttaaatcgtatgttaagcctttctttgcaatctataaaaaatattactagtcctgattttttttttggtttacatggatttgcagctgtcaatacgagctgctggtgttgggataactttgacagccgcaagcactgttatctttgcagagttgtcatggactccgggtgacctgattcaggcagaagatcgtgcacataggattggtcaggtgagtcatgaacaatagtttagtggagttacaaatcagaatcactctcttatatctcacttatcatttgtagtgtattttttaaactctgcctgtgattttgcttcacttctacaggtttcttcagtaaacattcactaccttttagcaaatgacactgttgacgacatcatctggttctctctcattcacatttaccgttgaaagttcaataatttctcaaaattatgttcttctctgctgaatcagtgaattctcctaaacttgctcacttttcgtatagggatgttgttcagagcaagctggataatctaggacaggtatactctttctcaatgtctctccacatggagagaaaatctcttggtgtcaaatacacatccattatatgaggattccagtacggctttgactataattactggagagtgcatagtgattcataaaaaaaagtagatgtttgattgtcctgaatttacacatggttatagcctttcgaaatgctggaaactaagcttgtgaacaatttgcaacacagatgcttgatgggcaagagaatgctttggatgttgcatctagtcatatgatgagcagtccaacaaaaccaagaaacagccccacgaagcagcaaactttagaaccgttcttgaagcgctgcaaaagattagatgacgacaccgaggaacatcaacccatgcccaaagttcccagattctgaaactataaaatgcaagatcgcatgtgtttttgttgcttgcacatgaccttttgggtaaaaatatcatttgtaatattttattgcaaacaaatgatctttcgtagtgtagtttcaagataaatggatcgttaggcttgtatcttgcagatgtttttgcttaagttgatctttacaggtcttatcgcaattacatggcttatatcaatgacttatcgagaaggtaaatatgtacaatgagaaagcaccacactatataaaacattagccgtttcaaaacactttcaatatgagacagaaccgagtccttctctgctacattcttcatcaaagaaacttgtcacaatagtttccacatcctgcaatccaactcctacacaaagggtcttggatggtgtcctaactgaatcagtcatcacagcatcagtctccttcacaactctaacgtttgggccatcacgacacttccccatgcacttgcaagccacagcagatccttcgaaacccgtcatcgccctttgaaactcatccaacaacaaagctcctcctgatctcttacacttccctcccatacacacttctactctattcaatggtaatccaaccactgaaaccgcttctaccgtcttcaatgtctgtccaggattggccattgaaggaaaaattgtggatgtttgtagagcaatctgcaatgcttcactggtgttcttgcaagaaattgcatcctcttggatcctaggaagggttgctactgtggcttctggttgtaacggctcaagaaccggtttagccttgtttcttaaagagctcatgtccacaactttgcctttatcacaatcactatcacttgattcagacgaagaagatgattcagagtccatttcagtcatcttcttcatggctttggctttagccttctcttctttcctctgtttcttcaatatcttctcctctgctttcaactgctccagctgcttaaccaatatctctgtagcttcctgcaacaatcataaatccaatcaagacctaatctaaaaaattcaattttaccatacaaaagtcaaatcaaattctcaacatattcttaccgagattgtcttggtctgaatctcaccaaccaaaccagcttcaggatcaagaccaaaccctatactagagaacatatccaagttcttagaaagacttttaagaactttcgccttcttcttcaacgccttcttctccttctccataaccttaaccttctctttctcctcgccgcatctcgttggctcgatatagtaattcacatgccctttatccgcaaactcattattacacacaataccacgaaatcttctggttcgaaaccctaccgttctggtattaccggaaaattccgatactaatcggagacctgcaacggaacctgaagaaacacatggaatttgtcggaggacgacgccggaaacttccatcctcgtaattagaaaggtggaatcaatgaacttgtgtgacttgagccttaagcgattacgataatatttgttatacaaatcctttaaggctaagttctttgttgagggagatttgccagttcttttacaggagagaatttaacagtgagagataacgtggcgtgttttggttggttaaaggtgtcgtgagttgcactcaggctctccacctgtggtctcatgagttccacactttcccgcgcccctgacacgcgccttgtgatgaatctcggccgttgattaagagtttggttgagatgaacggactaaagttacgacaagggtacatgtcggattgccacgtggaaaattttgtggaaactttgccacgtagcagtgccggaccaaaatataatttttttttcaagaatattttattaaacataaggttacaatacctaaaaatctattaaaattataaagaacagagagtaaaactcaataagaattcactaattttacaccgaaagcgaaggaattttagcgtttgtactctatccaaaaatacgtgtcaaactgaaattatgattgcaacacgtgttgaagagtcatcggaagtgtaccgacatcaaccaccgctgttgagctccaattcccgcgaagaagatatcgacgataaacaatcgcacgaaatcccttttgtgttaccggaaaattttgaacaaaactctagttaaaaggtacagcagaaagggaattgtaatatgcatcgagatactttcgatcctttaacctaagatgtaatctcttgaacatatgcaaattaagttttagactgaaatctcttcaattttgtgaaattgaaacgattcatgcaacccacaagttgcacaaaagagacaaattagatggatccatcatgatagataaataccaactcatatccaaacaattattgaaatataaaagcataaagagatcggaagaagaaccgatccacgacaaggaaagataaaagcgagccaacttctagaagaaatcagatgtcgctggacgagggcggccatttccactaacgaagccagaagatgtcgtttgggaatccgagtcaatcgggacggcaattcaccggaaaaatccggtcgacaaaactatgaaatgttcctctctttaaaaaatacgagagaaaggaccaaaatatactttaaaatttttatagaaaaaaataatactattttgtcaaatttagctgtataatttagttgttacgaatgaataagagatgctaactagatattatgattgctaaaattatgaatctatatgtatatgtttacccttataattacacgacaaattatgtaagttttttttgtttaaactacttcatacatccacacgtacttcagtataagaaacaaataacattggattcacatgatcccttaaataattatatggctaaatttaatatgtaagaaaaacttgataaatatcttacaaaatacacaaacatttacgtacaaaaatatgagacaatagaatatcaagtagaggctctaaacagctgcttcccttgtttatgctaagggccggctctaccacgtagtcataaatttgggagagataagatgtgcattaaattaaaatctaaactgaatatgccactcgtatactaatattattaacttttgtatattggaatttttggagaacttgtttttctttttttataatgtatttttagcaacttgatttaaatattttttagttttttcttattaagataatttcaaattaaattataaattttgaagaatatatggtggtttattatttttgatattttgaagcaagtaataaccatgcacaaatgacaaatgcatgttgctttaaaaaagggaaaaatttcattaaaatcccgaattttgctaaaacgttgatttaaatcccgaattttagatgaaacgaaaaaaacatcgaacttttgttgacttttctaataaatcttaaacttgtgttgaccgcgccattttagtcttgccgttatctgggttaacagacttaattgacagggttaattaggcgttaacagagacttaatttgcaaacgacacagtttcgtttttagtaaacgacgtcgttttttcaaaacgacttgctatgttttcccccaattcgatcagaaatcgaagaaatcacaagccctaaaaaaacaaaatttctcagttctcttcttctacgacagaattgaaatcgatttcgaaaattggatcttcctacgcaatgagttcaagttcagcgtcatcgggtgttatccaaaaccgtggttttccggtgaagtgttggtgtggagatgatgtgacaatcttcacatcgaagagtgttgataatccgggcagacctttttttcgttgtgaaacgaaaagagatccaaagacgtggacaaacaaaagagatgtaagtttgagtttgagtttgagtttgagtttgtgtttatgttatgtaacttagcagctaatcatatcggatttggtttgattgtgtaacagagtcatttgtttaaatgggttgaggatgctgtatacgaagaggttgaagatgttttaccaaaatttgtgatcattgcaaatgagcttaacaaagccaaatccgaggcaaatgagctaaatgtgatgatacatgaactaaaagaagaagcaatgttgagtaaacaagaaatctgcaagtggaaagtgtgtttgaaaatatgttttttgtggctttgtttgatcagcattttcattctttacatgatgcttggtaaggcaaaaagaaatgaatttggtgttgcttaatagtgtaagtctatttatcttgttgtcttcgccaagcttgtaatgacaatgtagtatttgtgacttttatgactttgtaatgttggctttgttgctgtcttaataaaacttgtgagtgtttggtctttatttttcttgggtgaatgtgagtgtttggtcttgatataaggtgtgagtgtttggtcggtgtgagtgtttggtcttgatatgagaatcggagtaaagagatggaataatttcactcaaacaaaaacttgtcttaaaactatgagtgatacggtgcaggcgagataattttgttgaggaagaggtcgtttcatatcttccttttcttctagcataattgcttggtcttccaggagtacctcttctccatggtggtggcaagacacctaacctattcactctaggccacaacaactgcccttggaccggcgcaataccatcattgtaagttagctgccacatcctcgtcgtgtaccagtcactcacatagtcttctactttctgtttttttcccaattataacagaggctgcatgaacacaaggtatacctgtcatttgccacttcctgcaaccacatgtattgtcattcatatccacagaatattttctaccaaaatgtgatatctcatgcttattatgccttgccatgcttctttcacaaaattgagaccccgcaatcatcttctctatctcctcatgtgccctctttgtgaatctgcttttccaccttccagcaataatgtacctcttctcattgcgtaccatacactgagaccttatatcctccaacatatccagtagaggttttcttcttgcttgtcggattgtccggttgaaggattcactgagattattcaagttatcattgcagcagcttccaattctgaaaaatgctctagaccattccattggtttagtgttcattagagaagcagctgcacctggattgtaagtctttaattcctccagattagctgtatattctccaatggtgtagctccttgcaatcttccagaacagacgctggagttccatgtcgtgactgtttctcttccagttgtccattatgtgcttagcacattgacgatgttcagctgctggaatccggttgtgtatagctttaactaaaccctgcaaagtaattggacataagttaaatatcgtctccactgtccgcatcactcacatctccatcatctctagctgctggtccagagtgtgcttcaaagtcttcacaattttcttcagtaacacctaaccgattaccatcttcttcgtcagcatagtgaacttcatcgaaatcatcatcaccggtaacattacagtcattttcactcaagccctcaccatctgattcgttaccattttgtttggatttcgattttttccttctattgtcaccatctaacctgttaccattctgtttcgatttttttcttctcctattgtcaacgacagaatgagacggcctagtagaaggctcgtgaatagcaggagcctcgacagaagcacgtcgtagctcagcaacagacggaggctcaatagcaacagacggaggctctatggaagcagacggaggctcgatagaagcagacggaggctcgacaacaacatgaggcggctcaacaacaggaggaggcgggtcgacatcagcaggcagcttctttctcatcattacagtttcgaattttccttcctcgatcgacaaaagagaattgagaatttttgttttttaaggctcgtgatttttcaaatcgaattggggaagttcagtctttttgataaaacgacgtcgtttactaaaaacgaaactgtgtcgtttgcaaattaagtctctgttaacgcctaattaaccctgtcaattaagtctgttaacccagataacggcaagactaaaatggcgcggtcaacacaagtttaagatttattagaaaagacaacaaaagttcgatgtttttttcgtttaactaaagtttgggatttaaatcaatgttttagcaaagttcgggattttaatgacatttttcctctttaaaaaatagaattaatattttgataggataaagaacagtctaaaatgcttaattaaagtgacttaattgttgggtttggtattgttgggatggtaaccgataaaagtagagtggatcacgcttcactttatgtgataatatctcatgaaacaataaaataatatttaattctcttttgaatacagagctttgggcctcacgaatttgtgtaaataaagaagataagatgcttatgagactaagcccaaaattcgagaaataactagatagagtggagctatcacatacccatggaatcggtaaattggagaaaagagtatatgattctaaaatgtgtatgatttctgtatttaagtatatagtttgttttttttgctaaacttgtaaatatcatataaaatgagtttaggtaatacaaagagaaaaccaaagaagagcaaccaagacaaaatgaaataaaaataagattacaatagagcttgaaaaggtttgggaagagctaacggatccaaagcaccataagctcccgccaacgattcttgtgccttctcgacgaaatgacgttagcaactcacgatcaatcatacgaaagaccactgagacggaaacccgaagagaattgtgaaggacattgtttctctacctccataggttgtagacgacaagctgttgtagtttaattggtcctaaaaaaatgtatatagcttttatttcattggaggaacatatttagacacattttaacattagtattacgtgggacacaacatttaactttgttttctttttgttgacataacatttgcttactcatacatttgagggctcaagtttatgttggacctagtgcccaattatttttcctgaaaacttaatgctttatttgcacttttaaaactttaggactttatttacaaaaatataaaaaattaggactttaaaacctatagaaaaaatggaaaaaacaggtggacctagtgctctagcactgtcagcactccctctaaaccggggtggagagattagaactttattatagcctaaactatgcacataagactatttacattggtttaaaattacaacaccctacacatcatcattcaacattcaatttactttcatatactagaatggtttttataataactattacggtaagaaaatgcgaaattttttctatatccaaatcaaatgaaacaaatgtctatttataaaataagaaaaatggtgaattttggtgtaaattatttatgtatataaaaaactttattataacttaactgagttcaaaaattattgggatgaaaaaaaaagtcaaaaattttagtgaccgaaaagacaacacaagacaaagacaatctcacccaaccaaattcacggtattgataaattacaacactaaatttgccacatcctttacaacatttattaaaacaaccattgcaccatattcaactgttaaatacgtttctcattctgtagtctcattaagtcaatgcagctaagaacatttccattgggagtctctagaggagagactttctattaaaccagaataaaaaatgagaaaaaggaggagagagaacagaaacgtttttcatctgagaaactttgagaaactcatttctacctttactttgttctgattgatttaaataataattaaaaatttgaacagtaaaataataataaaatttatattattttttaaagtgattttctgatggagatggtctaaaatggatttggtaaacttgaaaaaagttgttggccacaaataagtaaaacaatcttgttgtaaagagatagaattttgttcggctcacacaaaactaaagatgcatttttatttttgaaaaaccaaacaatttttatatgggtaacatattttcatttcttgttacccattgttagaacccataggatgctaggattaaactttgacttcccgctgttaggaatctcaaaaaatttaatgttcttgaagtcattttgtacactccatattggataaaattcaccaaaagcaaaccacaattaccagcctgcaaattgtataactctctattaatcgtatgtattcaactgagaagatgataatttgtctgcaataatggcaatacaatatgttaaaaattgatttacatgtgagaacattgctatactgaaaattcgtatgcattcgatgaaattgttgtccaacaataagcaatcaaatgttttagcatcaaataatatatttaattagaatgattacacgaaaagaatcaatacaataataacactaagaatctctctagacttgacacctcaacattctgggttgttctcaggttgacatcttttttttttttttttttttgtgaactacaccttattaaaatcatccactgaaaatattttgattaatacaactctccagcttgccacatcaattcatcagcatgccacatcagtttttttcaattttcatttttagcaaaaaaaatcatttaaaaaatacaacaaatttaattaaaacaaatgttatacacaattgttttgataatgataacaaatttcagaaagaaaaaaaaaatacatattttttttttaaaaaagttggttgacattaagtggttttttagaaaacaatataaatgagctgaatttaacatgtaagagttgaatttaacaagtagtttacactgcaagtaatttttgtaaattaattttgttttaatatatatgtttatggtaagaatttaaaaggtttttcggattttgcattttacctttgctcgtgtttaattatttttattttgttattttatatatgcagacactaacaaataatttaatatcttatttttacaaaacaatataccgtatagttaatctttttatttgatgtgtttgtatatgtttaactttctacaaatgttgaatttgtttttatattgtgatatatgtaaatattttccatccattattatatttcaaaaaccttagattacttctgttaaaattatttgtgctagacaagcataattagaaatcatagtaaaaatatttaatatgtctttcttttttcaaaaataattgttaccattagatcacaataattaagtacgtagaagttttttcttgtgtaagtttgttcgttaaaatctgaatagcatgaagattttttaactttaaaataatttaattttcgaactaagtcatgaaccaagttatattaaccaatgtttatgaattgtttagcctattcattttaaacctttaacaaagcatggtccatcttttaactttatgttatcttatatcttgaatttatgtggataaactttgtttgtatttctcatggcaaaacaatgatgaaggatatacaatagttaagtttgttggaactcaattttacatatgtggctcagccaactttccggcgactttttcggtaatgtccgtcactggaatgaccggattatggagtctttggattccttgtaatgagcactataacatagtgtagttatatgtaaaaattgaagttattatgaatgagtaattgaggtccaaagtggttagcttgaaagcttacaataacaaatattgaaatttgtcccacatatgaagtttgaagatctctcctctagtatataaagtgttacccatttaacatggttcactagctattgggaagagacactatggtgtaggagatgcaagtcctttatgcaacaacacacacacgcgccgccgccgccgtgccaagccgggccgggcttggccttagccttgggtcaaattctttttggagaaaatacttatgaggttttgttgcattatttgtaatatttgcaacatagtttttggcctagaaacgaaagcccatatcgtttgcataattaaagtatattcgattattaaatgcatatccgaatattaattcgaatttaagtggttgtgataatggctacgctaatcacgccaacgtcttggacttgcgcatcactctgaatcacgcgatctccgccttgatttgcggatcgcatatctcacctctccctcgatttgcggatcgcatatcttacctctctcctataaaaggaacacctcttcctctcattctcttcactcgtttttcgctacaagctaaacgaaactctctccctttcttctcaaagtaagtcaagagtatatcgtttatttcaagttcgcagattccgctatcgagtgttgcaataccggtcttatagtgattgtatcatgcgatccgctgctcataaaaccgccacattgcgggagctagtttggattacggaaagagatcaaatctcgccttcactcgttgtcgaaaaccgtctttcctaatcattttataaagatctttgatttattgcaaatcaggatttcgcggtcctacaaagttcttaaacaaataaacaaaattataattatactatctactataaacaccttatttttttttagtttgttgtaaacagatactttttgtttttaaatcctctttctttttttttgtaactatattgctttggtgtcgacctagtaacttctaaaatgtttatgatttatgtcatgtagcgcaaaaattaattgagtaattcactggaggaacattttagatacattataacattattattaaatgggacacaacctgactcaccaaacactattaacacaaataacgaattttgtagccagaaccacagcccatatgcctcacatttctctgattacttttctacgacagatttccggccatattcccccgtgccagccggagatgactcggaacacgttgcttaatctcttctaatgcacacaatgtctctggatcgagccctcccgcaaactgaataaacatgtaaaagatcaacatatcaagcatcgattgcaccgtgctcaatcagagtaaatgctagtaactattaagattacctggtgcgttctgtaagcaaatcggacgccttgaagaagcaatgcttctttagtagactctctatccaagttacgagctgattgcagctcattcgctactctattcatgtaggttttcgcaagtttgatcgatgctcttttgatctatttacagaattacaacaatgttaaacagaggacaaacagagtgtaaccgattagttacttagagagaaaacaaagctcatcgaaagaaaacaataccttgcatatcattcccgagtcaagcatccactcgactgggatcttaaagtcctggtaagaacgcatggatgagccacgtaatctgactagcctccttatcctctgctccgaccttatcataatcgaaattttagaattttaacattttggggaatctaaaataagtatcaaaatcgagacttgttttacttgtctagtaagttggccattttcttcagggcaacaccgtagtgaatgttcggatcatcagagtaggaagaaagttctttttccagtttctttagctcacggtattcaactgcagcctcttgcagggtatcggctttcttctcaggccacttgaaatgcttaagcacagcacgctcatcagcctgtaaggcaataggcaaagaggaattcacatacaatgtaagataagtatgatgcaaaactcattttggagaaccgatcatttatatattttataagtgatacactttcgtctcagtacaccaaaaacatggccgagtttacaaaaacttgtcacttgtgtaaaaaaatgttgaaagaggaattaggagttaccagagttgccagttctttatcaagccaatccacaaatttcatgacatcttccatatccgaaaaacaagtggtcagaactttctggataagatcattgataaactccccttttgtctctatatcagcttttatctgatgaagaaaatggagctcaacagtgtcagatgagattagctaagactcaggttaaagtaaacagactccatataagaaaatttggttacttacagcgatgagatgcgcagaacggttttgaatttctccgactatactgttgtgagcactgttaacttgagacttattcccattaacagactgagaaaggtttctactattatcttgcttattcaacaactgaaatagctgtgaaactggaggagacttctgagcacgagctgctttagcaagaggtctaggtggtggtggtggcggcggaggcggtggtgttggaggtgcaaagggtgaagaattttcatctcttttacctaaactgctagctggagacaccaaaaacttcggtaatggcggtgttggcggtaatcttgaaggagaaggtgatggtggagataatcttgatgactctactgctacctccttcttaaccttgggttgctctaatttgctagctattaacctctggatatctttgaatctgctgttttgatgttctttagctggctgattcaaccaaaaacacttgagagattataaccttatcataagcctaaactatgtgcagaagcagaatcaaaagcaatcttaattccgtagtcacactaagtcaattcaacagtaagattcttcataccttgtcgttagaagaaagagatgagatcttagcttcagctgaaacaagatcctgagaaagcttcctattattcaactcaagctctacatttgaattacgagcttcctctaactccgttttcaaattcaaaacctgcaactgcaaatccttaatcaacgactcattcactaccagcttctcctccaattcctccattctcttcctcttctcatcctccgccgccgctgtagccattaccgtctcttcgctttttcgagaaatcggccgcctcggacaaccgaattgctctacaaccgccggacgattcacagaccgagctctctgaggagccaaaaccgccatctcctcctctgcagatttcgctcttttcagcagaattgatcgccgtttcgctggatcatttttcacatcgtaacctgacgatttcggtttacctccggtgagaccgttatcgtcttgtgctctaggtttagagatcactgagtagtgcgaattcgcagctctcacgcgtgaaggagtagtggaggtggtggaaatgcgggacataactaacaaaatctccgccgttgacgacggtcgccggcgagaagactcgtggttaacgtcttactcagcttttgacttgtaaaaatccaagagacgacttcgaagctgtcgcagaagaaaacaacaacaatattattaatcaccaatcattagttcaataatcttatgcaactaatcttagttcaataatcttagttcattaaacgttaataaattattaatcaagcaaataatgaaggaatgatccgtttggaggaaacagtgggcttgaggcccaccaaatgttttgacgactttgagaataagacaaaagaatttagtggtgggccaattttgttttttgtcatttgtttttcagatgacgacgcgtcctgtccacgcgccatcagaaacctaacacttaaaaagtagagaaaagtgtcgtgtatcgatatagcttataggtgtatgcgtgtaattgcaagtttgcaaccaaacaaagttatggctatgaatatgtgtttgattttcctttaaaatttacaatgtgttaccttaaattataaaatgacttacctaactataaaggtttatacaaaatttataacattacaagatcattgaggagggtatgaacctaaacgatataatgcttatactcataatagttgaaacaatgaaaaccagattattgtgcatattaaagaatcagttaagcgagagtgacccactaataatttgtctcacgttgagctgcaaatggaacaaagagcatttgacgtttatgatgggaccattatgtttggaataaaagtttgtatggttattaagaatgactaaaattaagtaaaaagaagaatagcttatttatatgtatgtgggggatgaatttaattagaaaagcttgaaaaacatgtttaagacaaaagggaagattgaggactgaggagtatgtcctaatcatactcaaactcaaagctgttagtgaccattggtttacaagttaagttattgacttatttgagcattttggagactttgatcataatttgatcatataatgatatagaaattatttggtccgtaaggcaattattgggctatgaagttgtgccttgctaggtaaatctacttgcaactatctgcaattttattgggttctatacgggaaagaaaattaaaaggcaaggaaaagccttaattagataggaaatcataactcccatatgatgaaaacgagaatatcataactacatatgataaaaaaaaaaggattatataatcaaaattgaaagtgaagaatggaggttaacatatatttaaccaaatttgtaaatatgattatgttctttaatgttaaggcatattgttaaacatctaactatataataagatatcttgatgtattgtttccgatgtaaattttgtttttccggactgttaccaatcatagagtttgttttaaaatggatgtgtggttggcaaaaacaagtttatatatgtttgtgtttaatgattaaatatagtatgtcctcaaaattttcttaagatataatatttaatttatgaagtaatctttaaggaaaacgcagaagaagtaaagagttatataaaataaataaacaaactaaaatattgtgttttagtaagacatatacataatacttgatcatcgaattaaatatgaacacaaataaatgttaattccgaacctgattccgaaacgtagcaaagtatattgtatatattacattagtgtagaaaagatatcataagtacgtactatatataacatggttatttcaaaataggatagatagatatacgtaaatgatataccatgtaaagctctcaagtaagaatcgttaagattaatttgcgtgtgttgtgcgaaagaacttccgtatttgtagattagtgggtaattaaagaaaaaaaatgaaacacaatgtagtataggtaaaactacaacatgagatttctatatattcaagtttggtcgcagatgataaattgataactgtggtttagtgaaacaaaaagagtttagggtttgtatataatagaaactaaaacccatatatccaacaaagacattgaccaaagatcaatgaaatcgctgtttattctccttaattttcaaaaagagatatggagaggcagatgaaggatacatatcacttaaggcattaaagagaaatagtaccttggagatgaaactctggaagaaggaagatgaatactggtgatagtcgtcttccccaaaaaaaaagctctttacattctcattaatgatgaggatgatgctcgctgattacacatgcagctcttatatgatgatattatattcatatgtgactatgtgagttctttatatctctgcaggaatgaaaatgaataggtttcttatatggaatttcttataaaaaataataatataagcttaatggtacgagagatgtcttggaagggttaaaaacttggggaaaccggaagaaaaatattgtttaataattaaagtataaggaaaacgaaagaaacaaaaaaaaaatcatgtatatgtaagtcatatgtagacgtctatttcataaatggagatctatttcataaatggagtacgaatgaaacaatagtttaatacggacaaaatcaggtgtaccctttttgtatgcaaactataactaaagatcgaataaaaccgaaaggataatgacatgtgttataaattatccaaattagaaaattggattagatgatgggtcatgttcctagaggaagagtatttttccgtatacctctcaattgaagtaaacatttccagagttatttatgccaatatcaatgatttagtatgtcatagactcatagtaaatgtttatttatatatttgccattttttttattttatggtttaacgaataaattttttgatccgttgttaattaagtcatcaagaagtttttttttagaatatattcggacatgataatgaattaatccaggaattttgtaagtaatattagctaaaaaatttcagtacttcacaataatgtattactaacaatcacctcgtgtatgaactatttgtatttgactatagaaaggctattatgtaattctcagtctgagcgggtcgggataatattgcaacgtaactaacatgtttagacaagccatcataaaatttcaatgtatgaagataattcgtaattgctgtactaattaaatttatgtaattttgtgtggattgacaaaattcgtctgtttggtttttgtacgtttgttgccatttagtagatgatatgtcattgggtaaattagcacacgaaaatcatttaatatatataataaacagtcattataacatgtatacgtaaattatattacgaattgtgataagtctagccacggggtttacgaccaaaagcaatacataaataataatcagggagatccatgaacttatatatacaaagagtgaggacacgagaagcaatatgtgtcaatgtgtggaagaatgtctccatcattaacctaattatattatatttttatgttttataatttttatggtcttctccgcttggtagttttagccttacagccattaactatcgtaaattagggtactaatacttgttattttttttggtaaaaggtgaaattttatactatttttagtttgtgatagaattacagagaaaactagaaacagattaaagcaatctacgtaaatataaaaacaacattacaactcaagatgcaaaggatcactactaagtggtcaaagccaaattgcaaaaagaaacaccgattccgaacccgcgaagctcagaaaattgtgtggttgccacaaaaccgaagaactggaatcatcatcttaattgccacgagcaaaactatccaagatccgtccacaaaacttcaagatagaagtctacaacttctctgagaactaacgcaaaaacgtaaaagcaatcgtggacttctatactaactcaacaagatagcaatgccacttagacttattcgccgcctctattcaacattctgacaacctagccaatgctcgttatttgcttattattagttcttacgtacgtgttttatattcgttttgaaaaacaaataattgtcgttaataatcagctaataaatagtataaatttatgacttgcaagtacaagcttgttatatatattacttgcttatatataacttatttttatttgaatgttttgtgcttaggatgcttgaaactttgaatgttttgtaatttctattgtatatgagattttttttcgattcaagttgcaattattttacaagtaacaagcaatatcaaattatttagcaagtaataagccaaatcaagttatttagcaaataatcatattttatatgttataacaagtccaaaattcatttacttgaaaggggcaaaacgggtcagaaggccatgcctaggtatttttgtgctcggtgattgatagtatagtcgtgtagataatttatttaaaaacaatagtatacataatttgttataatattatatatatatatatatatatatatatttatttttatatagagtatactataaataagattaattataaaattaaatagtataatatttacatgtgcataacataagttattacctagtataatttaaatattcatacatgtataaaattaaaattttccaaaaatatgtgataacttgacatgtaaataacatcatataaatgtttttaataattaatatagcatatatgaattaatgcttaacaaaatcattgggctgggcctaaagaagtgcactacgaggagtccggttcaaaagacacgacttgacccgaccgatccgacccgggtaagaggttagcccaccacgcaacgtccgtcggggaagataccacgcgacggaaacgacgaacacgaacagcggaaatcgtcaattcaatctctcagatcagttttggaatcacatataacaatgtcggcggttctcacagccggcggaggcttaactgccggggatcgcagcattattacggcgattaacaccggcgcttcgagtctctcattcgtcggctcagccttcatcgttctctgctactgcctcttcaaagaacttcgaaaattctctttcaagctcgtcttctaccttgctctctctgtaagtttcccgttgttgcctttcgctgattgtgctagatctaggattatgtactgttttgcttccttcttcttcgattattctcactgtgaattgttacatcgctaagacgttaagttccattgcgttctgagatgagtagtgagggttcgagctctattgctgactaatggcaatgtttttaattgttgcaggatatgctttgcagtttcttcctaatcgttgggtatgtttatctactactattggttctggtgaatcttgttgagattattttgataagatgattgttacatcttgatcactgtagggatccttcaaaggggttcatttgttacgcacaaggctacactactcatttcttctgcgttgcttcgttcttgtggacaactacaattgctttcactcttcatcgtactgttgtcaagcataaaactgatgtggaggatttggaagcaatgtttcatttgtatgtatggggtatgtaaaatgatactcgtgggtttcggttctcaattgttactatatccacctagggttaaggattagaatgtgttagtatcttctttggtgatttagtaagactctgattttagttacttttctcagggacttccttggttgtgactgtcatacgttcttttggtaacaaccactcacatttggggccatggtgctggacgcaaactggtcttaagggaaaggcaagtgagaatgcttagttgagcataaagatttcaatgcctatcaaaaggcatttgaacttttttgttgcaacgctgggccagatgaatgtagactagtattttattcttcgttactggaactcatatcacctcttgaattttgcaggctgttcattttttaactttctacgctcctctttggggagccattctttacaatgggtttacttacttccaagtgatacggatgctaagaaatgctagacgtgtatgtaactctctcatctctaataacattgtcttctgaaagtagttcacaaacgttactgatacacttggctgtgtgctgaaatggcaatgttaatttcagatggcagttggaatgtcagaccgagtcgatcaatttgataatagagcagagttaaaggtctgtctttattgccaatactagttctgtatcatgtggctggatttcatcattaaaacctcactgcttgtttcctgaaaccacaggtgttgaacagatggggatactatccactcattctaataggatcatgggcattcggcactattaaccgtatccatgatttcatcgagccagggcataagatcttctggctctcagttcttgacgttgggacagctgcactaatggtagcaaacctatcaaataaataagttataaaattcgccatagatcatctttgctcttcccgagtcgatgttctgaatgttgtattttcagggcttgttcaattcaatagcctatggtttcaacagctcagtgcgtcgagcaatccatgagagactggagctgtaagtcaccaccgatctctttggtttgctatattattcccaataatcaatgaagcttgatttttatgaaacccttggtctgctagattcttgccagaacggctatatcgatggcttccaagcaatttcagaccaaaaaaccatctgattctacatcagcaacaacaacagcgaagcgaaatggtatcactcaagaccgaggaccagcaatgacactaactttcaactaatacattggaccgataacaagaaggcggcgatgataatagcgtttggatggagagattggtaagtttcctctatgattgttttgtctttaatttccgtttacatggatcagtaagtgtgttttgttttgtgtttctctcttagatatggtgaaggggggtgcacaacaggttgtcaatgtatatgaaacattctttgggaacacgaacttaacaatttatttatttttgtatgaacttttttattgtgaggtcttctgatcttgatttgaaattaacgaacttggagttcttggacgacaatgttgaagagttttgttacgtaagtcatatgaaaatactatcacttaaaccggcgccgtttctaaagaggaattacaaaattcgtatcaatcttcaaaaccctagagatcaccgcgatttctttctccccaagactgaacgactctgtcttcaaactcgggtggggattgagatgggtttgtcttttcgtctaacagtgatccaacagtggagaaagaagaaaagaagacgaagccaagcactactggagattccaacggatgtggtgacagagattcttacgagattccctgttaaaaccctaatggattcaagtgcgtctcaaagctctggtcatctatcatacgctctccatagtccatactttaccagtcgtttcattaaggtcccatctcaacgaatttacatttgtgtatcacatttcgaggactaccgtccctctaaaatcctatcattagctccatccgctactagtccatcttcctcctttgttgttgaccatccgagataggggaggcaagatcttacaaaaacttagtggcttcatctgctacacatttttgaaaaaaccgcgaatgtataaccctaccaccagacaacttgtgaccttgcccaccataaaattaaaaaccaaaacctcggctccagaaaggtcgaagtggtgttactattttggacattaccctattaacgaacagtacaaagttactctgctcagttgtcgtcggatattttattttatcatcagaccattgggtctttgacctaaaacctggaggttcgtggaaaaaggtgactttgcctcccgtggacttttatcctcaccttcctcttagacaaggactatcattgaatggggttatacattacctggcttggattgattcgtctaattatatggttgtgagcttcgacatcggatatgaagaattcaaaatgatcgagtacctcacagggaagaagatgtgagcctgcatagagccatcaagaaggtgtgtcttatagaatatggcggaaaagtaactgttttttaccataccgatcttgaagacaagagtacagtgaatttatgggttctagaagatgtcaggacaaaggagtggttggcgaaaactctggttttgcaaccttgtccgctgcatttggtcaagaacgttagattggattggagttaaaaggtataactcaaagtggcaaggttataatgacaccagattatttgtttgatatgttgtacattctttgttgtgatctgcaaagtaatgatattagagagattaaaatcaaaggtatacattaccattatgttcctaagaagggtgaatttgtgcctactcaatttagtttgatgtttatggatcagagatcagagtgagagcgtcatgtacttaaagacttgaatattgtagctctaatgcatgcaattgagaccataaaagaagctgcatctgtggtttgtgcaatacagtaacctttcaaaaatgaatatgggtccataacaagaagacggcgtatgatacatagcatttggatggagattggtaggttatttttgttatgcctttaaattccttatgttaatgactaccagtctaccactatgttgtcttcttcttctcttgtgatgtagcacaaccattcgtcaatgtacaaaaataacattctttggacacgagagatcaaaggaactactgcatgattacactttatagattcaaatgatgcaatctcaaacaaagtacaacaaatacatttttatacaaaaacaggtgacaaactttttctagtactattagtactgaacaaatatgtacttcaagaaaaaggtgaaatctgatgcctttaaaacattactacatagactacttcacacaaatataatcaactctagttgacctgtatacaaacctcctcctaatcatttttcttggttatgtctttttttttactttttgttatttgtttcaagtgaactttatccttttaaaaactttctcgcatctgaaaaataacaattgaacaaaacaaaaacacatcatgcgaaatctaattaaatcaaatcgatcagtgaataatagtaaattgataaacaacagataaaaacaatcggatcatatccatctccttacacaatttcaatgcttttccctctttttacaaatgcattgattaatgcagtgaaagtgactaaaccagggttgattactgtttccgcttcatcatatgaagaacaaaaaaaatcggaaccccgatgtagtcactttcaatgcattgatcgacgcaataaactggtcaaaaaccgagatcaagcaaaagagaagtactgatcaaagcttcggcagaaacaatggaattttcatagaagagaaggatgagttagagataagtgagagaaggttgtatataaatatgaaggaagaagagaaagagaaaagcggcggagttaggtcgaagaaaacaaagaaaccctaattcagtaatgggccaagatgtggatacatgcggcccaaataaagtttacaatttataacacgaagctaattaattggtgtactaccaagtaaacggaaaaaagttgcaactacaacaaggctcgtcctcgtaagcatgacgagtgtgagaatcccgatgtaattcttaggcctggggcataatacccgaactcgaagaaccgaaccgaactcgacccaaaatacttgaatccgttttatttcggttccggctaattatccgatcgggttttgttttcaaataactgtgggtatcgggtattacccgaaccgaatctgatactcgtgggtactttttattacccgaacatatatatacatatgaggacatatatgcactaataacttgaatctgtgacttgtttaatgatttgagttctggaacaagttcaaaacaaggtttacttcttgttttatattattgtcttaagaaaaaaaacttgttataattgtggatttttcgggttttatgggtacttttatgtatgtttgggtatatttggacaaagtttgggtaagtagtactcaaacccgagatagttttggttatttataggtaataccaaaattacccggacccaaagtaaacccaaaccgaacccgacccaaaattgttaatataaccatacaggtccaaaatttctaaatccgaaaaacccgacccgaatacccacatgccaaaatctagtaattctctttagctttcttgttttctaggtctgatgatgtctagccatcttcccttttctgttccctaactagcaatctttttttgttgcgtctagtctagttggagataccattactctgatttttacctatgctcaggtgataaaatgtgtcgtaaaaaaaaataaaaaaatttgtttcttcaaatgtattaaaaaaccctatctgatcgttacgctaacttcaagctcttgtagcaattaccgacgtattatataactccatctgttttcaaattaaggttttgacacacatattaaaaaaatcattttatcaattttacctttttaataatatgcttgacagaaatatatatatacttgacagaaaaatttattggtcaatacgttaaatcactagggataaaaatgtatattttatcataaaatgatattcaaaatgtaaatcgagaattattttaaacaaaatttagattctaaaatgacacttaactgaaaacaaaaagaataggataattgtgtttctctcattttaacactaggttataagcccccatgatgttgccggggaactttttcaacaaaaaatttgtattgcaaaagtacatttgattgtgtttatatattaagttattattctgacgtatatcattagacttttgttaccgataatatccggatctaactcgctttagcgaggtttcgatctcaattccttggcgcttcattgttttcactgattctcttcaaagcttctctgtctctccaattgcttgaggaattaacatcttcatcacctccaattgctcaagataagaacataattggatttagatttacatcaaggtggatgtagtcggtggtggagcctcctcagaattggcgatttcagaaaaacttttgaagctgtgctacttctcaatccggttagagatcggtagaaggaaagcggatacacatcgctctatggatggttggcagcggctgatcgtactctcggtgatgtttggcgactcattgacggcggtgctcacattcacgacacaaagtcaagcgtagacacgtcttgtacacttgttgtttctaagttaattatagttgggcctaacatttacgtgttcaattatgattaaatgggccgttttacttgcttgtatctactaaactaatccttctgtaattgtctttgggctttataatgaaaaatggccgacaaaaaagaaatattaagttattatgataatgaattcaaatatttgacatattacataaattctaacaaattctaataataaattcaaatttgaaatactaacatcttttatgaataaaaatgtaaaacaagagaattctgattaaaatacgatgtttaaaacattgttttcatgtaaaatatttatcagtgaaataatacataacaaaaagttataagaaaaatgagacagtccgaaaacatttctaggaaagtgataaaattaaatttcataagtatttttttaaattaataattctaaaaacaagtcaatcttaaaaaaatatatatgtttactactttcaaacaattagtatgtataagtgaaataatgtttttatcaaattaacaataaataaagttgaaaacatatgagtggtaaatgaacgttcatagttaaaaggtacataaaaaatatctgtaattaaaaacagaaagaaatgtgactctctaaaacatttttataaaaaaaaattccttgacaaaaaagggacattttcccttttaatgtacatattttcaaaaactattccacttagctgtacattttcataaatgccctacactaaacttgaaaatatttataaggtttataaggtacttctcaatactcggagactcgattcaattatttatatggttttataagatataaagatatataattcaaaaaaataaaatctttaaaggtatttgttgggactactacttttataaaaaatggtagtaatgcatttggtactactcttatttcacacgatccaggtaacagtttgataaaatctactaatatcactttgatatcaaacctagttggttagttgattaagggaaaattaagaaactcaatttgtgacaaacgcttagaacttagaagagattccttcaaatagagagatgatggttactatggaccgacataatctcaccaatatcatttttaaagtgttttaatgcttcgagttctcttcaaaaatatttttatttagtgatttttttctgattgtatttgtctttaattattacccataaaagtcatttataaagaacaactattgcaacagttaatcaaatatactaaacattttatcagttcatcaaatatatcaaatgacgcaacggttcaccaaataaactaaaggttacaaatattcataatataaaaagtggcattaattcaattaaacggtagcaacaattcattatatatatatacatctctacaaaaaaaatatgcaactataaatataataaatactaaatgttacaatggtttgtcaaataaacaaaaaagttgcaataattagtccaatttattcaactttttcaactaaatgttgtagtagttcaattaagtgtttgcgaaaaaatcaatatatattttagtaactaaaaatagcatataaactaataatttatgaagagcgagagatgcgatagtatatattaaatataacaaaagctgcaatagtttgtcaaataaactaaaggttacaaattttcataaaacaaaacaaaaaattgcaatgatacatcaaataaactcatagttgcaacagttcaactaacggttacaaaaattctttaaatagatttaatacttaaaaattaaaaataataatttatgtagctacaatattatattaaaagacgaaactattgatagttatattttacaatgattcgttaaaaatgagacgttataattgttcagctaaacggttcctacaattcatttaaatatacaatggtattgaaaataaaaataaccttatgaaaattacgataaaaagatgcaacagtagaaggaatttattcagaatgctattattatagaaaagagtacaatggttcgtcaattaaactaaatgttatattagttcaatttcacgattacaacttttggaatttttaatatatacgatcacatatctcagtataatgtttatttagtatttaataaattaactgttctttaattaaactaaataatatttttacttttttttggtttgagattattgtagttaatgcctatatggttgcatgttctgtcatagccatctttgaatccttgtgttgtatcgaattcgacgacaaataaatggttacttgaattccctttagtgtcattgttgagcaaacccaaaaactatctccggttatgatactatttggggtgagagagagaattttaaggtactgcatgcgttggcttgagcttgtagagattataaaaaaaaaaaaaaaaaactaaaagatataaccattaaataaatggaaaaaactagattaacccaaataatgagattaattactagaatgtcttaaaaaatattggagttaaattggttattttttttttgtctaaatacccttttcttacgtgttgaaaataaaataaatgcaaaaataccctttaaaaataataccagcaattttataaaagtctatcgtttagttacgacagatttatttttattccgcagacttgtttaactgcgacagatttttttatggcatacttttttggtcgacagacattttataagatagtcatgacagatttataaattataacagatttaatttgactgacaaattttttatttatttaaccacagactttcatataaattgaaagatttatatttttgtggatgtttttttacgataagtgatgacagttttataattgttaaaaaaaaaattcatattgtaacagatttgttgtcaaaaaattaattactagaatgacgcctaacgataaccgatttttttaaggttatgatagacttattttatgttataacagatttttgtacttttataaaatatttgtcgtttgatggctaatttgttttctaaaatataatgttttgtgttatgacagacttgttttatgttgtgatagagaaatttattttacaataaatctgttgtttgatggctgatttaataaagaagaaaataaattgctggaatgaccttaaatatattttatgctacgacagatttgtaatttgaaatccttatggtgaccgatttttatttttctttttctatgattttttgtaatagaataatactaactgttataacagtttttgtttctttttagcttgttatgacagatttactaaaacaagttaccatatatttaattcgtagagaaataaatatcgagataccattagggtttttgttaaaaaaacgtagcctctctacaaaaaaccgtggcctcctttctcttttgtttaacgtgaaacttttttttaatttcttttttttgggttttttctcttgttcatctttttcttttgggataatctcttttagggttttggagcaatagaagtcatatgttattatgttgtcagattttgtttcttcttattgtgtgggcctcatttttttattttatttttgggtctcacgtttttttattttatttgtttttattttatttttacaaaataaaattaattttaaatgctaaaaatatcagaaaaaatcagaccaagggtttttggttactatacacaaaatttgtgtcaatctagttctctaatcaaatagagagttattctagttgttattaactacatttgtgtcaatttaggtaattttctgttaaataaatggtagaatttctgtcattcaccgtaatctaacaagttttctgtaaacttttatattttagtaattaaaaattataagaaaaattaaagaaaagttatactcaaagatgcgatcgtatatattaattactaaaattgcagtggttagtcaaataaactaaaaattacaacggtttataaaacaaaaccaaatgatttgtcaaataagccaaatattggaacggttcagttaaacagttgtaattttattgaaatatatattagtaactaaaaattataatttataaaattttcgccaagagacgtgactatagataattaaatgttataaagttttatagaataaaccaaagttacaatagtttgtccagtaaagtaaatattgcaataattcaactaaatggttataatagttcgtttatgaaaagttacgataaaaagttgcagccatagaaaaaatttattttggattgcaattttctaaaaaaactcaattgtaatatatttttgtagtttatatatattttcatcgaaagacggtgatataaagacacaatacacaatacaaatatatttattgagattgttatattatatagattttctttctatttagatttgagtgatatatcttacatctagaaaatggccaaaatcaacctcaactctatctatagagtctttttagaaccctaactcttatttcttttattcacacaattttaattacaaacctcaattatgtaactgttagccaacctcccttcaccgcctcgtgacttccttggattctcgatctgatatttacaatgatccctctgatagccctttcgtcgtgtcaatttcaacgtctttgctttgaattagctgaagatatatattgttttttgccctaaggctttaatttgtttattgttaggtcggggcggtcgatgaagcaaacaattatggaaaaatgtagatgttagatctctcgaatcctaacagagagaatctgctaacaagaaaggcaaaatatctcttatatatagacagatgctacaccaagagcttgaagtcaatatgatcgaactgatgaaactaaggaagcagaataaacaagcattaaagatatgtcaaagaagtggaaattgtgtcatgtttctcataaattattggggttgaatccccactccttcaccttaattatcacttcttaagtttcttaaacgtagatgtacagtactccctccgttttatttcgaatgtcgttttaattttcaaattttattttaaaataagtcgttttgtatttttaatgtagatatttggtaagattttcagttttatccttactatttcaatgtattgtccaatgaaaaaaatagtatgatatatatattaatcaaaagtaaagcaataatttaattgttttcttaatatgcttgaagaaatcttaaactacatttataatgaaagggaggagtagctactttctagtttcatactatttaagtatcaacaataatggatgtgatcccccaaaaaagtatcatcaataatagaacgaatgatagagggaaaattgcattataaaagtcttgttttcttattgatttgggattctattattttactatcaaaagcattgtatttttcatttttttaatcgagagtgaaacatgcatccatcttggagtgtttttaatgggactctggctctgtcgtttatcacttccaaacttaaaaacaaaaataaagaattaacacaaaaatccttttctatgggtagttacaactatctttcatcttttatgtttgtttcgacaaaattcctttgtttcataaaaagtgttgttttggtatttcttttttcacacatttttttatgaaacacagggacaaaactgaaatttagtataaaatctgtatcaaaaaaacctaaacgacatttttgtcaattgaaaaatacaatgcatttaatatacaaacctttatatagattttttcttatttaaaaatgtgggatatttaattttggtaagtttagttaataaggataagtatatagaattaaaagtgtttgacaagatggatagtagaatttaataaatgaaaacaataaaaaagatgagaataattgtaggcttgatatacataagcatcaaaactctcttttaatatataagaggatacattatgagtcggaaataaaagtgaaataaaatgtttaatatcactaaattaagatatcaaaggaaaaaaaaaacatgatgaaatagctattttgatcatatttctagaaataaaaagacatatatctgttcataataatcatatggactatatatgggataaataattttaaactaaaaacatagataacgttttatctgtttctaaaaattgttaaggaaggttcttttcattttgttaattatggaaatttcgttatccaaaacaaaaaaaatcaatcaatctagaaaataataagtagagaagaagggagaaggaggaagcaaagagatagtggcgtgttcccctctccatattcagccgccactttttctcttcttctcctctaatctcgttcttgtatatatatatatatatatataaacacattaccataaacttatactctcttttgatccatctattgattttgattctctgttttatccggaagtctaaattggatggtgataaagggaatgcgtgttggtaagtacgagcttgggaggacactcggagagggaaattccgcaaaagttaaatttgctatagatactcttaccggcgaatcattcgccatcaaaatcatcgagaagtcgtgtatcacacgtcttaacgtctcttttcaggtttccattttcgatctttatttctctttttggttaacggtggattttaactcttacctactcttgatttttttttgtgatttttatagattaagagagagattcgaacactcaaagttttgaagcatccaaacattgtccgattacatgaggtaataatactacttgtaatgcttcattttatgtagaaactcaattactgctcgaggcaatatgaattcgattcaaattttggtatcagatttttgagatatactttgattaaacgataataatgttttgatgaaagaccaaacattaaacctatgaaagtttttttgttagcttgcgtagaacggtagaagtatattaaaaagttaaccgtcattttggtaaattaatatattatttttcgttttgtttttttgtaactagttttattcgtgaccacgcaattgcctcttcacgttgcttattagccctacgtaacgtatacaataattattttcaaatactttgtcctcctgactaattcattggcagtcgacaatagatgtgatgaccatgacctattcaattatgaggtaggtcccaaaaaatcgacccatttggggtaatgaccatggcaatgcaatcatcatcacaatttccttatcgttgggattaaattccaatctttttcatgcttacctcataagcgataactgttaaatcttactcaaaactcgttttctacatttcaattacgtgaacacactttaatattttcaaatggtatttgctggaatgatagtggttgacttcaaaaaatttcaaaatcagaatgtctacattgacgattacttatcttgcaagcaaccaataaggtttggattttgaattaacggagacttggtcctcgtttttttttttgacaatggaattttattttttagtgtagatatatcacgtttgttcttcctaatttaggattctcctatctctttcaaaaacatccctaaaggcctaagcagattataatatccttgatatgcacaattctttattgttcacttgtaggtcttggctagcaaaaccaagatttacatggttctggaatgtgtcactggaggagacttatttgacagaattgtaagattcctattagctccggtgacggttttgttagttagcaagaggttggtttttatataccaatctttatagtctaaaaatatgctctgatgtcttattaggtctcgaaaggaaagctttcggaaacacaaggacgaaaaatgtttcagcagttgattgatggagtcagctattgtcataacaagggcgtttttcacagggatctcaaggtttatgtttacaagttttcttgacccattaaagctttaaactttttctgtagtgattggccacatgttctgatatcattgtttcctgttttgcagctagagaatgttcttcttgatgcaaagggtcacattaagatcactgattttggccttagtgctctgtctcaacattatagggttcttaccatatattcaaaaccttgtatatacatcagcaaaacgtgtttcaaacttttgtttggttttgacatgataggaagatgggttgctacatacaacttgtggtagtcctaactatgtcgcgcctgaggttctagctaatgagggctatgatggtgcagcatcagatatatggtcatgtggagtaatcttgtatgttattcttacgggatgtctcccttttgatgatgcaaaccttgcagttatttgccggaaggtaccactcttttttctttccttttttcgattgtttagtttctgtttgaagaaacatactcaaaggttcttttcagatattcaaaggggatcccccaatacctagatggatatcactgggagctaaaactatgatcaagagaatgcttgatcctaatccagtcacgagggtgacaatcgcaggtataaaggctcatgattggtttaaacatgactacactccttcaaactacgatgacgacgatgatgtatacttgatccaagaagatgtaagaatctatttctatctcatcatgttggttcctatgaatttggatcaagatcgagcattagccttactcgaaaagtcttgtctttataggtttttatgatgaaggaatatgaagaagagaagagccctgattctccaaccattatcaacgcttttcagttgattggaatgtcctcgtttctcgacctctcaggtttctttgagacagaggtaacctaaccatacattcttgtccacgtttactctgtttcaagattgtcctttgctctcaataaacgtttgttactttgttcactgatcagaaattatcagagaggcagataagattcacgtcaaatagtttagctaaagatttgttggagaacatcgaaacgattttcacggagatgggcttttgtttacagaagaaacatgcaaaggtgagatcttttgaatcttttgctctcttctttctcttgtatgctacatagcttgaggttttgtagttaagtaatttaagtgtttcttgaactgatgttgcttcagttaaaagcaatcaaagaagaaagcactcaaaaaaggcaatgcggtttatcggtaacggctgaggttttcgagataagtccgtccctgaatgtggttgaactaagaaaatcacatggcgattcgtctctatataaacaggtaatgatgcactcttgtaacattagttgatctttttattcaatcttgacccaaaataacttatggttttcggttgatgcagttgtacgagcgattattgaatgagctgggctcatcatcacaagtacaggagcttttagcgtagccaatagcagaaattatgtcagcctattctaaaatatttgaatccgggatgctagagacattttcaatgttcttgatcactggatctatgtacaaaaaactatatttttttgtgtatatttttagttagttcattagcttagttcaggaccggtcctgctcttgtaacacagcttctttaaattcatgtacctggctccttatgaagatgctcatagcagcaattcattttttaaggtggtaattacatcagtatactccctccgtttcataatataagttgttttagatcaaattttttgttttactttataagttgttttcaagtttctataaaaattatagggaaaaatgttatttaatacctcaacttacaaaaaatggccaaattaaccgtgaactcgtgaaatggccgttttaactctcaacaaaaagttgacttctgttttaacctttaagtttgcgttgactcggcctaattaaccaccgttaaaaatccttctaacagcgtaattgacagccgttttagtccgttaagcatctgttactatagtcttacgacgccgttttcgtgctaaagagaaatcaaaatcgagaatataatttctcaaaacaaaatcaattaccctaaacccaaatcgaaacctaatcctgcccccaaaatcaaaatcgaaaccctaattgcttcaattcgttttctgaaatgccattagttagaaagaatggcgtcgttatgatgattggatctccaatgcttcacgaatcagagaatttggtgggagatggagttgaagcactaccgcgaggagaaagagatgaaattggagaagaagttgtgggtgaaacgaatgtggtatctgagtcttgtggcggagaagagggagcacaagatgcagctaaagcaacgccggaaggagaagcagatcgaattggagaagaagctcgaggtcaagcgaatgtagtatcaaatgttgatgtggcagatgtggccgaagttcgttctccacttaggcgaagtaaacgaaggcaaatcagattggaagaagaagctcacgatgcagttgaaccaatgccggaaggagaagcaaatcaaattggagaagaagctcgaggtcagtccgttgatgtgggaaatgcaaccgcagtttgttctccacttaggcgaagtaaacgaaggcaaaatagattggaagaggaagctgatgttgcagttgaagaatcaactcgtcgtgaaattggacaagaggaagaggaagctttaggtgaaacgtcttgtggcggagaagaggaagctcacgaggaagctcacattgaatcaggcgttgaagttcgtgctccacttagacgaagtaaacgaaggagaatcagagatgaagaagaggaggatttagaggctgaagttcctgctcttgatgaagacgatgactgtgcagtccaaggagatgaagactgcgatgaggttgatgatgcagtagatactaatagagaagaagatgatactgctggattaggtgtcgaagaagatggtaacttagacatggaaagagattttccagaggctaatggagaagaagaagctagtgacaatgacggcggagatgatatatgggatgaagacaagattccagatcctttgtcctctgacgatgaagatgatgatagagtagaggcagctcgaaatgatcgtcgtatcaccttaacggatgttctattgatagcacaaaacgtcgtcgtattgatagcacaaaacgtcgtcgtatcaccttaacggatgttctataacggctgtcaattacgctgttagaaggatttttaacggtggttaattaggccgagtcaacgcaaacttaaaggttaaaacagaagtcaactttttgttgagagttaaaacggccatttcacgagttcacggttaatttggccattttttgttagttgaggtattaaataacatttttcccaaaaattatatattattttaatattttatttaatatttatattctgtagtctttattatgattggttgaactttttaaaaataaatatttttaatctgcttgtttttaactgtcatatatatattaagatgtcaaaaataaccggaaatatttgaaatatggcttatagaaaagttgcgtaggtcctatagggacagagtgtagcacaatgtggacgacattttcagtttttttcttcaaacggctatatatgatctaaaacatggtggagcttcgctgtcaaatctctctgttttttttaataatcaaactaatattatactttttcaaataagcaaataattacgagattagcctcgcactgaacttcaattctctctttccttttttccgttcgatgagagcttaagctctgccgcgttttcgttctccgatctttttccatttttatcagtttcttctcttccaaattagggtttttcttttcagtctttgggaatgattttgatgcggtgaaaaagttttttttttttgagggggaaggatttctgggtttgctcttagggttttgtcttttcaatcgccggagcctgaaataatccggcagatatggcgtctgaattgccgatgagccctcatttggagcagattcacggagaaatccgtgaccatttccgagccctcgcgtatgctttctcttaactatctcttcaatttttcattcgagtgtacgttatcgacaagactatagattttttgggaactagatttgttaggagattgaatttgagtttcacagacgagaaaataagagttgggatagtgaatctgaggcacaagtcttatgatttttttctttaaaagtgagattcaacattgatatgcaggaatggcttccagaggttggataagatcaaggattctagtagacaaagcaagcaactcgaagaacttgctgagaagatgagagactgtaaaaggtattcactttctccaagatatcagtttttttactactcgaactttccggtgttagatgagggattgaatttttcatgagaactaaaatgttgtaagtctattggtgattatgtttttgcattgtgggaaaatgtattatttgagatggatgagatgtgtaatcatgagtaggaaagagttttttttggtgatcaacgatttttaaatctctgcgcttcacgttaggttggttaaggagtttgatcgtgaactcaaagatggggaagctcgaaattctcctcaagtaaataagcaattgaatgatgagaaacaatctatggtgagtttacttcttattacttataataatctgtgtgttgatgaaatctatggaggacatgatactttttaagcttcgtgttagtgtgatatttctgaagttagtattggaatataaagttcagctttctcgcctcacttgagttttgggtcaccatcgaaaagcatgttgattcagtggtatatcaatgtagattctgagtgtttttgtgtgaatctctcgatttatctaccttaatttctcgctagcatctggttgttatgtcttttcaaaatctgcttgttgatatttccagtgatttatgtgacagattaaggaactcaactcttatgttgcactaagaaaaacgtaagtacgtctacttccaaggagcttcattgtctgtccctatatttgattttctcatataccaatccttttagcaaatgtatgtttttttatatagagatatagatcggtatgtgttaatacattcccatttgttgtgtgacttcaggtacttgaatacactcggcaacaagaaagttgaactttttgatactggagctggagtcagcggtgaacccacagctgaagaaaacgtccaaatggcttcaagtgagtctgtctaaatatgtcatctattcagttgattttcttctgcaaccagaaaaagtccaaaatttgacacattggaagcttaaactgttttctatatatcagaatgggtaggatagttagtcctgcacttttggctaatggtttggtatcatttgatgtgtttcagtaagtttctagtggagagacatatatgacagtaactgtttacctactttaccttttaatgtgtttatgttggtggtttgatgttagtaaatttctagtggaggatcatatgtggctggatttctaatatctacatgtgttccaagaataattgtccttgaactatcctgtggaaaaagtgtggaactttatgttgactcttgttttatcgtttatatatatgtagcaatgtcaaaccaagagcttgtcgatgctggaatgaaaaggatggacgagactgaccaggctattgaacgttctaaacaggtaagttacagaaagaagtatatctcactcagtctttgatgctatgtctctagtaacatccagtgtttctttccaggttgtgcatcagacactcgaagttggcactcaaactgcatctaacttaaagggacaggtaacacaaagcattcaccatctcttctcgatattcttatcaggtgtagttccaaatatgctgacctaaatattttcagacggatcaaatgggccgcgttgtaaacgacctagacacaattcagttctctcttaagaaagcttcgcagctggtgaaagagataggaagacaggtttgtatgatctctcacaggacataagattctaagacactgcaaaagctaaaattgtgtctaactattatcaccgtttcctttcaacctcaattctttcttgtcacaggtagctacagataaatgcataatggcgttcctgtttctgattgtctgtggtgttatagctataatcattgtgaaggtaaccattgcactctccaacttttctcattacggcccaaataaagctatgattccttaagcaagttttaacactgcttaaataaaaacacagatcgtgaacccaaacaacaaagacatcagagacatccctggactagctcctccagcgcaatcgagaaagctcttgtacttcagagaatagccttttggcagggccgagagggaaggtttggtgcatattacacttgctgttgcgtgtgtgttcattctttcatgaaagagggcttgtttatgtcatttaaatttgagctttcattagagttttgtatcatatatcatcattctttaacttatgaccacatgttgtataattttataccaagttcaatatattttataagatccgttttattgtccaagacatctaaggagccagtggtaatcatattatagtaatagatatgttctacccttagttttttgaacattataatgatccacaaatttgtaaaatcagttaaacaaaatttatagtatttccagctaatatagaaagggaaaatatcaaatacagggccacacactcagaagtcagaactgtttggatcataaagagtagaccaaggccgggtccggagctacgctgtctagtgaaaacatttataactttcagagaccctacaaataattttgcgtttcttttttttgtagaactaacaatgttaagtaatccgaggtaaattctatttaaaactgtttgggttccaaaagagataaaagacattttcacctgagaagtgaaacaacataacggtcattctcagactgccgtgtggtttccaagctgagtccggccaatatgcgacaaccgcgacgttatcagaggggcttcttcatcgttaagctccaatcctctggggctccccccatctgacgaattcttctccttccagtcctgctcaattatttggaccaaatccttatataaatatacataggtgatgcaacataagattaggttttactttggtgactacaattccaggaacgacaaaccgagttggacctggattgaacacccttttctactctccagagctagtgaatgaacaagtaaaattcagtaaacagattaatggcctgtaccttcgtgattcgatctgggaggctgtcagtggttggttgaatcgcttttacatccttgatttttatgtaattgtacattacaacaccacagagcgctgcaccaaacacatatgataaggagaagatagttaacaatgcacaacttttagagctcatccaattactttttgtgatagaagaaacaaacctatagcatatccagttatattcagcccagtgattgtggactcaggaaatatgacagtggagagggctatgagaatccagtctttgagaaccccagcaacccggattgttacagcgcctgttcttccgattactaagaatatggagaagtttaaggcaagtgcgcagagagcgtttgagaaaaagatccagaagttgaattggatctgcgagacatctatatttggtttctccagcacataccaaggcaaggacaggaaaacaaagctgcacaaaatcaagaaagattcctaagtttaatgtgcactagagtagattctttgcatctagctagaaataatacatggtcttaataagcatgcagtgatgcaacttagtaaaatataagacaacacgaacacgaggtcacatcaagtcaacgaactgacgaagtattaggacaagtattcatcttaagctgaaatttaaataagaaaggtttgagctgtgtcaggactgcgtacctgcatggagctatatagtataagctggtgactgggttcaacgtcaagccctttttctgaagaagaacttgagttagcaccagtctaagtgcttcagcaaatattcccatgacctggtagaccgtgccgattacattgaaattaatttccccataggaggatactacaactccaacactcaccagcaccatgttcatgaacacgtcacaccttgctttgtccgtgccacaaacaacggccataagaaatgttgctaccggcactgtcattccatattcatgtgttaaaaagctttgcaacatgatcagagttcagaaactaatataggttttgagccaaaaaagaatttgtgttttcacatacttagtgctttgagcatctgtatgaaagcaactgaaatgtgcaaatatgcagtatttccaaacctgtaaaaaggagtaaaagaatactcaagaaacaattcagacagcaggtatgacgcaatgtcaaaactcagaatatgaaatttacagtactaggagtccaggacagagagcatctataaacctaatatgtggcacaagtatatggaccaaagacttaccagagactggatgcaaagaatgcgcttataggcaccacacatgtcacatatctggagtccagaaaacatgttaagaaaagaaagagattatgaaaagtacagatgccaaaaaaatgaagtaaagaatacagtaagctggcttacatttcgaaagtcattttaacaggagagacaacctacatcacaaaaaagatacttattacctacctattataaggagtactcagcataagacgagcatgtagcatactccaaacaagtggacaaatgtaacattcacttaaatggaagtgtaatcgctgtaccttgaatacccgaataagaaggaaagccacgaatccagaaaatcccatatggatcattgtcaatgttataggaagtggaaaattgaagtatttcggagatagaacccactgcaagagaaatccaaaaaacgatagatactaattaaactcagcctctataatcagtaacaaagtctatgaaatagtactactctacagcacaaagatcttcctctatggtttcatttcatatacacaacattcgtatctaaactcaaatcctagtttatacaagctacaacatgcaaaaaatccacaaactatatgaagatctagataaacaaataaagtagaatctgcaatcaccttgttgtatagtataactccagaagaaagaataatgtagattagtaagtagatatatgtaagtacaagcgtcttgtttatcatcttcgccatttttttctcctctccgcaatcaccgtagatgcagttttctttcgatagttacaatatagggaagtataatcccacacacaacataagatccagagattccataaacgaaatctgaaatccaaaacaaaatcaatcggaaacttcagatttaagtttacacacacaaaaacccccaaaaatcctaaaatcactaaaggagaaatcgatagatcacaaatcagatccagagaaaccattacctcgaaatgagaagccgaaatgcgaatctcggctttgggaacaaacgttcgaatctagtttaacatagcgagagggatcagatacttcaaccaccgttgatgaagaaacttttccgataactccaagaagttttgccgatgataaatgcgtaagagcttcaatggcgaatcgatgaagcaggtgaagtgagtcagaaacttggagagagctttgctactgtgtgcatataatgctctctgcatatcggaagaagagagagatttattattaagaaaagaatattaaataagagaaataatgaaattggtgaaactaacgacggtggagatgaatttgcaggacgtaaatctttgatctaacggttatggttttatgtccttgacgggggacttacttcagcatatttttaaattagttatgaaataattagaattaatgggcccattatgttccaaaactatatatctcaacttttcaaaatcaaaattatatacgtatttaatacgaaatattattagataataccgtataatacaaatttgatgcgtgcattgacgaggacttaaatgttatttttaaaaagtatcaaacaaaaaattgaaaaaaaaaaaaaatcattttattgatgtttcaatttggattagattctgttataataaattttttgttgtctcgcacagtaaattctgtttcaatttggagtaaattctgttactttttatttagtttgatgtgtattgcaaattcctattataatctcactaacaacagtgagtaaattctgttaatttttatatatcttgatgtgtattgcaaattcctattataatctctgaattaaaatgtagtatcagaatttagaaacgagttttttttttttttaactcatgactttaccttgaacaaacaaaatttggtgcttatttattttgatgtgtattgcaaactacatcacaaaatacataaaacataataatgataaaatatagacatacacaaatgtcgaaaagtgggtcttaaaatgaagatttaatgagataaggtcccaaaaaattacataaatatacttcaaagtgaataatacactttgataatcatcatgaagtagtcgtagatgagatatgggggattgaatatttggtcaataaggattccaatgtggagtctgaggagaggaagagaagagtttaaaagaggttgaagtgccttcaccacaatgctcatgtctggtctaaaatctggatcataatgcacacagcgtgcagacaccgcagctagctgatcattgtatcagaccatatgcatatagcaaatgaaatcaggctcatgaaatgtttcagttgtcagagagatgaatgcggacaacaaatatcgctactttgattctaatgccagcagataaactagtcttctaagttaaatcatttttgctgcaatgaaacaatgtgaggaaaacaatgttatgcgattaataccttggcaacagctttgggagggtactctccaagtagtcttgcatcaacgcattgcttcactttgtctttgcttagtttaggggttgcctgagacaacacacaacatgtttatcattgagcagcaatatttcacttttatgataaaagttttatccatttgcacaaattccagctactttcttgttaactttaacgtcctaagttacatttctatatgcctaagaagggttttaatttactccaagatttcttgaagttttttttacttatttttacagactgatcttaaaagcttctcttgtcattgcaagcaaaccattatcagaaacaaagaagattacgcttaacaatacccatgtcactaaattttgttgtccacgcggtaaggtacgatctactggtttacgacccgtaaggagctccaacagaacaacgccaaaactgtagacatcgctctttgtggtcaatattcctgtcattgcatgtctgaaataaataactcaaaatgttcaaagaagacgtctatatatagcctctagattaatctgaatcaaacaaactgttcaagatagagaacatatttaaaaggaattactctggacagtgagaacgagatgctcctagtgccatacgacatgagtgaaggcgaccagccatgttaggggcttgatcatacaaatcaaaatcaccaattttggcaatatcatcatcaaacagaagtatgttgctagctttgatatctcggtggataacctgagggttcaccttcttatgcaagtactcaagtcctctggctgcaccaagagctattttgactcttcgttgccacgtcataacaggaccttgtagtgctcctatgacacctgtttgacctgcaccaaagaaacaccacattgcatagttttttccctcttgtatgttagtttttattgagtgagtgatccggtatccgagcaatggtttacgttaaccacactcaccgtgaagaacatcatgaagagttccataagtggcaaattcataagcaagaacacggagagggccatcaacacaataggccataagtgctacaacattttcgtggtgcagtcttgaaaccattgatacctgttaaagttttctatatcataaaacagaacattttccaaaggagtggttttgatgctggaccatttaaacaaatgatccatatatacggtctaagctaaggttagtaaaaactgaaatgatgtactttaattttagtatctacctgggaaagaaattcttgatctggctgcttagtagggtaaagtttcttgatggcagcttctttaccgcttttaagaacaccgtaaaacactcttccatatgaacctttaccgactaatacctctgaactaaagttctcggttatatcttccagttcatccactggaatggctggtacagcgataggctgcatgttaactactggttggttcattggtggatcagctctttgatggtggcgtccattgtaacctttacaacgattcaattcctattaacttacttagaagccaaaaactggacaatataagaaaaacaaagacaagtggtgcagttgaaatatgtgagctacctattgagttatgtgcttgacttggtccggtgtcagcaggattacgaacatcctcactcccacaccagccaaaacagctcattatattacacccttttctcacacgagctaacttaactgtaatagtacagaagacaaaatgtgacaaaaggtataaaaaaagggtttgatagcaccttaagcttctatctcctacttatgaaagtgtaagataatatagacaacaaacagttttgaaaacaagatttgcctatctaagacaaagagaagagagtaaaatggtaagatcaatgatcttatctctctttattactcaagcaattaaattgtcaaacacgaacaactgagacattatgttccctaaacctagaattttcataagtcaacgagatataacatagggatacggatttcaaacatgaaaagttagaaacaatcaactcctttctaaccctcgaaaggaagatcctttttgaaaaggttgtttgatatttaagcaaagtaccaaaagggaaactcgcaacagaggaagaagaagcataaggtttaccttttgctacaagaaaaaactaggaaaggagagaaagagaaagagagaacttgaaactctctattgggagtcgaatctttcatggttgtttaccattttagatgagaattttgaaaatgtcttaatgatcgtcaaccactttttaaataactagatgaccattgttgccttgttgctattttacttggaacaagtctaatatgagtcaaatacttaaaatacagcttcagtgaatcacattcaaattcccccaggcagccaaagcactgaaacagaggagatctctagatttctctaggcgccgtcgcatcgcatagcaacatgtattgcaaattcctatgatctgtagcaaaaacatcatctcaatgaaaatgtagtatcagaatttagtaatgagttttctgaattc

SEQ ID NO: 82 - DNA, 125021 bp, Arabidopsis thaliana
gaattccacaagttaaaccctaaaacaactgctgattgtttctccgcattcgaatttggcttcctgatgtgtaacctgtatttctacatataacagagaaaatgagttcttagtaacattcactgtaagactcaaagatctcaactttttgtttctttttagttacctgtaaatgactcttgacttcatcattggttaagccttcttcttgcatatgttctctaatttgtttaggagttgccactgttattaacacaacaaaacatacaaagatattacaacacattctgtatcaggtaaccaaactcaagaacacaagaagaagatcttttatacctcccggtccacctagctgttgcaatgcatcgacaaatcggcgatgcaactctggattccaacaccttctttgcttccgtaaagcttgctgcttaagaaatgctggttgttgtggtactgctggtgttggtggttgtggcatagagttagaagtaaagccacatgaggcaacaatcccttttcttcttatcgaactcgaacttaaaccgaggcctaaaccagtttccacctttggaatcaacaacataggagatttctcctcatttctctgcaacatttagatcaagcaaagtagcaaactcagtcctttgttcttaattaatcacaaaacatatcatccaatctttccaaatgctgtctcaattccagagttttaattaccttaatctcaagcttgctcttgatcttactagtgtgatcatcattagctttccattgctgaaacttcttctccctcattagctcctctcttttcagcaattctattcctctttctccttgaataggtttattaacagaaatgaaatctttcaacaatggttgagtctccatctctgaacatctcttatccttcagatacaaaatcgctgcaaacaaaaaaaacaaaactttcagcaacccaaatgattaaaaacagaggaaacagaggagagatcaatcaaaaacaacgaaccatcgtttaaaatctgcaaagacagaggaagctcaagttgacaactttcgagctttctcttctcttcttcaagcttcttaacatgttcatcaactttctcaaccgccacaacattcatcgaaactcctctcccaaagatcgatcccaaactaagctcatcacctaaagaacccatttttattttttctcgattcgaattaaaaactcaaactttttccagaatttggcatgatctcaaacccactctcttgatatcacaacaataacaacaacaacagagtcaaatagtaagagaatcagagtgtgaagaagaaacaacttgagatgagatctgtgtgaagcgattttatattagagggagagagaacaatgtttgtggaatcttttggaagagagaaagagagaagattgattgaaggaagaggaaagctagaagattctgtcttgtggggttttaatcttttttagatatcacaaaactcttcgtttcgtcgcgtatctctcaaattccatttttacccatttgctctgtttttgaattttacagttttactcgcgagttgactcattctctaactcataccaaactcgtgatttttctcaatgttttcagctccgattttttttttccttagattggttggtaaacataaaagcgtacaatatttttcttaggagatagaaaaaacgatatgcgcggtttgaagattaaaccgataacagtacaaaaagctgagaataacacttttagtaacgcttttgacgtcgtttttatgatttgtaactgttgaaatggtatcatttgtactgttacggtttaaaattacaaatcaaagatatggatactttaaatttttacactctaatttttttaatagtagattaaagaaagctaattttacgtgaaattttaattactaataaaaaacaagaaaaatagatattgttttttatatagttaaattcgtttaaatcattttgttatttgaaacatcactttctactttctattgcatttaatgttggaccatttaaatatctaattttatgtgcaaatagatcctcaacaatttaaattctgttgatgaaaaatatcttagttgttaaaataaatgatgtaacgtaatttgtacggttgttaaaagataacataacttagaaaattgcccttttgattgagatatgtgcgatcgcaccatcgataggataccaaaactcattttagattacaaatgcagttagatttgaatacatatgtgacttgtttttctcatcataacattggatttgaagctttgctagttattacactcacctctcttctgtttcctaataaatggttggtccaataaaattaacaacgacgttgttagagttattaaatatctttattatgttgggttttgatttgtgactctagctagtttttttttttttaacgataacaagatagtggttcttgtcggttaaaagcttaattttaaagatgtgtggtgcgtcaaagtcaaagataccaaaaccatgggattagcggcacaaagaaatgtgattgttcctccttttttctactttccgatttcgagcttttgtgaagttgaagattttgtccaaagaataacttttgcaaatgctctctagctcaagcaccaacagatttccgacacgtgtcaattagagaatgacttaggattccaaagtcatcattcttctataccaagttatttcttggtaactaaaaaacatatgaattgaaaacattttagaatgtcaatttttttgtcttccctcgttgttttttctagtaacatctctacgcattatatatcaaacgttgaaaataatttatcttcttttgaatattaaaagttagaattccagttgaatactcatcaaatatttcgacaaaacacattaatttgcttgatttgattagtttaactttgaacttttctacgaaagtgatgcttttttcgtcaatagaataatgcatataattaagcatatcatgtgcagagaatagtttcctctgacaaaccaacatgaaatatattttgttgaaaaaagtgtcccaatatattcttcgaattaacgaatgcgagacaaatattttggaaaggccaatcgaatctctatatatttatatatttgatgctggttagattctcgcctctctcatagatataataagaattttgccaaccagtcgtcgaattataaactacatttttgagtatattatacacaaactttttgatgtcattatatatataaaccagtctcaaatactgctgaagtaaggaccttacgttagatcacatcgatttctctcatctccattcgttttgtcgggtagtcccagttaaaaattttactttgtatatttttggggattacttcaacatcaataacttagtacttatgccacttatattatgaaactaggggttcaactaaattagtgtaaatcgtaactatccagagatttgaatttaaatctagatagatgaccaaaaatattattcttaacgagttagttactgcatattttcttattttatagaataagttgaattcgatcgtacttattatctgtacgaactactggttttcgatgtaatgcagttgacaacaccataagagtataaaacctaaagctgtcaattgggcttgaccatgaccaaatggtcttgtccagttggacattttttttctcttcacaaaaatgaccaagcccaaagtgaccaagcccaaaagtgaccaagtccaagagtgaccaaaaccaattatatatgtccatggacataaaaaaaatgtttaacatcacaataataatctaaaatgaccatgacaaacattgtaattagacatcataaaaacattttaagacaacattcttaagactatccataaagttcaacatgaccatcattcttcaatcttctcttctttctccttctcgttctcctctttgttctcttctaaatctgcagttacaaccattaaacaagagagtaaacaaatctctaaagcttaaaacaactatacaaacaagaacttgtttcatttaccttaagcttcttctttctcttcttctttctcttcttctttctcttcttctacttcctcttcttctccctcttttggaaagcctcgcagccaattccttgtgcagattaatgcttggatattttcaggaagaagactactcctatatttactaaggactccgctgcctatgctaaatgacgactcagaagcaaccgttgttatcggaatggagagaacatcacaagccatgcttgataactccttaaagcgacaagagttatctttccaatatgctaggacattaaaatgtctaaaagcagccatatctaatgttggttcacctaaatatatgtccaattctgattttccactactaccaactttttgagagacaaatgcataaaatccctgagaaaaaattcacacaaatggagcatatgagatacaaagctgccagatagaagtctaaaaccaagcaatatataacacttcaagtctatcaagcttaaagcaaatcaagtgcaaaaacagattaaaactacaaaaacagtggctaagtaagaatttacttacactgtaacctgccggaatgtcttcttccaaagtttctacttgtgaagaggaggtgatgctacttggacgtttcttgtaagctttaaaaagcttatagatcttcgaacgcacatgagccaatctggacttactagttaatcgatctagagtactgaaacaatattccaaacatttcaacttaagtcttggatcgaatacagctgcaattgcgagaatgtcactatactcttcccagtatttttcaaacttaagagtcataatttccaccatttgacaaatagtctcatcaactgaaaactcatgagctctcaaccaacactctatcttccaaacttgcataaaatataagttggctgtaggataagaagaacccgaaatcagatttgtcatttcagaaaatggctttaagaattcacatatcaactctcctctactccaatgaccaactagtcaaacccgtttctgaccgtggatctatttaggcgtagtccattaaaaccatggtttagttgggctagaatttaattgtccacaacaatattggttgggctaagcccatggtccttttgaccaattgacagctctaataaaacctgtagataacaaaacaacacaagttttatatactataattaattgtcttctcaaagaacttaataggaagcaaaaaccatgtttgtttcatcccatttaaccaccttaaaatcgagatcaaacaattttacatatgcaagttcaacatacctccaaacatttagactcaagacgtctatccctacatacaaaatctccttgccctctttttttttgggtatgccaaaattttgaatatacgccaaactactttccaaatcgtttgcataacaaagatgaccataatctttttccttacgacgtttgtgaggtccactgtaatcatctggatcaagactctgatatagatatcttaaaccatatactatcgctaaaccatttagagtatcagtagtccatttattatttttaatggaccaaacacataaaattgagctgaaccgtatcaatccattaaaacttctgatatccaatattattataaataatactaaaaaactccttatgatactatatgaatatcacttatatacatgctcttatatggtgtgtagttttcatcccatccatgtagtcttctaaaggcgctgaccatgtcagtgatgacataagtccaacaaaggacatggttacgttggtctcgaatatactccgagacatctttgagcctttctctgatttcctcgtctagtagtagaaaattttctagtactcctgtctcctgatatcgtctaatatataataatatagttaaccttaaggcagtcaatcatcaatacgccatttatcctactaatttaactcatccaattggtgctacactattgacgtttgaaggttgggatgggtgtaacatatatcgcggacatgccttatccataaatacacttaaaattagtataaattttctgacttgccttacctgagtttgattattttcttagtaaagtattttgatattataatttggtagtaatataatcactataacatgcaagaactacaaaaccagaggtctctcaaatggacactcatttaattgttacgatagtaaatgtcacccatcaatgaaacctaagtcaattggatgatttgggcccaattggacctaattcggcccatttaatattccctcttttctaacctttgtttctcctcttgcttgctcacccttttccctgaatcttaagaattactaattcccggcgagttttcccggcggcggctagataatactggtttctgccagcaagatcgaaggagataaacttcgtaatcaaaaagtctccttctgataaaaagatgtcagaaaacacaaaagtcgaagcgaagagagtgttcataggagcaggatgcaacagagtcgtcaataacgtctcttggggagcttctggtcttgtctctttcggtgcccaaaacgccgttgctgttttctgccctaaggtctgtttgttccactcttgtctctctctttcaaaatcattccaaaagcaaagatgtgattttttttgggtgtgttttgtgtctttgtttaatgtttttttcagactgcccagattcttacaacgctcccaggtcataaagcttctgtgaattgcactcattggttacccacttccaagtttgccttcaaaggtaggacttaaagcttacttgctgtaattttgaatcctttggtttataggaacttcttttgctatctatttagagagttttaagtatgttgaatcgcttaggcattgctaaaggatgagacttttgatgttttataagatagagaacataggttgaagaatttgtgagtgatagcaaattgagaagatataggcattcaaattttctatttatagtctctatctacggtttggtgatttagttgctgtgaaaggttttatgtatttgtatctccctgaattttctatgatcgttcgcagccaagaaattggaccggcaatatctgctatcaggtgattcagatggtatcatcatcctctgggaactatctactcttaataacgatgtaaaattcccttactctcggtctgatcttagtttctttgcggtttctctattatctctgatccctagtatgttttctgtttgttttagcaacagtggagacatgtactacaactaccactgtctcacaagaaaggtgtaacttgtatcaccgcttatatggtttctgaaaccgatgcaatgtttgcttcagcttcttctgatggagttgtgaatgtctgggatgtttcttttccgtctcagcctagtggtaagcattaacgttgctgcagtatattaccggttaaacgaagtgaagtatgtcttctaagcagtatctacatctttttcttcctctgtgttatctgttgcagaggaatgtaaagtggtgtgtctggactctatctgtgttgacactaaagcaattgtaacgctttcattagcggaattgcctcaaaatcctggtcgatttgcccttgctttgggcggattggacaacaaaatcaaactttactctggagaaagaacaggaaaggtgcttcccgattcgcttttgtgccaaattattctcaactaaattcaattgtgagagtttttttggtttcatcctttttcagtttacttctgtttgtgagcttaaaggccacacggactggattcggagtttggacttctcattaccgttacacacaacagaagaaatacccaatagtattatgcttgtgagttcttcccaggacaaagttattcggatctggaaactagtgttagtcggtgatgttggctcgtggcgaagagaaatcactctagcttcttacattgaaggcccagttttcgtctcagggacatttacatatcagatttcagttgaatctgttctgattggacatgaagattgggtctattctgtggaatggcaacctccagtcatcgatttcattgatgggcggctagttaaccaccaaccgctgagcattttatcggcttcgatggacaaaacgatgatgatttggcggcctgagaagaaaacgggtgtgtgggtgaacgttgtctgtgttggagagctaagtcactgtgctcttggtttctacggtggtcattggagcccaaatagtctgtctattctggctcatggatatggcggagcttttcatctctggagaaatgttagtagcagcaaagagtctgagaattggcagatgcagaaagttccttcgggtcactttgctgctgtgactgatgtcacatgggctagaaccggcgagtacttgctatccgtgagccaagatcaggtcagggtttatggttgaggtgttaaaacgattcagtatattataatgcaaaaagtttcttttctgatatttcattctccaaatttgcgttttgcagaccactcgtgtgttctcagcatggaagaatgatgaggggaatgaagcagaggatgagcattggcatgaactggctcgtcctcaggttcacgggcatgatattaactgtgtggctatggttcaaggtaaaggcaaccaccgttttgttagtggagcagaggagaaagttgtgagagtgtttgaggctcctctgtcgttcttgaagactctgaaccacacttgtgcgggaggagaaggaagcttccctgaggatttacaagcagacgtgcaggttcttggagcgaatatgtctgctcttggattatcacagaaacctatctacttacactgtaagtgattttgattgatttaacaccattactagctttttaccaaaagcaatcttgagattcttaattttttttcgcagcttctagtgaaccactggagagaaatggcggaggcgaaggtttggatacatttgagacagttccagaggcggctccagcagagttgaaagagcctccaatcgaagatcagcttgcgtttcatactttatggccggaatctcataaactctatggtcatggtaatgaactattttctctctgctctgaccacaagggaaaccttgttgcttcatcgtgtaaggtaagttaatgcagttttcagaatttttttacacttcttcaatctcctagatttagattttagatctaactgagcaggattccattactaaattattatttttatatatgaaccacaaacttcttcaggctcaatctgcatccatggcagagatatggctatgggaggttgggacatggaaagctgttggtcgtttgcaatctcacagcttgacggtgacgcacttggagttctcttatgatgacactctgctcttgtctgtctcaagagatcgtcacttctccgttttctctatccaaaggacaggtaactcaagcggtttcaacttcaccgttctaaatcagattttctcaaaacatcgaaaaatgtctacgtttttagcgtctctaactcgtctgtttttttgcttctgttcagacaatggtgaggttagtcacaaactcatggcaaaggttgaagcacacaagaggatcatatgggcatgttcatggaacccgtttggccaccaatttgcaacttcatcaagggacaagactgtcaagatctggtcagttgagaacgacgctcgcattaaacagattcttgtcttgcctccgtttggaagcagtgtaacggccgtggcttggactggactagaccgcaacgagaagagtgggtgcgtggcagtggggatggaaagcgggctaatagagctgtcgaacgtaaagattatagaaacagaggaaggtacgactgcaacagcagctcttgctcttcggctcgaaccgttcatgtgtcatgtctcggctgtgaacaggttagcttggagaccaaccgagaagtgtgagtctaatcagagcttgcgatggttaacttcttgtggggatgataattgtgtgagagtttttaacttcaagttttgagtttacaacacaaaacatatcgttgtatttttaagattatggaccaaaaggtccaaaactctcttccatacaggaccattgtaatatttatgcaaattttggttagctaaatcgaaacatgtttaacaaaccacttttttcctcgtttaaaaggaaaaacaaacaaataactttctcgctttgcatctttgatgcttttcattgattattaagctatggtgcaacagtcagttttgtctcttgacaatataatcagcgagagacaacaaaggaaccaccttgtcagaatcaaacccctgaagatgttcctgcgcttctctgttcaacctctttgcatattctctcgcattgtccacacccatcaccttcggatacgtcagctttccggtgatcaaatctttaccggcagttttcccaagctcctcggaagacttggtctcatcgagtacatcatccatcacctgaaacatcagtccaacgcacctcgcgtagctcttaagcctctcaatctcttcatcagacccacctcccattatagctcccacaacagccgcagcttcaaccaaaaccgcggttttatgaacatgcatcaactcaagatatctcaattcgtcgtcttcgttcttaaaactcatcctttctccggccaaatccgctgcttggcctgccacaagtccctctgtcccaacagctctcgccatctcctgaacagcccgaagaaccctctctgaagtcacccccaatgaggtcgatgccaatgtctgcttgacggccaaagacctgagcgcattagaggccaagatggatgttttctcgccaaaaactttatggttggtgggttttccacggcggaggctgtcgtcatccatacaaggaaggtcgtctaggatgagcgacgctgcgtgaatcatctcaaccgcacaggctgctggcattgcggttgactcttggccacctacgagctcgcaagcgaccaaacagagcattggccttactcgttttccgcctgggagaagcgtgtacctcatagctttgtgaacctcgagtactggctcccaaagaggaacaaaattgttgcaaagaggaattgaattgtctagtgctttgttgatggacttagccttattcttcatgtatgaaatgaactcagagtcggagcttgcgatcgaacttagacggcggttggacggtcgtattagccgcattgcagacagaatcagactgtaacgcggccgcatgatgattatgttacagcgcaagtaaactttattgagttgtgtttatatctaatagtagcaccaaaataatgtaaagtttcttcattagcctctaatacaaaataaaaaaaggaaatatgcttgttaaaccattttaagttccatacttggtcctcaagacagatttaatgaaatatatgcatgaatctcagaagatttacggaagatacaaattttgttgatgttttgcgtaaacaccaatacattgaggcgttttaagatcatgaccaaactctactgtgtaagattgtaaagacagaggaaggttaacttcttgttgtaaagataactgagtcagagtgtttttgaattcaattattcaagtgctgagtgaaaaaacacataaaaaaccacctatcatgaccaccttctgtttctctattagcatcattgtgctatttctgaaattttggtagataagttgaaacgttttagcaactatttaggcaaattttgttagcaaagttgaaacatattgtcacatcactttttctacagtgcattaagtttaaagtctgattagtcaaaagttcaaactagctgtggtcaggtccagttttgtcactatatatagttctataccaagagtgaacaaaatgcttacttaaacatcagttaaatctggggctcgactctcgagtatatgaaatacttaccaaaattggccccttcgaatgacagaatcattgttcagtcttgatgaagtggttagttagaaagctttgagaccgattcctgagtcgcctcaggaaaaagaacaacttcaaagagttcttcagtttcagcttctcactcgaatcattcttcagttttgattcttgatgaagtagccttttcttcatttgattcatcattatctatatagtttaagaaggtggatgattttatattcaccttgactaagtaacatgaatagattaaaaaaatgtatgtctgtaccttcgtctgtctccattttcattttctgctttcccttctctggatcattagttgttcctgctggaaaaaaaaagacagtacaaaaattaatgtactcataaaaaaagatagagatgaatacttcaggaaaaatgataacacctttcaatcatcaaataccttcatcctcctgtactagaggccaaatgtgtttggctagttgtttgttcatttgaaacatattgatagactccacagggaacagagaccgcaatgattcgtcgcatattattgtgcgtttatcagatggatcttgcaaattgttctcctttatgtatttccaaagcattttcacaacctaaaaaccattcattaagcatttaagcatataatataacacatctagaagttttgtaatatattcactaaatgtcagttatgtgtacctctgttctagctaactgaggcgttccagtaaaagcctgaagttctggtgaaagactgcaaactttggtaaaaccacctccttttttcttcggtttctcctcggacttggctggtctaattcgttagacagggcttagtttctcttgacctttagtatataaccatacaaaacacacgaaattaagagaaagaaacaactaactttcttttcttgcgtttgcgttttcggacactacgatcttcttcttctctactctcttcttcgttattctctaacgcttcttcgatttttacatctttctcgtctctttcccctgatgtctcatcaacatcttcctctttcacattcttaaaacaccctataaagataaaccattcacaagaactataaacaccttaaactcatcgagatgccaccacctaaatctagtaaaattaacaaggaacataccatctccatcatttagcgcccaaatatgctttgccaatgccttgttcatttgaaacatattaattgtctttacacgaaataacgaatgaagcgactcgtcgcataatatattccgcctattcgttggatcttgcaaatcgtgctctcggatatacgcccacattttcttcacaacctgttatatatgcaaatgtcatcataagcatttctccacacaaaactatcaaagggaaaacaaaattacaaagaaatgaaaaacactacctctgttcgagccaattgagaagttcctaaaaacttctctagttgtggtgaaagctgacatattttgttaaacccacctccacgtttcttagcctttaccggtctgttacatacaaaaacacaacataatcacaaatttgacttctttcatctaaagccaatcacaagaaacagtacacaaacaatcccaaagaaactaaaagtccccaacctttgattgattcgatcaccattaaaatatatagctatatccatacacaaaaagtatcaaacaaataactttagttggctaaccattgccagataaagaaaccatttttccaaaatcaccaagaatacagtcagttccaaaatttgaattataacaaaacagtcagttccaaaaggaagagataagcttacagttcggtcttatcatcatcgttttcacttccctcttcatcgttttgatcgccattacagtcttcttcttcttgctcgggtttgctttctaacaaagcatcgctttcaagaaaagcatcgatttgttccctgacgaaagctttcttatcggttaattcgacgccgaaatacacctccagctgacggcgaacgctcgccggagtcgtagtttctaggtcggagctacggagaatttcccggagctgggtcacgaggtccgagtccgaaaccatttctctgttccttctaagaagaaaaaataatttattttgtttttggttttcttacaaaactgaaacttacaaaagcggtttcggaataagaaaacgatgaataagggcatttatggatttttcacatggctaccttttttttatgtttttttttttatgtactattggattaaacaactgtgtcagagtagaacaaaacaaacaaatggaacaacaaaccgaaaaaagtgtggttaatatggcacataaaaaacatgcggaatttgattagaatatattctagagcttaaaatattcaattgatagaattgtattaattgattaaattaatccgtatgatttatcgtttatttgatgcattttggaaaaaaatcgcaccagaaccgtcctattttggttgtggtcaaaatgcaattcatgagaaaagaaataacgtttttaaaaaaatatatatataaccaaaaaaattaaaattttgaacaccacacgcaaatcatatttttggtaaatggtgataattggtttttggtgaatggtggtaagattttaaaagaagtaatactgatagatgagtgtttataatttggcaatggcatcattgtttttgttctcttgtcgaaatcgccgtaacaatacggacatgcacctgcaatggcgtgtttcgttgtacttatagagtagcctagtacttacaaaacaataaataatagagaatgtaaaagatgcatttaaagaggccctaaaagttagtactttcctcttcaagaagaaattaaattcacacctaacatttgaccgtacaatgaaaatagatctcattttattacttatctgcataagaacaaaagatcacacatgtgacagtagcagttctatacaagtttacaactttctgtctcttaatagtccaaatatgctattgtggattgacccaaaaatcataccaaccaagtgttttctaaccgcgctgttttacaagttttcattatggagagcgttctaaagttgcatacaattgaaatttgttttttgcttaaaatgtttaaaattatggattcagttacacacactacataaaccgtaaccaatcactcgatgcctaacgtctacacagtcaaaaattgtacaatcatgggttggtttcttacttagtttaccaaataaaattttgtctgaccaaaaacaaaaactcaagatacaaatacatatccaaagaatagcggttttcacaagaactgagacaattttccaaagaagagaacacaaaacaaaacaattctatggcctaaaagatgttgttaactcattaacctcaacttctctgagattgaagagagaaaagaagaagaagaaagctcctatctatgctcgaacactactccacgaggttccagataatccccgaaactaatcaaagtgaccacttggcactttaaaacaccagcctacaaaagaaacaactgctgagatgcataaatcgagcaactaaagtcatatctaaacaacattgtctaattgtttatgtactcatcatgggattttgacataactatctaaccatatttagtgtaccttttgatgaagatgctcattctgtttccaaactgtgattctgcagaggatttcctgatgtgtttctagtcttcttataccaaaagaacatggaccaaagtgctctaagtaatactccatttgcaaaatgtggaactaataaacgcccccaatacgggtaatatggtccaggaagcttaatcagagtgaagaacatcatcatagctatcaaatgccacggtacttccgcttcctgcaagaacaaagtcttcttaagaactaattttaaaactatcataacaatctataagataagggagttcccttttctactaccttaagacgaggcgagatcttcaaagcggtttcttgtagaacgccagcgacaaccataccgatgactaatggaaatgggactaaagcaagtttcctctcatgagcacaataagacatctcactaatggaagaaaccgccaatataggaacgaacaagaacttaacgactgatatagcgagatcaagaacgagctgtatgaagtttccgaatgctctattccaaggaaattccttaaccggctgtggagaattatcccaaacatgtttggttctcctcaacagattatcgaaattaagcttctttggttgttcccctgaatgtccagattccatatgaattgcacgacagagcaacgatctctttgatactttagcttcatttgcactctgaaaggaacaatctttattgttcttagagtagctcaacgtgaactgcaaaaacaaaacttagagaaatcaacaactcataccacacacaagttcatcatattaaacaaaaaaacagtaatttgctataagcctaaggaaagattcgtaatttacatggttaatggatccaataagagttgtgaacctctaaattcactattctatctgattgaaattgatccaatatacctaaaggtggaaatttttgacattaatccaaagacccattgaagaaataatgaaaagttacaacctttttgctgggtggtagagttattttgaagattttgtagaagagaagagagagagatatggttacctgggtcgtcgagtgaagtcgcagagccagtgaagattgaggcgaagaagaaagaaagagatgagacatcgccatttatttattaaactctctgttcgatttgagtgttcagagaaagtccattgaagaaaagattctctgaatagagcggataagagagaggggtagagtttggtaacagacacaaagagtgaaagagggttcgagcctaatgagagagagagaaatcgtcgacagggaaaaaagagagcttattactattttacaaaataaaggggtctatttgtaaacaataaataatctaagggtcgaagcacatatttcattggactccttactcagcccaataccggccctgaagtgagcttgttaagataaaataatataaaattgatttattttttatttctgtcaatatacaactgaaaatgaaatacttaattttgtatcaccaaaatcaaattgattcttagagtacaaaaggaaaagaggagaattgctcaaattgaccactttctaagttatatacatgaacttactggcttagacctaagtacattttagttatgggattgtttgtatcacaacgtcggactcgtagtgtttacttaattacttcaatagctattacatacatactaatttgctttaatagctacggcagagggactcgtagttatgcgttttttacctgtttaacattatataatttttattgataaaatacttgttgaattgcatttaaaaatcgtcaattcaccaattttactattatacaagttagcaatcaaatccataatttcaaacaaaatggagggagagaaagaaaagaaaaatataaaatcatctaatagattatgaataatttttgggttcacctttaggtgaacctaattcatttactccctctttaataaccaatttgaatttgtcatgttatctgattaaaaaaaaaattcaatcattaaaatccacttttttgtaaatccaacccgatatagaactcgtttaattccaatatctaaactttaatttttctttgtaaactcaaaccgtcatttaaactcatttaatcgtaaaaaaactaaaccctcgtttaattgtaaaatttaaatctatttataaacccaaactaatatttaaccttatttaatcataaaatctaaatcataatcgtactttctaaacccaaacatttaacctcgtttaattgtaaaatttaaatataaattcaaactaatatttatattgtttaatcataaaatctaaactctcaccttttctaataaacccaaacagataaataatttcgttttagtggcaaattaaatttataattaaattaagttctttttcttattattaggtgtcagattctaattggataaaataaaggaggtgaatataatccaaatatttttcatagattatataataaggcatgttacttaccatgaaattgtgtcattaattcaaaacagtttgtctcaaaatcatattacatgtttgtcccaacacgattcaactaaaaaaaaattgatctgctaatatttataattaaacataagttgtcctatggcggtacaaatttgtaaagaataaagtgaaaaccacttgggattcttgagctcctcatttttgtaatggtccaagtgtgtcaaccatttttcatttatttttaaattttattattaaattttttgacaattgatcaaaagtatatgaaaaatctattgtgtacactgccatgatcaaatgatatgttgatgtaaaacttagggatctaattcccatagaccaaaagttaaactaggaatttgaatgataacttcatacaattttaatacaattttaatatagggcataccgctttgatagttaccaatcaaaaaagtaacatcaaattctgtacagctttacgctatttcgtaaaaaattatctctctagttaacaactaacaaatttatacagctttgttccaccaatctgatcaatctcgtatttaattcttttttaaataaaaatcccacatttatttcttcttctctctcttttatctttttatctgggcaaaacttttatcgttacctcttctacttctacgtgttaggggaaatgcatgatattttttgttcatgtggaactagacaccacagttactatgattttggttgagatccattgaaaatctgccaaaatctcgcaatattagatggcttcgacaatgacatccggccatatagttaccaaactctagttaagattcagcaagaatccgaaaagtttaggtgaaaatcgtcacccattttttcattttagatcggttacaaccgttagctcaaacttaactacttaacgacgtacgtaaatatatatatttacaatttatgtgtattatttttttgtttaacctgttataaatagatataatgttttatctagaaatttaacatgttaaaaattaatatagctttctattatttcaaatatatattttataaatatgtgcattaaaatagcgagttatgccaaatatacatttatatctagttcaataagaagttatatattttataaatatgtgcattaaaatagcgagttatgctaaatatatatttatatctagtttaataagaagttatatattttcgtaataaaaatacgaaatcaagaaaagtttgttaagaaagcaaaaggaacaaacttattctcattacttctttttagtcaaaatgattacatcatcctctcttgtatagtaggagctagaggtttggtttacagacatgaaaaccaatgatgaacacacagtatacttaaaccgatccttaagtcaattctatactctaataaaataagtggataaggttcacaaataatgtaaaggaagatatgctgtcaaaggtgtcggcatacaataatacgatattgttacgcaatcgtatctattatcctgaagtcaattatgtagtcaatattcattttatacgtaaaacatctatttaagtggttctttaaacgtgtaaccaaaaatcaatgaatattttaaaaccataatacgacaaaccaccaaacaaaatttccgacaaagatatattttctcttcagtgtcgaatcatattgcggaatcttataatgtgattcgatctatagtacagtgactattgaaacaaaataaattacattacaactggatctagactaataatatggtacgctaattttggtgctatatatgttctctatactttaattcaggagcctcttttacagcacaagttatcaatgcgttacaattaattaatggattagtgaacccatatatcgttgcctagtttcggtgatttaatgttaaaaaatgaggactaatcgattattcattacaaatagatttgcgtcactgtcaaccttccactgcgatggagaacatatcacatttactaagtaatgtcacacatggaacatatcacatatctgcacagatcaaaactagttttataatgaaaataaatcaaagatcaaatctttgtcgcactgttgtcctcgtgtcccactggtgtaatctcgtcctgatccatttaaccaaagccgcaggatcgcagtgatgcatatccacctgtgcaaatctgatctcctatattgtcgtaatatgatcattacacaaatattcacgtgagttacacatgaaaaactgtataaccacacttgtctcctatgacaatggtgacagctagataatagtgtataacaaacaagcaaccggaataccggatcaaaccaaaattaatatggctagtgtatatacggctgaaacgaacaaagcaaacaatagaaaacaaacgaaatgaaaaaaaaattaacgtgggattgtactagtagttgaatccatgtaagctgaaaatataggtattttggaagacacgaatttcgattctcatagaaaatattaaatgttaagtaatgattaaaaatatgaagaaccacagctttcttaaacacttttttttctttttcttaaacacttctgatggtcaaaataaagttttttgaatagaacctttggttggaaaaacaattcgtataaaatatcgacatccggaatacaagctttcttttcaattatgtgctgcatgcggtattaacaaaaaaaattttggatctatatgtttatcatatacttcgtttttatattactaaatagaaaacatacgattacgcgcgatattccgatcgttataaattgtttcataatcacatttcaatctattagggaagggctatattatattattactactataatatgagggatacattaacagtcgctaataaaaacatgttggtatggaatccaaacatgcctagtgattttaaaaaaaaaaagggttttaacatatctatggctagtggaagtgaagagagagatcgtatatgcatcccttttctgttgtgtcggccgtttagatctttttatattatggttcttttttgtatttattttaagaacatttgcttctctatgtacaccatacggtattcaaattcaataaggttatacacatatatttctttcttttgggtgaaattgtctatacacatatctacaatttgtgtatataaagaaacgccccctacgtattattggcccttcgcataaaccaagagccaacgaagcaagcatcttccaaagaaaaaacgttgccaataattgcttccaagtttcaagccacgtagtattttgatcggtccactcaaataaaataataatatggatatttgcatatatataagtctaggtattgcatgtaagacttcacaacgtagagcaagatatctggatacgcggaaaatagagagaagaaatcaaaaagcatatttttattttatctttgaaaagaagattattgtttttagtctacaatggtgactctaaaaatggagatttgcatcgagttgttgaaattgaccgtagatttcgtcgccgccgttgcagaatcaatcgaagtagctttccgccatcgtcctccaccggtgattcaatattcttcagtgatgtatggtcgccggagtaattacaccgccgttcccattcctctcgtggggtttctgtagttaatatattcttcttttgtggttcttttgttttttgttcattcttgttctattataattaccttcttgcctcggacaaaaaggtatatttcttatgaaagaacaagatgtgttttgtgtataaaccaaaaaaatcacgaaaagtttacgtaacccgtgaatatataaaagtttagacgttcccgattgtatatatttttttcgatatatatattttgtttattcataagacccttaaattatatgtttctattatatcaatgtgttcacactttcatggtagatctgatcttgaagagggcagaggttgatatatttgggtcatagtcgaataatgatcgtggcgatatttttttaattccactagacaaatacaaaacctattatcttatccatgtttgagatttaagattagaattgttttttgggtggtgtccacaccaagtaacgtgtcggatactatttttggaaaatttgttttgttcttgacgaatcgtggcccatctttgatccatcttcgatgcaacaccgaaacagcaactgatatgtagctatgaggaacacagatttgtggtacttttgtatatactagatgagtactcgcactacgtgcgggtttacatattactatttacaaattattttatataatatttgttcatataaaataaagttgaatgcatcggtattgaaacataaatatgatttagaattgtttttgaaaagtccaactatattagttcatctgaaaaacgaatgtacttgagttgtttttttattgttgttttagattctcagtttttttttttgaatttatatatccttgtttttttgttatatgtatagattatgagacgatggaattttagaaaatttatttcttacacaaaaagataacatgtctttattaaccatgtctctgcatattcaatctaaacatattcaacttgatattcttggaaagtttagttaagttcttgttataatcttatattttacgtattagttataaggatagctcttcaaacatttttcaaattacttgttttcttagaataaatctcgaaaagcttatatatatttaatctgcatattcatttagtttttttcataataatcgtctaatttttaggcaagaaatatgtgtaacatgtttggattttatcatcattttagcctcaaaattaaagaggatatattgaattaaaaaatgtaaaaagagtgatggttcaagttctcattaattatatcctcttattttagttgttatgttgaattaattactaattatgtattacttattttatgaagtataggtggcaaactctcatgtgctgatgtgtcaagttgtggaagagagttaaccttctttcatatatatgattactgttcaacaatatgctgttaaataacatgaatgtttttgagtttatgataccatgatacattgacacaatattatttaaaaatatctgagctttgtacctccaaaattcggggacgatatgtttaagcttgtggcagtactaggaagtgatgtttagcattatttagagctatcatatagactgtagaaaatcagtcatcacatttcaagtatggtaaaaccaaaaagttgttgacaacgtcaacgacctgaattagttattatttcaattccaaattagcaacattgatatactatttttataatcttgaacaaaactaattttacatcttctaattatagtctcaaaaaaaacacatgtaaaatctgtaattatttttactttctcttataattaacctttccttcattcttagccttttttccctcaagactcttctattaagcagccttgggtctttcccaaggtttttcataaaatgattaaaacaaaaatggagaggccctttggctgcttcttcatcctccttcttatctcctataccgtcgttgccacctttgacgatgaaccttctttccccgaaaacgccgatctcacaaaagatctagaacaaaaatgttttagcatcaataaagttgatcctaacctcaaatttgaaaatgatcgtctcaaaagagcttacattgctcttcaagcatggaaaaaagccatttactctgatccatttaaaactacggccaattgggttggttctgatgtgtgttcatacaatggagtttattgtgcacctgctctagatgatgatagtctcacggtcgtagctggagttgaccttaaccatgcagatatagccggacatttaccaccagagcttggccttatgacggacctagctttatttcacatcaattcgaatcggttttgtgggatcatccccaaaagtttatcgaaactcgctttgatgtacgaattcgatgttagcaacaatcgattcgttggtcagttccctgaagtttcactctcatggccttctttgaagtttcttgatctaagatacaacgaatttgaaggaagcttgccatcagaaatctttgataaagatcttgatgcaattttcttgaacaacaatcggtttgaatcggttatccccggtacaattgggaaatcgaaagcatcggttgtgacattcgcaaacaataaattcagtggttgtatcccaaaatcgattggtaatatgaagaacctcaatgagattgtcttcactggaaacaatttaaccggttgtttcccaaacgagattggtttgcttaacaatgtgacggtgtttgatgcaagcaagaacggttttgtcggtagtttaccgtcaaccttgtccggtttagctagcgttgagcagttagatttatcgcataataagctcaccggatttgttgttgacaaattttgcaagttgcctaatttggacagcttcaagttttcttacaattttttcaatggagaagctgagagctgtgttccagggagaaacaatgggaaacaatttgatgataccaacaattgcttgcaaaatagaccgagccaaaagccggctaaacaatgtttgccggtggttagtcgtcctgtggattgtagcaaggacaaatgctctggcggtagcaatggtggctctagcccatcaccaaatccaccaaggacgtccgagccaaagccatcaaaaccagagccggttatgcctaaacctagtgattcatcaaaacccgagacaccaaaaacacctgaacaaccttcacctaaacctcagccaccaaagcatgaatctcctaaaccggaagaaccggaaaacaagcatgagctaccaaaacaaaaggagtctcctaaaccacaaccgtctaaacctgaagattctcctaaaccagaacaaccaaaaccagaggagtcacctaagcctgaacaaccacagatacctgagcctactaaaccggtttcaccaccaaatgaagcacaaggaccaacaccggatgatccatatgatgcatctccggttaaaaatcgtcgttctccgccaccacccaaggtagaggatacacgtgtaccaccaccacaaccaccaatgccttccccatcaccaccatcaccgatttactcaccaccaccaccggttcactcaccgccgcctccggtttattcatcaccaccaccaccacatgtctactctccacctccaccagttgcttctcctccaccgccatcaccaccaccaccagttcactctcctccaccaccaccggttttctctccaccaccaccagttttctctccaccaccaccatcaccagtatactcaccaccgcctccaagccactcaccaccaccaccagtatattctccgcctccaccaactttctcaccaccaccaacacataatacaaaccaaccaccaatgggagctccaacaccgactcaagcaccaacaccatcctctgaaacaacccaagtgccaactccatcatcagaatcagatcaatcacaaattttgtcaccagttcaagctccaacaccggttcaatcctcaaccccatcctctgaaccaacccaagtgccaactccatcatcatcagaatcatatcaagcaccaaatttgtcaccagttcaagctccaacaccggttcaagccccaaccacatcctctgaaacatctcaagtaccaactccatcatcagaatcaaaccagtcaccaagtcaagctccaacaccaattcttgaaccggttcatgccccaacaccaaactctaaaccggtccaatcaccaacaccatcaagcgaaccggtctcatcaccagaacaatcagaagaagttgaagcaccagaaccaacacccgtcaatccatcatcagtaccatcatcttctccttccactgacacatctattccaccaccggaaaacaacgacgatgatgatgatggggatttcgtcctaccaccacacattggattccaatatgcatcgccaccaccaccaatgttccaaggatattaaaaccaatgtagtagtgacagtgttacccatttttaacatttctgtccattttttccatgtgaattatttgtatcaaacgaaaaagatattacaaagatgaaaaattaaaatgccaataattatatagtagattatctttcagcagatttttttttgttgaaattgaagtattgaactataacacgatgcgatttgttttttcggggtaaagaagttatcatttgttttggccattttatgacttctattctattatttgagaagcaaaacataaatatctatatttgtaaaatttaatatcttactagctacatatagtttaatattatacacatttaatctttcataactatgtcatgaattatttgacatttttcataagtcatgataaataaaattatgtatgaaataattgaattagggtttcatgttccaccagatgattgaacttgttctttattcggatagaattatgaaatttttatcttctattaaaaaatatattaacaaaattagatttaacatatattgatatctcattaatgtacttaacatgtgttaacaattttaaatttttttactttatataataaaattagaattttattaaaattatataatatctaaaatttgtactaaataataattcttgctgaattataatctagtttttttttttgatagcataaagattataatccgttaactttaaaaaaaaagcaagaaagggaaataaataaattattatatcctttaaagaggacaaaaatattaattatattgcgaaaaaaggagataaaaattaggtggaaaaggggaagatggtggggacgataagtttttaattagctaaccaaaaaacaaaaacacgaaacgagtcaactcaccggttccattacgagtcaaggagaaacacacattgacacgctcaagcttttttttttcaaggtcaagttggtttttttttttctttcttaaaaatatttatgttgggtcaggcttaaaccagagagagagtgtgtgtggtcgagccatttgaccaaaagcaaaaacttaaaactggtttcagatctgaagtaaaagggttttgcttcggattctccggcgtcgtttaaatgatctctgacccatcttccttggcttaataattctggtccctccttttatctctttttactgttgatttatctgaatatgccacgctctttcttccacatgtttattctctcttcctttcttcaacacaagcgtctggtaattgatctcttctctctcaaattgtgtttcgttctttttggttctgtatttggtttctgacaaaattgaggaaactggtgttgggtttgagtctagaactgccaaagatgtgattttgttttttgggtactgaaaattgagtgagatgaagtgataaagtgtcttttttttttggtaaattattcgaatggaacttgggatcggaactctgtttctttgttagggttggttgaaatctgaatctagtcttgatttttgtggtgaaatgagaggtgagtcagtgaaattttgaaatgtctttgattcaatttgacatcagaatactgctcaggttgtgtcttttgtcagatttattgagaattatcagcttccgactgtagatttgactttggtctcagtttaaagactatgagtggactttatagatctagaagcatgcgttgttttgattataagaaataaaaagagagtttttgctttaagctgtttgactaataacttgacttgggattatgatttaaccagcaaaactctcttttctccagccactgtgttttatgaatgtttgttgattccaaataatagtatgtgttgatcaaagtgaagtcatttggtcattacttggttctgagctttcagttgtttttgcacttacaatacctgatggtcatgtttgcatgtaggactaaggaaagccaacaacaaaatctggtttcaagacggttggcaggagtttgtcaaccgtttctccattcggattggtttcagatacaaagttacagtctacattttcaatttatcctccacactctgagatcaaccaccattctagtagtgaagctcttatgcaaatggattccgcacagaatcagttcaacaaacgtgctcgattgtttgaagatcctgaactcaaagatgctaaggtcatttatccatcgaaccctgaatctactgaaccagtgaataaaggttatggcggttctacagccatccaaagctttttcaaagaatctaaagctgaagaaacgcccaaggtacttaagaagagaggaaggaagaagaagaatcctaatcccggtaagtatcagagacagactcttaattacgtattaacttttgtttcagaggagagtcaaaagatttattgttttggtatgtgcagaggaagtaaactcttcaactcccggtggagatgactcagagaaccgctcaaagttctacgagagtgcttctgctagaaagagaactgtaactgcagaggaaagagagagagccgtcaatgcagccaaaacattcgaaccaacaaatccttactttagagttgttctgcgaccatcatatctatacagaggttgcatcatggtaaacaatttttaaagattgtaattaaggttcaagattagggttaacatgacctgttcttgctgacttcttcgtttctgttttttgtttgttcaacagtacttgccatctgggtttgctgagaaatacctaagtgggatatctggtttcatcaagctccagctcggtgagaaacaatggccagtgaggtgcctctacaaagcagggagagctaagtttagccaaggatggtatgagttcacactcgagaacaatataggcgaaggagatgtatgtgtgtttgagctactcagaactcgggatttcgttctcgaagtcaccgcctttcgtgtcaatgagtatgtgtgaccaaaaaagatttccctttcatcagcgatcttgcaggtagctttccaaagttaaaattttatgtaggggtctcttaaccattctctctcttgcattggttgtctctgttctagtagtgttttgagtgaaatttcaggttcctatgtttggatgtggataagtatttgacgattataataacctctgagtgggaaactctttgtttgagtggtagctaggttcaaaagtagagttgtatatacttttatcttcatcaggataattatgtttatttgaattgttgattattatgggtttgtgtgggtgaatccataaatgtagttggcaaagcttgttctagttggtttaactgtgaggtgtaagatggtgaaaatatcacgacaaagggggaaaaaaatattattgtgtaaaacttgcagaatcatttcaccgttctaaggtttaccaatcaaagcttggatttctcttttttgaatgaggaattgcttttgctatatttcagacagggcaagcttttttttcgacatacacattacatcacacaaactgataacaggatctcacaagttagccaagttcttactacaaagttcttgccaggcttgacaagaatttccactacacatattacacaacgggtcttaaaaatgccaagttcttactaaaaattaaagcttgcaaatctgtttaacgagctagaaaccagaaacaaaaaaccgaagaactattatgtggtttaacgagctaggaaccgcagagatctttgtcggagaaacatacttgcataagttcttcttcaagtcctcttcctcaagactcctcatagcaatctcttcaacatcatctactagtctacaacaaagaagaagaagaacaagaaatcacataaaagatacaaacaaaacccacaaatccttcttaagaaatgtcttataaacattttaccaagtattatgacattctcagacttaatgttgactcttggtttcttcttcttcttcttcaacaattcatccatatcaacaacttcaccatcatcatcactactttcaaaaccagtaaacccttgttcatcatcatccataacttcttctctattatcatcagtatcatccaatggatattcaatctcagaagcagacacatcaaagatcacaacacggaaacaagaatccccttcgtaatgaaaaaacagaaagtgaccatcacttaaagagtgagcctctgcaaactcactccaacctttctcgaaccaaacctcatcaccgattcttttaatccgaattgatctcttgaaaccaacaggagtctggagagtcacgttgtcagtgagtttaggaccaaacctcacaaatctagccggaactttctgtcaaaaattcacacatgcaagcaagtttcaattattattgtttttaaatgaaaaagatgaacatacaaaaagtgggtgaaatatttttttactgtaccatcattttttctatgattcttgagaggagaataatcttgatgaatttcttcaccgtcggttctggctccggttttagccggcgttgagttgctgccgacgtgattggacccggtgatctccggttagtatgcatattcctcatttgtgtttgtttcttgccaagaagagatttttgttaaggagagaaggaaattgaaaagtgaagaggaagcactttagattcccaagaatcctttatttagtttattacacattggaaaaagttaaaagtcttttagattcccaagaatcctttatttagtttgtaataaatttttcaactaaaatcagaaatattaaagttgatagaaagtaaagaagattatactgaaaatgaagtaaatactagaaaaacggtacaaatgaagtaaatactagatttgttaaataaactaaaatttttgttgatcagacaaaaaaagaagtaaaaaaccatataaactgtggagatatgattattttttcgtgactcgtgatgttaattccctatatagaaatgtttgtttctaatttatcataaaaatctttctgcataaaatgtttgagtaactgaaattcagttagttaccgtcaaaaactattgtatattactatattgcatgagttttaatgagttgaatggatgtaatcttgcattttttgtacgtaaaacgtagatttgcattaaactgatagtttaatttgcaatatattatctcctaaattaataatttgaccctaatgtttaactctgttagctttctttcaccctacatattacaactaaatatatatatatgaagtattttaatttatggaggtaaggtggatatatcatatatgcaatgataaaaacttggctgctcaatcaaaagttttattttattttattttgttaacaaaggatagtttgggcttgaaaattaaatttaaatatcttattgatcaacattcaacacacaacactaattcttgctagacataaacaaaacaaaagttttcaccgcaaaactacgttgcagaagataccaaaactattacatgtacttaacaactatatagtaaaaaaaataaaatatattctggtgagtgttatcatcgataatacgctcatcaaaatttgttattgcactaaagctttccatcatttctgatatcggccaagcgaaaataataaatggttatacatgatcaattatttagcagtcaatatttcatcaacacaacgtatactcttatataaatgtactttttgtacagcctcttttaaatgtacttgataaataacctttcaatcataggtatatcattttaagtgagggttatattttgacataaaacatataaatttgttattatcatctacaaccaagttttagtgttaatttatttattttatttctgtttagcaagaattagggatatattagtaagttattaaatttaattttcaaactcgtaaccaagttgttgctatatgcaaatttttattagttcacaaagcatgcgaaagggtccactatcattagtgcgttacactctgccccctcttataaattatgtaactattattagggctacttattagtgtactatatgtacatattacatcatattcagatgataaattaaagtaaggaaaatctattgttgatcggaactggccggtgcttccaccgttacggttgcagaacgatcacttccttgccggcaaagacgctcgtactccaacgatgacctaatcttaggcaacacaactttaccggaatacttgaggcacaaggcacatgtaatgataagtatagcagacaacatccaactaaactgcagattcgccaatgcttttgccctaatctcagcaccaggggactcacaagccaccgcaccactatgataaacactccttctattattgtctgtagatgttgacatgttactcacgcaacctctaggaacatactctgggatccaaagcatgaaccccatgttcaagaaccagcatccttgaaacataaccgatatcgggaggaatagagccgcagagaaggatttagggaacgaagcagaagctagcgccgaggagaaggagacgaaagcaatgagttggagaaggaaatggtagtgaccttcaagacctgaatgatcagtggaatgaaaatgaagaaggaagagttcttgagcgaagacagaggcagaaagaactccgattagaccggagaagagatctgagcaaagggttagctcgcagaagagagcgaaacacgcaaagataatgaggtggaggaacatggaagcatgttctaggttgtctggtttgagagaggagaagttgaaattagggaaatctagggtgaggagagtgatggagaggaaggagaagaagagaatcaagataagctcaagatgtttgagtttagggaaagggaaccagaattttgcagagaaagcttcagggcctttaagacagtaagatcttatggtgttgaagagatgccaaagaccaagaagagcaagtgagagaccaggcacaaagtgtcctaagaacgttcccattctgatagtttttaagttttgattatttccaaaaacaataaatctgttaattgtggtgttgtatgaggttttggtgaagaagtgtttatatatatggatgataaatcatatgtgtttgcgtgacggttaataccactaaaaaagatgaggaaaaagaagaagaaaagatggcttcaccaatatgtaccactttaaaattctggcgaagaaattaaagacgttatcgaaaacttggttaaagaaacagaaacagaattctttcttcaaaaagaaaaaagaaaaactttttcaaaaagaaacagaaacggaaactgaatatccattatcataaagaaacataaagcatttgaaaagcagagaggaacgtcgtgtgtaatttttattcatttaaaggctttaattttctcattttctctatagttttgtttcatttttgaaaagatataaactttaatattttatagatagtgatgcaaaaggtttgtgcatgcacttaattattagcacgaagtttagagatgcaaagtcgagtgtgacttctttgaatgtagagttagaaaaatatatatggagagtgcaattggttggaaggattgtttcaacaaacaacaatgtataatttatatgtatatgaaatgttagtatgtataaataaactggtttgcaaacatgactaagcacgttttctagagaatttttcgtaagataatctatcactggtatgcaaatgttcctcctttgatgtaacacaaaaataaaaataatgaagaaattgacctaacttttgattaagacccaaaaaaaaaggacgagccaatgaactattgagaatagattggggtcactctccatccactccaagtggaaactaaagagtttttccacttaattagaagatggcaattacgatgaatccatttactacccaattcaaatatataaccgaatatacctttcattgtgttttctagatataaccaaatatacctttccttgttttctataaatttttatcaaactaaaagaaaattatatcattttaggtgtgcttaattttcttgtgtgttcgtaacatctcctaaatgaaaattgtaagacatttttagcgataataatatgcatttcgaaaactttatttttaaaaaatgttttactaataagtaaaacaaaattaattttaaatagattggccgtaccgttttctccgtacaccccataggccagagtaaatccaaaattaggctcttttaaactgaaaatttataaaagccctgaatgcttttagtgaaagccgacataattatcgaaggctaataccggactaacacacacttgattgcgttagaacagtgtttttgctagattagcaacaaagaaaacctgacaaataacgtttgcagatcgaaattactaattagtactaagtaagaattggtttgttgtttatacgaactatgggctttttatttttatcttattctttttatctatgggcttttcaagaaaaagagaactcttgggctttgtttttagaaggatccttaaaaaccaccaaaacattaaaaatccgacctgccggaatcgaaccagcgacctaaagattgtctgcaaacactacagtcttccgctctaccaactgagctaaggtcggttgtgcttaatatttcagaaaattatttaaattctaaaagagggatgagctgtaagtgtaacatgaaactaattagtagtcaatagggtgtttccattaacttacttcgtaaatagaatattaaaatttgcggaagaagatgaatgaagctgggaaaagctctgataccattttagatctaacaaacttttctttagattagaattatgcttcattaacgataatagaaacatggtttgttccttaaatataatttattaaaccaagatagaaatagataaaccggtaaaccgagacattgtaccaaaacatatttgataagaatttataatcattaacgtaatatgttaaaaaaaatgccattttacagataaggagaaccatgaagaatcgaagattatcggcatggtttattcttcacaacaatctcgaacaaaagtttagtggagctttaagtaccaaatcaactaagctgtctaagcatcatcttttgttcaatagtcaatactgatctagctaatttaaataagaaatcggaattagtcccatttggccaaatttaaatagtgaaaacggcattattaatgtcgaagacaaccgagggtgaagttgtcttgaatatactctcaagcttacagatatcaaattatctttaatactatatttttaacaacaacatgcattatgcggatttgagtttgaatggtaacacaataataattcaatagcacaaatcattaggttaaatatcctagtcaacttaaatttaatatttgtttattagattcagatattttggattagttttgtgttggtgaaataagtatttgttatttgatatagtcatgttgtgaacaacaactagtgctgtatatatgcaccatgtgaataagatctaataatttagtttcggttgaaagtatcatcattaggatacatcttaaataggattcgaggcaaatacgtcaaaacacaagattacacgtgtttcacatataattttacaagatatatgacaatgaaactgtaaggaagaacagttaaaataataacaaagcgtaaaacaagtgatttacaggatcacatattcatatctcatgaattttctaatcagtggaccgaaaccaaatccctaaaaaagatgagccaaaacataaaaatccatggatatgcatataaaaagatgctactagacagataacatcttgcgtatgttcatcaacatttaaataaattttaatccaaagggacactgccttttcaataacctgaactaacaaatccatcttacgtattacaaatctttagttgcaatgttatattccaaatttccaaaataacatataaaaacaaccttagaattaaaaagatggaatattcacattcaacattgacaacaaccatagagaataaagactcgataacaaacaacttttacatagtcacatttattacatttcttatatctttttttgtttctcattgtagcggaatctttactttcctttttttctccaccttctttcctcttttagtttcacatgatttaaaataagtgcatgccattacaagagacaataaaagatctaacgcaacaacaaaagactttttcacacttccaaagaagatgacaaagtcacatgatacgtgacaatacactattggtcatcacaagtaccaaatctacctactagttgcctcccaatcaattcctcctttgacgataaaacgctatacaaccacatggccgggaaacattccttcacgctcctacgtcgtccacacgtatacttcttcacgcgcttacgaagcgtaatccgtcacgcgccacactttaacggagttgtctaaactcccactatacactatccaccgttgatcccctttctctccaccgtcgtctccgtcgttatgatcttcctccgcctcttccaccgccgctaaacacttaaccggtccttcatgatccatcaaaacagagagacacgtatgcgatccgtccccgtttcttttccaaacgcaaatattcttatcagctccaccgctcaaaagcaaactcccggcggtggcgagacacaaaaccgccatacggtggccgtgaatcgtccctttgtgagtcaaatacttttgccgttcccagaagttaacggttccgtcagacgaaccacagtaaacaacagcgtccgttaaattaacagctaacgccgttactgcgttctcttgtttcattaacacttgtaccaaaacatgcttcatctctttgccttgtacctcacgtttccatactttcaacgttccgtcggctgaaccggtaaataccaaatcgtcgaaaccggaaaccaccgtgttaacggcatcgtcgtgagcttcgattgattctaaacattttgaatcggacaatctccagaccttaagagtcttgtcccaagaaccggagtagagcaaaccgagatcttcgtttaagctcagacaagacacagcgtcgaaatgtcggatcttcaaaacgtttttccggcgacggacttcgacgtagtttctaggatttaccgatttggtgagaaattctttaagagttggtaaacttccgactcgtgaatatttctcggggttcttctttgatcctctccatacccggattttaccatcctgatgaccggtgaaaacccggttatctctggttactacaatggctttaacaaaaccgcttgtggatttaaacccggagaaatctttaagatctttccaaacccgaatgttcttggaatcagaaccggtgaaaagaagatcacctgaagcagcgagagagtacacgtgtccttcttgtctcacgaccgtaccgatcaaaccgttatcaggatcatcctcgaaatcactgttcctggtttggtaaatccatggagatttgtggtacggagagtaagtttggttccatggtgattgagtaacagatgaaaacgacgtcgtgttgtcgttgcttgggtagtaagtttggttccatggagataatgggtagattggtgatgacgaatcgctactagcacttgaagcgttgcttggccgctgagaatcgctgttgctgctaaaggtgctttggttatgatgatcaccgtcgctgtggtaagtttcttcctcggcggcgagagaaccagatttcaagaacgctgcaaaagtcatcctcctaagataatcgttgtgacttcggttttcttctatagccataatttttctaggttaaaaaaaacaatcgcttgattatttgaacgttgacagaaacaaaagaaaaaagtttgcgagtttcttttttctgaatcttgaaatgttcttgagatttgttttggtgggattgtgaaataagagcatgtatagaagacgatgggtttagggtatataaatacagaatcggacgtagaaaggtgggaaaacttatgaacgtgtaagagtgacacgtggtggacgagatgtgagtgatgactaccgggacaccggttttaccagtttccttgaagagtcagagaccaaaaaataaacattgaaaacgttagagacaaaatcattgaaagtcacttgtgagtattttctgttaattattatttaatttcgttttcttattaaatataaaaagtttcgttgacaatttgacataatatcctatgtattttcacgaagtagtttaatgtcgctactaaatatgtcaaaatgtgaaaatatttggggttcccaatctatgtatattatctgattatggtccaatggtgaaaaagaaaatggtttaatcgatattccatccgtatatatgctatagcttatatacatgacaatatgacatgataatttaataagttttagtgaaactgttttatttaacccatgtaaacagttgacaaaagaaatacactccgtcttaaaatctgttttggggttggttgaccaataaaataaggataagggctgtgttgtccgctcgttatcctcacacgttgcataacataacgtgaatggggaaaaaggtatttctcgaagcagtaggggaaattttccttataattttgtaagaagaagtattcttctagatatttgacttcttcgactcccaagtaaatttttgttttttgtttgttaacggtaatgttagataaatgaaatagtctagtctttgcagatgagttgtttgatcgaagaaggttacagttactaatgaagcggatatattgttatcattattttgaggatgatgagaagttggattaaaattttcttttgcatagttttttttttcggaataaatgtaaaattttgttcaaacaaaaaataaattatatataattgtattttgaaataatttgaataaagaaaaaaaaattagattcgaaaggcgaaccaaatctgtagtccatccttaagtttacaagaggcataaaactaaattgaagatatcttgttgcgtctgatacggtcgatgaatttgaatagttgattagatgggttggggagctcacaatgcctccgtttatctcgttccatccaaatggtatgaactgttgcttgaaggactagtcgaagtatataataggttgtggcctttgaatgttggagatgatagtgatgatagaatctcttagagattacttgagtaatttcttaaaagaagcttgtgagtcagtgtcttccaaacatgtgaggagtatgggaacccaaaaaataaatgtagtagagtctcaacgggctcattacagagaacaagtgatgggtttactgcattgttccaagctaacattcgctcccatatagataatctattcttcacatcaagccatattagaaaagaaaaccttgggattgaatcagagaaccacactcctttataccaattaacgtacgtgacgaatttgttgccatgtgttcgatgaagagaaccacggcttaaatttggtgcttaagcttctcttctaagatcaatcgaggtggaaattggtaagataagagataagggccttactcttgcatctctggttagcaaccactaacgtaacaattgcatcagataagattcccaaatctatgaaccccctccctccaaggctctcgttgaaacgaccaagcgggctccaagcatcataccaaaaggtgtgcaaaccacttctatgaaccccctccctccacatccaagagcctttatttgtggtcgccttgaccgaccaaaacgaagctgagcgaattagtcatcttcgtatctagttaaccaaaagagaggtgttatttgagactatccaccaaatcaacttgaaacaacaaactttgttcatctcaacgattgatttcaaacctagcccaccttcacttctaggcttacatacaccactccaagctaccttatttttctttgaatttaggtcagagtccgactaaagaaatatcgtacaaatattttttattttccaaaagtttgtgagactagcaatcaccgagcttagcaactgcaaacgaaagacataagataagaatctatgtttcctagctaattctggttctgattttctcaacaaggggcagagaatcatccagagacatacgcttagtcagcaagggtagccccaagtagcgaacaagtagggatccagcttcaaaagaaaatatgttaagatttcttctcgggtagggtttgagacacaagtcaagaataaggtggatttttctaggatgatgtttagtccagaagccactgcaaattcgttaaaaacctttagaataccttccatcaaagtgatctttccatccgagaaaaccattatatcatccgcaaaacatagattagtaagcttcatatttttgcacctagggtggtaaccaaaatttcctctttgttgcagtcctatcaagaagatataagagtacattcatacaaatcacgaaaatgtaagaagagagagagcaatcctacctaagatctctttcgattcggaaaacccagtcaattccctatttacttgcactaaaatctgaaaaggtagccgtagaaacacataagtaggtcgagtgaacaaatttgtctgataagtctaaagccttcaagacattcaacaaaaatggtcattgcaccgagtcaaaagcctttaaaatgtctattttattacaattaaagtgtattatcaattttgattgttaaagtgtattatcaattttggatgtaatatactttgctaacacatttcatagctaacatttagtcatttatagacttcgaacaacggattattatacagaaaacctttttcggtccacaattcaaattttagtatagttctcatgacgtccttgctagtaattaaaaaaatgaattcgtcattacacacccgttattttatgcattttatttaggtattccaagtgatttccaatctaagtactagtatgtaacgaatttcttaaaacttgcacgcacattctattttactaggccattagcataagttgtgtttgtttttttgagatatttgcaaaattatcctttttattatctttttgcaataatacccttttgtgttgttcatttttaaaaataccccttccctcgaacaaaatgactaaattaccctcatctaataggaacaagtaattggaaactgaaattttcccgccaattttttggcgccaaaatttatttttacgccaaacttcttttccgccaaaaaaaaaatttcccgccaaatttttttttcgtaacaaattttttctcaaccaaaaaaaccttttaaaaatctttgtaaatttttttggcatgaaacaaatttacaagggattttaaaagggttttaaaaaatttacaagagatttttaaagggttttaaaagatttacaaagaattttaaagggctttaaaaaatttaaaaaagtttttttaaagggttttaaaagatttacaagagattttaaaagagttttaaagtatttaccaaaaattttaaaagggttttaaaagatttacaagggattttaaagagttttaaagtatttaccaaaaattttaaaaaggttttaaaagatttacaagggattttaaaaggttttaaaacatttacaagagtttttaaagggtattcttgtaaattctttaaaaatattttaaaaccctttaaaaccctttaaaaatctcttgtaaatattttaaaacccttataaaaaacctttgtaaattttttaaaacccttttaaatttcttataaatattttaaaactcttttaaaatcgtttgtaaatcttttaaaatccttttaaaatcgcttgtatgtactttaaaaccctttaaaacaatttaaaaccctttaaaaatctttaaaaaacctttgtaaatcttttaaacccctttaaaatccattgtaaatcttttaaaatcctttgtaaatcttttaaaatcttttgcaaatcttttgggttttaaaatcccttgtaaatctatttccctccaaaaattgttttttgcgagaaaaatattagacgaaaaatattaatatttcattttgttaacctaaaacaatttctaaataggagtaaaatggtcattaaatatttaaagagggtagaaatgaaaatggaaggagtattattttgaatctgctttggaagatcacgaggttcacttgtcatgtcccatttttcgtgctttcttaaattaaattaatttgtctcttaataaaataaattaataacgaatagcttagtttaaatttttacgatatttatactactttatttgttttttttaaatctatatatacatttttgcagccattttaacaaataaatcttagagttggacttatttacaacccaatgccattagcattaattgttttccaaaataattaattttactttaaattcttaatttaaattgtcaatcacattatcaatcaaatttaatccaaacaaacttcacattaatcccttaaaattagcataaacatatttgttatcaatattttaaaacaaaattttttatttaaataaatattattcttattaaacgttttttgtttaaataaataaatcctgtatttgaacttatttacaatgtcatgctattgacattaattatttagaaataaaaatatttaattaacgatttaaatcttctaaatctttgcttttagagttattatgtcattacctataaggcaaaaaatatatatttttttaaacattattatttatatatttaaactttataaaacattattaatatttaaacttataaaaagtttaatatatcaaaaaatttaacatcattattaatatatagtttaaaaaatctcaaaaaaaattccgtcatattttgtgattcaaaattttaaaaatgaacatatattaaccaattggcgaaaaatgtgtgggttcaacatcccgcatcgactaaaatatttagacaatgattcataaataagatcaacattaataaagtaaatagttttttttgcaggatgggttttgcgggacgggtttggcaggacgttacttaataacagttgtaaactataaaataaaaatattttatagataaatacaatttacaaatttttatatacactaactttaaaaaataaattgtccccccggtgtaccgcgggttaaaatctagttattagttaaaagtgttaggggaaatgtttttagttctttaacaaaacataaaaaggtttttgctttgattcatagttttgtttctgtctatatcttttataattattttctattttacaacatgtctctaattaattgttggctgtttttcctgtttttaataaaaaaatttcagtatttgttgattgcttttatgactttttagtagtatatgttttgatcatttatagtcaattttcacttttagttaatttttagagatttttctatttattttgttctgatctttagccgtttcagaatttactattcttttcatgcatgcatctaatttcttatatatacactattcataatatccattgcttattattttcaagttttcatttctattgtatcatcaaagatgtctaaacccaccgttattgttatctttatggccattcttgttctaggtttacttcacacttttgacatattatatgattaataatttaaaatatgaattcataatacgcattttcatgtgtcttctcttttatttcatatttttcttttattcgtcgcttttttattataacaagttgagtaatgttttatgtgtttaggaatggcgactaaggagacgcaaggagcaaactgtgttaactattttgaaataacatttccagaagtatgtgaagcaaactggtgtgccgctgagtgtcttaaggcttacaagaatggaaaaggcacgtgttggcaaaagttctgccagtgcgtctatgattgttgattgctatacttggttttctttctataaactatcatcaattctaataataaaatactatttgctagtttttatgtgcatgtgaattatgattttaattatttggcatgaactataaattggtattttagcatagtgtcggctcatacatttaagatgatttgggacaaatttaaaagatataatttatgttttttacaaataatttttcttttataccctttttacatatataatttttttaatcctttttacatatacaaaaaaaattgtgtgtatgttttacatatataactttgtgtatcctttatatatataattatgtgctccttaaatttgtgaatggcaagtgaccttacccatcaaaattttgtataataagacacatatatcactagagccggtccaaagcgccaacaattaaggtaaacaatgggtctaagtaattatttgaagctaaagtatatgtgatccactgtaagatacgcataaactgaattacacatatatagtggtaagtgattcatccaagtcttagaaattcaaaaggaactaaatgggaatcactcatataaaaaaaaaaacttttcaattgaaagttgactcatttttcaaatagaaacgacatgcatccaaaggaaaatgctaaaacgattgtaattataatgtcttgtttttggtgcaagcaaccgctcacatgtatactgaaaccatatataaatacgtatcattacaaaagaagaagaaaaaaagaaactagctgagtatatctgttatcataacaaatcaacattttactggttaatgacatttttaccaaaaaaaataaaattgaagtgttgacatttagtaaattgcaatttgtagtatgtcatgtgtgtatcttattcttctttctaacaaatattaactttaaaaaccaaactaggaagaaaacgatcgaggtgtataaatgttcagtgcatctgtataataatacgtatttaacttattataatctcaaattggtaggttttgaaacgtagcaaggttctgttgactttgaatctttgatgtatcatgtttgtggcgtaatttaacttattatagtcctaaaatggtaggatttgaaacgtggcaagattccgttgactttgatgtatgtagcatgttgatccatttattatttgcttccacaagaaaactgtttctttttggttaaatacaagtaattaactgtcatgcctttaaaaatatctataaagatattttacttaagtatctaaaagactaaaaatgcttttaaaatatcttaaagataaatatcagatcatctaacatttatacgtgcttttgacccccaaaaaaataacatatacacgtgcccagttcgtgtccatagataataatatacatacaatctacgcgattagtttaattaattagtacgccaaatgaaaaacaattttactggcttttaatttatccgtcgacaataagcgaaataataactcaaagtatatatatttcaatatttttactaaaagtaatttagagtttgaatcaaagtttactgtaaatttttctgaaaaaaacaaaaaagaggaagtaataattaaacattgtgtcaataatatgttgatcacttttcttagttgttaatcaattcatataatcccgttacatcatttgcaatttatcttttttttttttttgttaactagaatccatatattgatcttttaaggttaacgaaacagcttacaaaaatttacatataagaatacagtacaaaatgatctttctactaaacctaaaccatttatataagggaatcttgtaaaatctgccatattccactttatttctttcaatcccagctatattctgaaactcttttcaaaatctgccacattttggtccacgtggaattcagtggacgaaagtactccttaaagtgggtcagcgctctgacgaagatggtgacataacaacttttggctgatgtgatgatacatgacgaaaaatcatggtagaagcataaagagatcgtttagccaagacggatggctagaggcgacgtaagagcgaacttatactcctcgatctaaaacactttgcgcaataacacgagctcctctattcgcaattatttgaaaaaatgtgttatcatttgtaattaatcactagcgtaattttatggctttcctatatattttattctgaaaataatcataaaattagctaacaagtaattttttcttgttacttctgtttggtataaatcgttttaaaaaattcattaaaaaaaagttacgttccaccagaactctagagttaaagaaccaaaaataaaagaactcttaatcaagcaagaaaacgaatgtataagaattctaagtacgtaagcgtatcaattgagcgtatctacaaaatattattatagattaatagttaaataattgtgtctcctgggctgctgttgcacttgtattactcgttttagcttaatcagttgtataaacaaacttataataatagtctaaagatgcttattagcatttgtattgagatcgcccaacacatctggccttgtttggcggaccgaaacattacaaggatctgcttttattaatttttatgatttgctgaagtaatcactgctcatagtttattacatgcattgccaacaaacaaaagattattacatgccacgtgggtagatctcctgataatccgtttttctcatccgttttgtcgtcgagacatgtgcaatgtaaatatgattattgctaatcatatgtatttagtctttgaccatgaattaatatttggatgatcaatttatggactccggacacctgtcggttcgcaaaacttatttttggtttccaacttcgtttagcggacaagaaaaactagatcatgttagtatgtttacttacgtctcttttagttttatttagtttagaatcaatctagaaaatccaatgctcttttaatacgaacaatacgtgatatgttttagttctaaggactaatttgtttctgtaacttttctgattacgatgatgaatcaatcgtatgagaatgattagtttagttgatttatacatacattattttcaggtttaatagatgaattaacccaccaagaaaaagatatttaccttttgtgttggcatcatatggaccacttaaggttaataattgtgtcttcaactcaaaacgggaaatcaagataattttttcttaatcaaacattgacttcaactcttaggataactatgttaataattagtgtagaaatccagtatttatcaaaattctgaatgcaaatactaatgtggttaaaagttttctttaaaattttcatattttaaacctctagatgaagggtctcgagagtctcgtacggtaggagattcgtatggacgaaaaaatcttgaaatgggtggggctgtgcgaaatgtttttttttttttttggagattctttttgctaacttaatatgctgtgtcgttttctgattggtcaatcttccagaaagaaaaataatcccaaccattagaaaattatcatatataaaaagatgggagaagtgagaattgcttttaaacgatgaaaagttaaaatttcgatactcttttgaggtttttcttatcatagtatcaaaagtatggacaactaaaagataaatcaaaatgtatcaagaaatctttagtaaacgttgcttaatagtatatatatagtttccaaactataaatttagtgtaacaagaatcacatgatgagaggatccgaacacaattttgtaacatatcatacaaacccaaatagcatcagaaaatgaatagccgatcggtatctaattatctatgccatggacctctttgcttctgaataaagttgatcaactatgccctgaagtaaaaaaaaaaaaatcgttttacaatcttaaaaatggatagtataacaagtaatatgcattagacaagttcacgatcatagtacatttgcaacaaatcacgaaaattattctggtgatccatcctaatatgtaattaaggttcttttatttttctgttttcgtttgcgtttccatggtttacatatttctatgttataatggaaatacaaacgtaaacgcagaaaattagaagttagatcgaaaagaaaagaagaaagtgagtagagaaaggatcaccttgtaatgttggaggagctgtggccttttcagcttgaaagttggagtaataagatctctttcaatatcaaaagggtttggttctaaatgaatagcttttaacatttcaaatcctttaagctacaaatataacaaaataagtattattctcaacgttaatgtaaaccatttcaaattttaaatgtgataatcataagtgtacgtacttgatattgctttgcggtagagttaagctcatccaagaagtatttttgagctttgagattttgacatagagattcgaaatcattgggagattggtaattgagtttagcccaatcttcaatagcttttctatcaggtacaaccacacctaccaaaaatgactcgaagctgttgccatagacccatatctgtcacaattattggtagatagtacaattattagataacaattattcaattactatgattatagtattgaaaacataattttaataattacatacctgagcaatgaggggacatcttgagtaagtgttttcgaggttttcaacagcaacatattcaccttgagacaacttgaagatgttcttcttcctatcgatgatcttcattgatccatcttcttgccattctccaatatctcctactcatataaatgaaatcaaatttcaacattatccaatacaagttgcttttgtaactaacaatctaatggttaaaatatagactaagttttagagtctacatatccattttaagtaaatttcaaaataaccattcgagacatacgagtggaaaaaccagccactcttctaccaattactatcacttgcttttcaatcatattatttgttacaactaaaagttaatgcaaagcggatatattcgatttatgtgatattcatgatccgttctgcttcatctagatcaacatttttccaatttttacctacacataactagttggatatacatttaaacattcaaaacatttttccaatttttatctactccataactagttggatcaacaacaatacctgtgtggaaccatccatcgattaggacttgatcagttagatcttgtcttttatggtaaccagaaaacattgaatttcctctaagacaaatctctcctctcggcacgtcagcggaaaaggcgtcgtaacccatctctggtacggacactagccttgcctccaccgtgggcattggcacacccactgtccccaccatagaaaatactccggctaaggtcgtgaagcttcccccacaactctcagtcaatcctgtcacatttcattagaatcggcttagcccaaaccaagagatcggtgtatgactcgaaattcggtttaggtacacttaccataaccttgagagagattagaggcaggaatgattctcaagaactcctctacatgacgaggtagaggcgctgctcctgataacaacatatgagctcttcctcctaatgcttcttttatctgtcacaatttaaattttctgaaactgtaagtctatattacatgttatttccatcttatcttccatttgagaaggctaggagaagatcataacatttattgtaatcagtgactacaaaatttaataatttttatttctacatcatagataaatacactaaccttatcgaacataagtctgtctagacgaggagaagcttcttcttgagagaatccttttctcatatttcccaatttgctgtattcacaagatgattttaaagataattccaagatccgtgtttttctttataataatttggagaaacatagaaaacgtactagttataagcaaaatcaaacagtttcttgcgtatcaagccactagctgatattttttgcattatacctgcagccatataaaatagaagaaaattcagtaaaacttgaataaaatgagggtaaactcgaattttcgacttgatcaaaagtattataccggcatatagtttgtcgtaaactcgtggaacaccgcaaaacacagtaggtttaagagcttgaacatcatccatcaggtaccgaatgtcctgtctcaaatttaaaaaaaaaatcagaaaatataatgggcattttgtgggaaaaaaggattcaaaattaagagaaaattttgcttacgccacgccagtatccaacagaggagcctctagataaaaagtaaatctccatgacttgatcatagcaatgtgctaatggcaagtacgagaagaacacatcgctcgtgtcacactacaaaatttccaaagaaataaaccaaaatataatttccaattatgtaatcatgtgtctgctaaattgtaacaaaaaaattaccgatcgatcagtgacttcaagcattttgtctatggataaaacctggaccgaaattgctgcgttgtttaagattacacctttgggttctccagtcgtcccgcttgtgtacattattgtgcagatgtctgtctttcgcttacgaggtagatttgcctcatctaagtttccctgataagattttcaaatacttatttaagacccacgagagaaagaaattcaaatcttgataaagttaaccctataagtcaaaatgtttgtaaattatagaagttatatttttcgtctagttctaaacactgaccattagtgagaactcattccatgaaaataaagaaacacattggttcttagcttcttccttttgtgtactcgagacttccccgaagctcacaatagctaaaaccgtaagtcaaagcaaaagaactatcttagattttaagatcatatttatacaaaatattatcgatttttaaagacatgtaacttactcttcaaattcgaagaacatcccttttggcacgataagatctgcagaaaaactttcaagagttaattacaaaagcaaaacaaaaatactttcttgttggacaagaaacctaaaatgaaagttatggtatgactgatttcaattaaaaaaattgacttaccgatgaaactgtcttctcttgaacaaatactagcgaaacctcggcgtggttgatgatgaattcaactgcgtttacgcctgttacatcgacattcaacctcggattaggttttcataactcatgaatatatataatatgaagacaagcctaagataaaatgttgtatatatattgatcggtacgtatatatcaacgtatagagggtacctaaagaatcgtatagaggcacgtaggtgatcccttggctcatgcaggcctgcaatataacaacttagagaaactctataacaaaaggcccttctcaatctcaatcatctatatttctttcaaaacaaaaaaaactctataataaaaaggaaaattgaaccctaaattttagatataggtcaatttttttttacctccattgcaataatccattctggacaattagctccgtaaataccacaacagtgtccctactccacaaaaaaagtaagaaaaataagaacctttttttttggccaatgtctttcaaataaattatatacttgattgattggatcatgtcataacatagtaataatgtaccggatcaacgcctcggcttctgattgctgatccaatccgaattgcagcgtcgtgcgcttccttatatgtgatccacgtgtatggaccgacctacatacacacacattaatgcttgaaattgttgataaataatgaaattatattagttaatagtctacataaaaaagtataaagtaatattagagactatagtattataatatttgtaccttagaatcagtcgttacgcgttggcccaacatttgctcattcggatatttcttcacagcctcactgaaataagaatacacagagaagagtgagacaagtttctatatcaaattaatacatatcttatacaagaattgttattaatttagcttacattaatcagcattgaaccgaatttttttttaagtataataaatgtaaagggtatcaagatccatacctaaagaactgccaaggagaatcaatatcggtagggagatcgaggaggccatctttagcgtatttacatcgataaaccggtccggccgatggatgttccgctgtggctggccttccttcttccaccaacaacacattatccgcggctaaagacatttgtgtaatatataaagttgaggaataacactttggcgaagaagaaaaataggatggaggaatgaagaagataaggagtgtgagtgtctctctttgaagattggaataataaataatgttttgaaggttaataaaagtctctgtgaatcggtggtgaagtttggagattgtggttatgagttagaggaagtagttgagcaataacttcttgagtctcacaattggtgtatttctgaccggtttttaattgcgcctttattaggagcctctctttcttttgtttgttatctaaatgttttaaatactaatttttgtgtctctatgtgttatatgcaagtagatttagtgggtttgaatatagtaaagaaccttaagagtaaagagtaattggaccaaacgtagactatttacaaactgaccatttgcatgcaatttggttttggatttaacaaaattaatatatttcgaattatatagtttatagtttgataacttagatcatttgtttttgtactcttagacctcaccagctcacagtcactgtcataatcaggatctttatcactatagtaaccagtgattgtgatagacctcacctcactaattaaattgtgcaaccaaatcagtttttctttgtttatgatttactgttcaagttatttacaaatatcagattaacttattaaacttcaactttcggatgagagaaagaggctaatctaattagaattctctgggttaacactagatcgtcaattaaatcaacaacaaaaggtactcctatcttttacccatactgatatcaagttagctagattttgatatttattttcaaaccaaattacgtatatatccctaataattagactttaaaaagtgtcaactctacagattttctctttaatgaaattattaataaatggacgagcaagaaaagctcactctctgagtctccgacctgctccctatattattacaaggtcagcccatttaattttaataaattttatcatttcatttttatggatattttaataaattttttttttttcaattagaaacatagtcaaatatgtaatttcatcaaatgaaaataaaatatactatcttttaagacctatagtattctataaaattgttttcttattgtgtttagtcaatatgtatacaactctaagtaaataaacgactacagttattttattcacatttttttctatcaaatttgtagtccattttcttttgtttgacatgtttatttttttgcttggtaacagtggaaacatcaaatttaacgctaactttcgaatcttatgtcataacgtgattgttggcgtgaacaataattcttccccagccttaacaatttaattttcggcgaatctataatctttataaataatggaaaatttcagacattttctatgaattaaatttacaaaaacatgctttttctttaactttttataaggaaaatatccaaatttgaacgatgttttaattattatgggtatatataaaaaaaacttatccctattatttttttttcttttttataggtaaaaagtttttacacggttaaactacaaagtaaattcaaataaatatttaacatattttagattttgaaaagtttatgttttcacaatactttaagaaagaatattattttcttctcacgattaacgcttgaataataatttttccaccaaggtttattttgttttgtgtgttcttacacattcacattctagccgactatcattggtcagacacggtttctcatctaatctctgtaaaatacatcaaatgggattataatgttttgtatcacaaggtggttccaatcagtgatctattacttatggaagaagagaaatttgagtcgacacagtcgtaatgggatctcctcctctcagctcgttcgcattgatttggaacttaatgtctcacttaagtacactggcgtgcacatgctcaagggatagcttcgaaggtggtttgccacccgttgtcatttttctccgaagaaacaccattttttttctattacattagtattattttttaaaaaaccgaaagttctaggactattcaaaaaaaaaaaaaaaaccgaaagttcttggccaaaactcgtaaatcctcgctccgaaaaaaacagcagggtttagtcctcttccaaaagaatagaactatgctttgtttctctctttagaacccccactaagccccatcatttgttttttggtaatattttctttttgttaacaaaaggaaatttgaaatttcaactaaaaaaacaagataggaaaaactttaaacaaaaaaagaaaagaaaatttacattgttttaggacaatgtaatatggaataatagctatggaaattatacattctaagagaaaagtaaattgtacaatattcaacttctttttccttggaaaccctctcgtgaaactccaaatatatagcatagctgcatagtagtgttagtatatacaagcaattacactgaaaatatttttcttttcaaagccatggccgagaagggtaaggagaaggtaaataaacgctctcttctttttcttttttgtgcttctctttgaaaccgttactactaattgttacaaaagttgtattaaaagctatgagaacattatatgatgaaattaaactaggtaacatggatgaaattgaagacggagcctcttagtaacgaaaagaatttctcgaaagtcaagaaggctctttcgagcatacctcgtatgttattgttatatctttctctccttttacgtctcttttggtttgaaattaaaaactcataataataatttgttttatgtgatttttttgggaaaacaaaagaagtaagagaccaaaagttcgaagaagaaaccaacacggtcacaatcaaagtggtttgctgcagtcctgagaaagtgatggacaaactctgttccaaaggacgtggagctattaagctcatcgaaaccatcgatccggccaaacatgtggctcaaaagcccaaagaacctgagaagcccaaagaagctgaaaaacctaaagaaccagagaagcccaaaccagcagcagctccagctcaaggcgatccaagttctcaacgggtgacacatgggtataatccaccgccgatgatgggccatccggtgccttggtctgatgggcctaactacggatggtcccgacccaatgggtatgatgaaagacccatttacaatagctacggaggttggcaaccaccaccatcgcaatatggtggcagatcacattacgaagaggaacaaccgtcttgctccatcatgtgaagtcgtgaaccattactattacattatctctctttaaagaacaaaaaaaacttatttaatttttctattctacacaactagttttgattttcttagcctttaacaatttctactaattaaaagcgcacttgaatgtgtgagatcattttgtttgacaataatacataatacttcattgtgttctttcgttgtttggtagtaacaattttttaactattatagcctgatcaaatacattatactaggttttaacccgcggtttaccgcagacgatcggtttatttggtttttatactaaatatttgaataaatttgatattttaaacttataaatataaatttctagtgattagtgaagaatcgtaatatatgatttatatattattgattattgatttcgtgattgaatacaatgtttttagggataaaatgtgatcatatttttattttaaaaacgacatagattccttatttttgttgaacggtttagattgaaggaaattaattttattgaacggtttagattgaatcggatcatataaaacttaggtgattgttaagaccaaattacccttaataattttgaatagcaaagaacaaaatccaaaattaaagccaaattagacaaaatttcaatttatactttctttctaataataaagggatgtatacattttctctaattatgtctcattccattttttgtttttaattagcaattaaatgtctttcctttgctcggctaagcatctccgtatttactcggccgacaaaaggcttcgtgtatcaccaattcatattaaaggcttcgttaacggcccatattaaaaactcggcccacatctaaaaacacttatattgtgaaaaacgagacggcaaatcaatcgagggttagggttttagaatctttaaagaatcacattcacacatcagagaggaagaagaagatcgcagccatgttcccaggaatgttcatgcgaaagccagacaaagccgaggctctgaagcagctacgcactcatgtcgctctttttggcagctgggttgtcattatccgtgctgctccctacgtcctctcctatttctccgattccaaagatgagctcaagatcgatttctaaatgactctttcaattttcaggtctgattattgaattctatcaattttgtcttcctttgtcatgatttagctttgatagatcaagtcataacgatttcaaattcgtttgaattagttctgtttgatccttaatactcttaggatcgagttatggtacttgcttgagtttgatcaaaagtatagaaactggaaatttggtactcttgttcattagagtattcttgtcattgatatgcttcagcttatgcctttatgactcacttattgatatgaaatatatatatctgtgtatgaagaagcattatatatacccaatgtgtagatttagggattgttgagtattgatttgaatatgcttagtaaaagctggtttggtgttaatcttcagtattatgatcatgttagatcaagattgtgtgttgttttgaatgtgtttttgaaaggtttgttaaaaaaatttcaagccaatttaataatgtgtgtgatttatttacacatagatttctcattgctctgccatactaagatctctctggtctgttcttaagtaagttttaaggcttgttcatgagaatgtgttcacaatcattaaagcatgatatgtttcagcttatgtctttaggctcacttattgatatgtgaatatatctgtgtatgaagttatcttagatactcatgtatcccatggagatttagggattgttaagtattcactatgcttaggcgaaagcttctttgcttgtttgctcctcttgtgtgtcatgagagagagagtcttcttgaagaaaccttcaaaatttttctgaacatcttagattaagattgtgtgtacttagaatgtgttttgtcgattaatccaagtattatatataatgtgtgtgacctcgatgctatgggttcccctgttctcagccatattgagatcgtcaatgtcttgagtttgctaagccgcctattgtcttttatctcgtgcagcgttgaagcggtgagatagatgcattatgaagcaatggaagatatcttgtttgtttttgcaaccttcttactcttaagacctgagattacgaaatcatgagacatttagttatatagtggtgtacttttgggatttgtttttggtttatgttcttctcaccaacgttctccaatttccagcaaattaccttcggctattcactaccgatttgcagatcagattctgcccattattcttttgaatttgcaaaattttcttctcagaactagttttgtcttttgtggagcgttttaattaaaacactttttaatgaaacgagtaagttttggacatttctaaagtgttgtcttgtgattttctaaagagcaatcgacttttcgtacaggaggaagctagatgcattgaaataaaataaaataaatataaagggggagagatcgggaattgaagaagaaaggaataaaagtgttttgcaaaacagttttctccgacaattgctctgctttgtctgatgaatacagaccacaactctttcgacatgaacagtcttctcttttccaccattcgtaacactcacaaacaacgtgcgaaccagaaacactctcaacttgtctttcttttattcctctcttaattctcttcttcttcttcgtcatgatcatgatcgtgatcgttttgtccttaccagataacgaaaacccctatgatttaatcgaaaactacacaagattttgcagatccatgtcaaaagtttccatctttatcgagttttagattcaacagctaacctacgtgccacacaagcaaagctggggatggtggaggttcctggctctgtaggcacaactgcaagcctttccttaaggttagggcagatggtattagcatttggctctcttctcttcatgaccatcggtgttcgcttctaccaattcactgctttctggtaaataactcctaattccatattctatattctattatcaaccctaatataatcttagtgacaactctgcagctacttggtgacgatcatgtctttagctataccatggaatctgacgttagcaatggtagatatctattgtgttattctccagcaaccatttcaaaagccacggatccttctcgctatctctattggtgattgggtaacgctattatatatctaatgcttactgagaaaaaagaacagagtttttgacccgaattcaccaatttttggtttcgcaggtggtgtctgttctagcgttggcttcagcgtcatcggcagctagtgttgttgatattctgcgatcaaacgaatcctcctgccctccaacaatatgcaacagatatcagtttgcagcaacattagctttcttgacttggttcttgtctctctcttcttctctcttcaatctctggttacttccttctctgatctaaaacaaaacataaatagataggtagcaaacaaaaaattatctccaaaaactcaaaaccttgtaactttatagatatctaactaactaaagaaaagattcataatttcaggcgttaaagaccaaggcactgatgttggtgttggtactgatctttagtttgtcatactggtgtcacaacttgtagagccaaagatacattttcactcattgttccatacccaaaataacgaatgtaataacaactcatcactatctcacacttctgcttaaaaggcaatgcactgatgatttgccaaaataacataagaagacagagtatcttaacatgtgttattcatctactttcaccagataatctagtaccatcatataactcattatcatctcaggaaatcaaatatcacagacatgatccaaaagcttcgatgcaatatgctcatagtaacaactcctagcaactttctcgcttcgctatgcaacgtttctcttaaaacaactgcagtaagaagaaaaaggacgataagtctatcgattccataacgttcaagtatctaataacaatatgcataatgtcacacatcaatactttaagactcactaaaatccataaaataggataattctcatcaagttccaaaaatcagctgaaactagatatctatgtacgtaaaggactaaagtaatcaatcaccttaagaagtagatgatggaggaatctgagactgagcagaagagtcagtagtggaggctgaggaagcagaagcagaagcagaaacagcagcagcagcagctttaggagaataaattcgagcttttttgatgatttctgcaacaatccaatgcttattcttgctcaaaggccttgatggatctaacttcacctacacatcaaccagattttcaaatttcttagcctcagaggttcaatcacaaagcctaattcaagtggctcagatttaaaagacggaatcaaacgaaattagagtgaaagggaagaaggaaatgcgagagaatttactcgatcgccgatgttgcaggcgtctttgtcgtcgtgagccatgaatttggaagttcgtttgacgtagcgattgtagattttgttgtggaagagtctatcgacggcgaccactacagatttttgcatcttgttcgataccactgtgcctatcactggcttcatattttttttgctgattaacaaagttttacttcaaagatatactgaaatttgggcggacaggagaagatcaccggaaactgtgaacaaaatcttcgccggggaatctgagatggtggaagagaagaagagtgaaatgtttcgttctagggtttcatgttttgtaaagatgggctttttaagaatctcacacaaagcccaacttaactaattgttacttaacgcgctcgcttatttttttatttttttattttcttttatttttttagccctcgcttataagaccttcacaaacttatattcaaccccgtaaaccatcaattaaaataaaagcagtgtgcaaaaaaacattaaacgggcggtaaaaacaatattacagtaaaactaaactaaataacattaaaaataatacgaatcttttttgttttgtatcttctttgtatttatagttgttgtgattttgagttttgttatttctataacctagaattgaaagagagaattcttttcttaacattattcattagtagagcataaaaacatacatcactcatttctcttatccacgtttataacaaaaacacaacacaaaagcataacatagctctatgacacctacaagtcatttttcttacatgctataggacaacacttttataaacctattcactctagattctccaggatttaagcaaaagcaaaaagcacttaattcactactcctttagattgtaattaacttccgattcttctgcttagtttcttgaatctctttaccgtagctttagtaacaaaacatacattactcaacaatagtccatattaatcgagtagaagtcacatagctccacatgacaattgcggtaaccgctattttcgtcattttctctgttttacaagctatcattaacatgcctttgatagagtagaagtcacatagctccacatgacaattgcagtaacctttataacctttcatcccaaaatccattccaccgacaacaacggttttgcttttatttttaaacaattaatcattattactccatgtagtcctaataagtaatagtgaaatgcctttttcactattgttaattttttaaattttgataaataatatatcaaatcgaaagcctcgagaagaggaatttctctatagctttaaaattttaaaaatcaaatgtatgtgatcgtgaaaacgcttacaatatattagaaatgctatattgcgtaatatttttgatttcacatgattattctgcattttttgaggtggaaagtaaatttgcaaaaaaatataactttaagcgttttttgtacaaaatccatatttagaagatttggttaagatttaaaattaagatttttttatcagctttgtttgattttttttttactattttgaatcatcatataattcataaagttaagaaaaatcttataatttttgtgcattaaaaagggacatatattacctaattaataaaaagtttgtgattaacgtaccatatcggctaaaatgtttaggcaatgattcatagatattataattttggtttctagttaaactgtttaattttaccggaaatattaaatttaaaatttttaacttttattttgtaaaaatattatcattgatatatttaaaatcaataaacagtttataatattatgaacattcgaatatataaacaaataacacgagatatattatattgccgagcggggttatatggcggaacttttgaatcaatataaataaaaaaaattaaatatcattaagtcacggcttcaatacggattaaatactactcattttattatttttcacaccaccaatattagacatatcgaatcatactaatttagataagggtacaaaacaaaaattgtctattggtataacaataacttaataacaattataaactttaaaatataaatgtcttataaattgatacaatttgcaaaattttatatataatacataatcattaaaatttgaaaatctctactttcaaaaaagcaaatcgtcccacgagttagtttaggagtcaagcggaattgaatatgaaatatatttaagttttgggtttaaggggtctcaaatagcaattgatactggaaatgttacttaagggtttagagtttagactctctttattgttgaaaggttacttaagggtttagagactctttattgttgaaatgttacttgaaaagattggccagttttctttggaaaaaaaaatgagacttgaagaaggagacttaaagaagtataatcagattaatgcagcttcaatagttcttcgaccctgttgatagtacttgtagtggagatccacatacttggtaactgttttatacaatcttggtcttgcctcagtcacaagcccatctgcagggtgaatctctttgtctagacccggtacacaaaacgttgccacagatatcctttccttctctctgttggtcaccactcgatgaaccgggctcttatatatcccattactcattatctaaacacacaagagattatgtcaaacctacaccaatcaatctttgaaaatcatatgcatatatctctacaggattgatgtacctccatttgatcacctaaagtgataagaattgtatcaggaactattggagctttataccacttcccatctttaagaaactgaagcccttcgacatctttgtcgggtaagagaagagtgatagctgaaccatcagcatgcggtttaatcccaataaccttgtctggccttggacatggaggaaagaagttgaatcttgaattcattacagcattttctccatacatttctagaaaacaattctcttccaattccaatgatctagccatagccttaaagaatttctcaatcaatacccgttgcttcattgtgtattcatctaacgtctcgctgaataaaaaaactatagtcaaaatcaccaccacagtcaataatgaaccaatgtggtgtcactttcttacctgaatccgacagggacttgaggccagaatttaagttgacgcttatcttcagggtaagtagtgagaaacaaacggtcgatccaatcaagaacttgattatcagacagaatcatatcgttaccatatccttggatattacctgtctctctagcacacttgtgtttctcttcggtcggaagcgcaaagaactgcttggttagcttgtaaatcttgtcaagaaaagcttcagtaattccatgattcatcacctgcttacttcaataagaacttgtacagagtttaaatcatgaatctgatcatcactaaccaagatagtcaaacctgaacaacgccccatgtagagagtgctgagtgaagtttcttcatctcttcttgaccgtctacagaggaagagaagagaagactgagatcgatggccggaatatccatctccggcaccgcaccgttaagtggttgactttcgccttcgccggttggtgcatggagatatctctccggtagtccttgaccggctgcaaccacctcttggacagtcttgaactttggcttctccatggttgctactgattttacaggatcttgaatttgatgagcaatttgggacaacagacaagaatcttgattttgtcgtcggtttggcattattttattaattttgtcggcaaattattattattttttcttctaaattttgaactacgactaaaaacataggaaactgaagttacagatacagatcaaataacttgacaaacaaggaagctaagactcttcaaacaaaacttccatacaaatcaatttgaagtttcagtttttatagctcctctctgactctctcttcccatatgattagcaacatgtagagtgtgtatgtgttctccaaaactatacctgttccataattctgtacaactatattggtttgaaatgtatcagagtcgaagagctaatcaagattgctcagagacaactgaagtattcttcttgattaactccggaacttgatcgagcaaacgattcatgtcatcagggaattggttcttggctctgtttgtttttccccctacgaccaatgctgttccgttttgtagtgcccatatcttcatacagaacataagagattgaatatcaaaaaaaagaaaagagttagatgatgaaagacaaaaatctagtagagcaaaatgccaatgggacacattggtataaaacaagactttttgatcggatatcgattttgagagttacttttacctgtgaatgagataagtaactgatacaggttgtgagcattagagcaccaaaaccagcatagaccactggtactcctgggtcagtctgagaaacaaggccaagaacaaagatgtcatataatattacaaactaggataactcttcctttttttgtgccctgtgacattttataaagtctttttacctttaactcaaggccagtgcttccaattgcatcttcaataacaatcttcataccattgatctcaatgggaagcttcgagcttggtctccttattccagcgaattttccgtccaaatcgtacacaacaatggattgtagatcccgagctagcatagatctgaaaaaaactcaactggagcaacgttaaggccaatacaagacaccaaaatgtatctctatgccaagaatctaagaaactgtttcatctgttatacgctcctttggcttaatcaaaaagaaaggttcgtcaaaggtaagagggttcttacattcctttgacattgggagcattagtatcaccaacaggtaagaaggtcccatataatttcttgtctccattgatcttaattggtgccatagccaagttgaatggtccttcaccatcctttgtcacctgcaaggctgagaaactccaatctgtctggtatacggtgaccccaccatatctcaagggatcattaacgctaattgtttttctcaaaacctctttcccattaaggtcacgtagtgaaagatcagagtgaaactgtgagacctacaccaaatcaaaacaagataaatcaaacagaactctatttaatcacaagacattgcaatcatgaagacaaaatgagagaacagggaagcaaaacaaaagactcacttctccactgtcataataatccatggtgaatcgattaacatgaacttcggtattaaaagcatctgttggaattgagaaaaacccaattggtgctaagacatctcccatgacaaaatttagtccttgaggaactgtgaccgagcctctaaagctcccggtagcactaagagttccacccaccataatcagaagcattgctatatgtactccaataggtgcaaatcgaccagccaaacctttaaaagcatacaatgaaggacccttcataaacacctgcagaacaaacaaactgaaaaattactatcactagaccaagacaaacctcacagacacatataaaagaacttgaaaagtagaaaactaatcctaacctcaaatccatcacccatcaaaatcattcccaagtcttgaatggaagctctaggaagagtatctgcaaactcctgctttttaattgcctcatctgacttcataaaactccatctgcaatttgccaaagttcccttagtgctcttcagtagaaagaaggagttacaaaacgaacaaaggaactaaaacaaaccttcttgcaaccttaaccaaaggtatctgagtagtataagtacaggccataagtgaagctgctaaaagaaccaacatcccaagaaaaataggagcagagtacatatgatccaatccaagtgtggaaatccatctccaagtgaagaaccctagtacaggattatcctctggatacttttggaaatagaaatcaggggtttcaccttgttcaatcacagtccctaaaaagatgaaactttaatcattttctcaactctaatgcaacaaaccaattcaaatctacaaaaaccctaacacttaccaagagccatgagagcagcaatggtgaacatttctgtaatagcaagtggcaaattcgacaaaactgacaaaacctttcttggtaaaatcttcaaaaaccctaatcctcctcttccgtctcctcctcctcctccaccattaccacctcccttaacaattccatcgccggtctcctccgtaaccggcggtgctgaatcggaaagtgaaatggtcttcgtgagatttctgttactactacttctctgattaccatcttgaggcttctgaagcttgcaattggttatcagagacacatttcgagttctacagagatacgaagaaggtcgagaaaaaggatggattttggagaaatggagaatcttagggtttagtgttacaatcatattcgaaattcggggaattttgagagctcttatcttctcattccccaagcttcttctgtgtggggataaaaatggagctttggtggcaattctgttatcttgtgtttttctgaagaagaagatgagataaaaaaacaaaacaaaaatccaaacgggtttcacatttaaaccggttcaaaaaccaatttccggtttatctacttggtccatatatacatacactcactctcactgacaccaacacaagtcatgatgtgtaagtaagttcctcaaaaactctagtcttttttttatttaacaaaacaaaacatttaagatggaattttccggcggcaacgacggtgatgttagcatttcctctgttcacgcttgtttcaacacattgaattctttgtcaggtataactttctaagatacatatagtttcatatataactatagtcgattatcactcgtaattagccttagtattagttttgttataagaaaaactaatagattgctattttgatggtatatatgtgttaggtgttggaatattggctattccttatgcactttcctcaagtggatggattagcattctgtttttctttctaattggtgtaacaacttggtacaccggtttgcttctccaacgttgcctcaaactcgaccctatggttcgtagttaccctgatctagcgaacaaagcgtttgggaagaaaggtcggttattagtctctttcttcatatacatcgagttgtattttgtcgcaacggcaatcttgatattagaagctgacaatatgtatcacatgttcccacatgccgggattcgaagcacttgtttatcgttattgcttctttgatcgttgttccaacaatgtggttggaaacacaagattttctctcgtatatttcggccggtgggatcctagtttcttgtatacaagtaatgtctattctttggatcggcgctattgacggtgtgggatttaagaacaaaggtgttctggtcaagtggtcaggaattcctaccgcagttagtttgtatcttgtttgctacactgcacatcatgtcttcccaaccatctacaattctatgaagaacaaaaaacatttctctaaggtacttaatttatcaaaacattttcagctaacaagatttgttaatttatataaatttcttcaatcattttaaaccggtttttgttttctttttgagtatacatgcagattctttccataagctttgctttatcatcaataatctatgctgtggtggcaatctttggatatcttatgtatggagaagaggtgcaatcacaaatcactttaaaccttccaactcataatatcagcgcggtgatagcaatatctactacaatcgtgagtccgctaaccaaatacgcattaattctttccccgatcatggaagcaatcaatacacgattgatccaagcaaactataaaaggagaagcctccggatgttgactggaacggggctggttttaggaacaatattggttgcacttgttgtgccattgtttggatatgtaatgtcacttataggcgcacttttgagtagttgtacttcgatagtgtttccatgtgtaatttatttaaagatcagtaagggatataggagatgtctggagtttgagagtgtggttttggtggtgattattgtgatgggtttagttcttatggtcacggggacttactcggcgattgttgggatcactcttcacttgtggttttagaatactactcgtaaaagttgatattaatgatatttaaccatattaatgaaattacgagttaatgttttttttttatcttgtgtaaaaaatttcatttatccgataaaatcttattcatttttaatatatttcatataaaaatcatgttatatttgttttgctttgaaaaaagcacacatactcgattcgttgtaacaataacaaggctaatagccatttgaaaaaacgtgtcattgttggacaaaattgatcacctacttattagagaatactgctttctaatgataaccataaaaaaatcattaaaagatcatgaattttttaaaataaaccgtagcaaaaagaaaaagagattacacatttaacatttcgtctaagacctcaagtcttaggcacaccagttcacttatgttttgacgccaacactgaaacaaggccatgccaaataatatggaaactaccatgcatataccaaaatagccaataaaaatcatttaatgtttataatgttagcattagtttttgtaggagggttatatcagtattggaatcctatatgctcatgagtgcccacgagtccttacttttaaggcactgaatctacatatatgatataaatttgaacttctttcatatggtctttaagtcgtgtataagctccttttactggactcatcacatcaagtttggtagtgctgttttttttatttggaacaactattgtgacggacatgaaatctacacacatatcttggtccagttttaaattggttggaaattgaacgcaaaaatcaggaaattttttacaaacgaagatcaatcacttatgatttctcaagtgtcagtccgattgatttttcgaagcagtccaaatggtaggaatattgtttccactaggtttactaaatccactatttattgcttcaacttctcatatctttgcataattagaaatagaaattgaagagagaagttagacacaaaaagatggagagaaatattattactgatgtgattttaattctaaattcaaccctccttttagattagtgcgagttaattgttaatagtagaatccttccttttattattaatgttattgtttctacgagctccactagctaaaccaattttggagaaaggaaaactaaaactccactaaacccactagttattactccaatttggccatctcatgtgttgaaataactatataagtttataatagatgagtcaaattttatgttttaactttttttttcttgtataatctaattaatattaaactgttagtatatttatattttaagtttaaattttataattcgggatagataccccatataacatgggctctcgtgcgggtttggtgttgctcctatttgacaacagctcaggaggtatatctttggctaatcactatctatctgaatatctgaaagacgaaaaaggatgaataatagactagaaagaaagacgagaaaagaaaaagtgatatccaaacaaaatactgtaggttaaaattctgataacaaagagaaagttataaatggtcgaacgtatggattagagagaaagatatcgaaaagaatccactttaagaaattttctttttcattgcattttgtatttggtatgataactattttggagaaaagctagcatttgcgaaagataaaattaaaggttttttattttgatatttgctctctattttgtgcaaaaagaaagaaaaatgttctttttctggcattctttacgtctataacaaatggatcaaaaaggtatacatgcacgtttttgtgttctactaaaacatttcttcgcaaactggtaagcggattttaattaatcattttttgttgaaagtgttcaatctagtatatctaattatcggtggaaaatgtcaaattatgagtaattactttatttttgacatgttcatagtaatgatataaaaccattcaccaccatgacttatgatgtggtggtgaatggttctatcttgctctatactgctaactttgaataatgaacttggttagagggagcttgcatcatttgtttttttggtgtgtgaggttctgtttttgggaaagctcatggattggagcgaagaatgttctccgctttggagtaccaaaccgttgacagttcggtctcgggtctcatgcgaaaggcttctaaaattttgatccgtcacactttggagttttctgaggtgtttcacaattagcattagcccttctcctcttacaactcatatgagaaggataatttagaacatcattgcttcgtcttttcccattgcttcattgcaaggttgagaagatgaatcgaaatcgtggttttaactaaccgtctttatgcttttatgtttaattctttttttttttgctatggattcatatgtataggttccaaatttatgtttgtaacctaaactttttcattatcaatgaaatatttataatttagcaaaaaaaaaaccgaaaaagttgaatattctaaatgaattcataaagtaatagaactccgtttttgatacgagaaaaatactataccaaacaattatcttatttatttttatcaattctaacatcttatgatgtggtggtgaatggttctatcttgctctatgctgtctttttttgtgtgtgcaaacatatgcatatgcatatgctgtctaatgtctaataataattagttcatttaattaatatacatgtttgccaataaataccattaagtttattctatagatctctataaataagtaattccattctgaatttgcttgaggttcacatagacctatttcatagctacaaattttcaaaatatttattgactatatcagaaaaatgggtgggtatgccggcgggtatgtgattggtgcatttttatatattattgtttaaaattttcattatcaattttttttttttttttaattttctttttaacagaaagatttcttcttcagtcgattttctctcttctctctcatgaatatttcagagagcgatcgactgaactttttgttaacgtccggatcttttccggttatccaatcccgtttagcgggctatcttccaacatgcatcagctcgtattgtgatggatggttggtttgtgttcggtatcgatttgactttcacagtctcgatgatcggttttcgtcggcgttttcctgccgttttgctctcggttgttcatgaccgaataaaggttatgtcatgatggccaattttgggtcaaaatcacaaacttttgaaatcaatttcaatccctaattatcctaccttcagttttagcttctcttcccaaggccttcaaccgattgatcccaatctctcatctatgagatggccagatgggtgttgttgcggttaggcagttcttgtagcttctaccaacaagaattcacaatcagatttggatcaagatctgaaaggtctatttctgcttatccggtcttctgtcgagtaagtctagagatacatgtgtcaacatatcattgatgattccaaagcttcatcatcaaaggttcatcaagttgggtttgcaagtagatgttttagggggtgttattggtttgtgattttgaaagagttttaatgacttttaaaagatatagaatccaaaatcttgtaaagtctttctagaatcttgtaaaatcttcctgaatataattataaactttgatttgtgatttctccaaaattataacatatctccaaaatattgtatactattctctcctcttctataaaatctatctccaccaaagtgaaaatcacacgcataaacacaataactatggtattcgtaagtaagctacatgaacatggaactatccatgaagaacttgaagttttattttcaaatattttgttggatatttacttttcatgtgttggattaaaatgctttgttctaaaaattgtttgtgtgttaatttttcacaaagattatagaggagcacgtgtgggacctgagccataatatatatacagtaaaacctctataaattaataatgttgggaccttgaaattctattaatttatagaggtattaatttatttataaaataataattattaatttatagagaatttaggttaattttgtaatttttttaaaaattatgtttgaaataattttattttatttataatcattatctttctagaagtaactgcaaataaggataaattattgtgtccaaaaaacaacaaaaaaacagtttttgatgtagtaaaaatattaaaattgaactttactaaaaattagtataaattaataaaagtaaaataatagcagattcatatttcactaattttcttacatataacatatatatattttaagaagttcttacaattattaatttatgatactaatgggaccatatatttatataagattttttaaaaaattattatcttattaatttatcaatttgtgtcattttttacactggtcccaactcgggaccagaagaatttattaatttatagaggttattaatttatcgaatattaatttgtagaggttatattgtattgttcattactgttaatgagatttctgcatctgttcgtatcattggtttttgtttatatccaaagtcatgattcacaatctctctctttttatgatacttttcatgattttaatttgtgaagaaaagagtataaaatcataatccaataacacaaaattttaaatcattaacaatcatgaaaactgttgtttaagttaaataacacaaaatttgtaatgactttattagagtatgaatccaataagttcagatttataaaaaatttagattatttttttacaaatcaaaatttaataacaccaaaagtcttataaaatcttaattaaataacaaaagatttttcataacattttgtcactaaaaatccatataaatcacaaaccaataatacccccttaatttcttaagtcgctttattaactagggaggacgagtagatcagagttttccggtggtatggcgagttccgtcatcaacagcaaaattccgttctcggaaaagaagtaattaggtgttcagatgcttttcaaaggataattaggggttaattactagattttgcttgtttaattattgttttgtgcctgtaattggtatatgttttggtactttcggtttgtgttttagtttcgaggaattttcgttttcgccggcgaaatatccggagatttacatgtgttctccgatcaatatcgttgtatttgtgtttctcttttttcgtttgaaggattgaataaaagttacttcctttgttccttttagtttgattgtttagaaatttttttttttttaaaaagattgactttttaagtttttcatgcaatatttattagttaatattggtgaattgtaattttaaaaaagaatagttaattatcattagtttaaagttataaaaaactgtaaaacaataaaaaataatatatttataatcaatatttaatatgttttttttttaaacagttaaaaaaaaaaaagagaggaaatatattgtaaaaagaatgaaataatatttttaaccgcgtagtgcgatcatcttctccggccctaataatggcttgcagagcaaaagaacttgtgtcgttaatcttgtataagatctgtaatcccaaaaggtatgtggctcaatactctttgatctattgtgtttgcaatctgaaaggccactgaaaatctctttggatttgagatttacttgtttcgtttcatcagtagatttgggtgtttaggtctgatcgttacgtttttgttttctttttgctgggcaatggttaatttcacggagggagtgttttgatctgtataggtctgattccaaaattgaggaacatgtggaagaagtagaggatttgaaagcagaggcagaactctttaggtttgttcttttttttctccttgtatttatatgtgttggattctcacataaatcagcggtgtctatggcttgtaattctcacatacatgttaacaaaaaaaattctcattgggtgatcttgatctcaggttgtgctaaacttataagatataagtatgatcagctgagtatgattgtaacgtttttggcttctttttattttattttatatttatctttaggtctggttccaaaattgagaagcatgttgaagaactagaggatttgaaagcagaggcagaactctttaggtttgttctttttttctctcacataaatcaaaacaatctagggtttctaactttcttttcaaatggatattaaaataattatgcttgtggtctcaggttgaaagcaatctcaggaacagaggaactgaaagcagtggcagatgtcaagaggtttgttctttttccaatattacttacttggcttcagatataatgaatggagcctagggctttgtaaagtcttgtttcccttgggatattcacaaaaaacaaaaatctacgattgtccttcttttatatcaggttgagaacaatcttagaaaacaatagtggaacctcagaggagtgtaagggtgagatgttgaaagaagatctttttcttccctcggatcttgtacgtctcatattgtctcgtctttctttcaaagacaacatacgctcttctactgtttgcaaggcatggggtgatattgctgcttctgttcgggttaaaagtcgtcgttgctggcttttgtaccatgatgcatttcaagacaagggcgtctcttacggattttttgacccagttgagaagaagaagacaaaggagatgaatctacccgagctatctaagtcttcaggtatcctttattccaaggatgggtggttactcatgaacgactctctttcactaattgccgacatgtactttttcaacccgtttacccgagagcgtatagacttgcctagaaacaggataatggaatcagtgcacacgaattttgctttctcttgtgctcctacgaagaaaagctgcttggtgtttggtataaataatatttcctcatctgtagcaatcaaaatcagcacttggcgtcctggtgcaactacatggctacatgaggacttccctaatctgtttccttcttacttcaggcgcttaggaaacatcttatactcagatggtctcttctatacagcttcggaaactgcgctaggggtattcgatccaactgcacgtacttggaacgtacttcctgtgcaacccatccctatggcgccccgctcaatcaggtggatgactgaatatgaaggacatatttttcttgtagatgcatcgtctctggagcccatggtgtataggcttaaccggttggagtccgtttgggagaagaaggaaacattggatggttcctcaatatttttgagcgatgggtcttgcgtgatgacctacggcctcacagggtcaatgagtaacattttgtatttctggagcagatttatcaacgagaggcgttccaccaagtctccttgtcctttcagtagaaatcacccctacaagtattccttatatagcaggagttcttgtgaagaccctgaagggtactactttgagtatctgacctggggtcagaaagttggtgtctggatcgagccgccccacagcatctctatctatgattattccattcttgatccctccgaagcagtaaatacagagtacgtatttatctgaattttcagcttgatttagtctcaagatttaatatgtattatctattgtaataaaccgcgtattacaatatttggtttacttataaactattttaaatttctatttattttatgaacaactgtaacccttactttatttgaaaaacccttgcaactatttagttgtacccttgcgcaccaaaaataaaatctctaaattgatttctaaacactagggaatattttggacattatttttttttgctagcaatactttatttgataagactagactactaggtaaaccactaaactccttcacagttcatagcatcgactggtgaaccatcaacatcttagcgccattgtataccaactctgcatcacctgtacggtcaaaccaaacacaacacgtaaaccggttcagcccccataaaaccaataattcattctcattcatattgacacaactaattcttaccagatataagatccaacttgaactcaggaggcacattatcatctgactcaaccgctgctttcgccgacgcaatgccaaccgctaaactctggattagatctaacccatcgcttagcgatgcaactgtcccgcctaccagacaatcacctgcaccagtcagcttcttgactttggctgggatggttgggaaatgcattgcgaaaagactcgggctgcgattcgatcccaattcagaaaaccggtttggtgaacatacagactgtactcttttgaagacctctccacttcttagaaactttctgtctatgttcagagcctttttcgggtttcccttggaacataggagagctccattggagccgagagttacgataactactttaacaccatttttaaggagaaccaaaatagctggctttagtgcacggaacatatcttcaatagaaagcttattttcgtctgatctaaagggatgaaacaaattcttggcgcagagagcgtttgccattgctatgagttcgtcttggtttggggacactattgttacctattaggagggaacaacaaaaaatatccgttagcttgtaaataaacctaatctagctttcatgagtatagagacatggcactcacatacttggcaattgaggcgatcctctgtgacttagtgactgacactggctcaaaccatacaggaacactggactctgcagccacttcaagaagaaaaatcattaagtagacaagacaaaaccacgattagacaatccaaaattagaaactgaaagcattacatttgcaagatgcttccaaagcaagagagctaagatttgcatctaccataagaagacgagcagagcttatgttgtattcaaaccgctggatccactcaggtgttaaaaaattttcctgctcgaggaaacaatgtaaatgtaaattctcccaactaagtacaacaacgacatccttcaaacccaatttatctttaggattgaaacataatcactgagaaaacttacaacggcatccacgccagcaacaccagcggcaacttctccattagtgtcatatacaagggacacaatgggagtactaatgtcttcacgtctcaagattcctgccattaccaaccaagaaaattgcataaaatttatgtctcatagataagtaaaaggacaaacttttgtcaactgaattctgcatcaattgctttactacatatttagaggcagattctaacctttcatagagagcttccactctttcaataaaacattggctgtgtacacataaaaaggaccaaactaagctcccaaggaaataaaaaaatgactgatcaatgtcatttcttaaaaacggaatcgatgacactattgatagacaaacctggaccatcaagccctaaagtaccaatcataaaaggtgtaattccaagcttgaagatgcaatcagctacatttcttgctacaccacccggcgcaaataagacctattaaagataatttacatgttgattacttaataaacatctatgtcctaattaataacacataattgccacactttgggtggggctaaaagatcgttaactactccagcttttaggaaaaatcaaagtgacgatccgtaactattgaatttttttccgtttcggattgttgacaagaaatcaatcaaaagtcagacaaaagagagggagatagaacccaagtttaaaacctggccagggacagtggttcctgagattggtgtggtcgaaggcttggcgtgaacatccaaaatcagcgcaccgattataaccggttccatagatgaaccctcagagactttcttcgattctcagttcaaatcctctctgtagtcagtaaactgatagatctgtttgttctgtcgttctatattgtctctgtactctatctctttttttttttttttttcttttaactccgtcactcatagtcattagttgacttacagacattttctacactgaatggtaagttttttcgaaattttaaattttattttcttaaaaaattgttattattgttctaaaaatcaatttgaatttaagtatgcactacagactcccgagtcaattgccattcaggagagattccaaagttgttgaatgatcaacaatattgcgatggacagcataagttccatgatccgaatactaactcgtttccttggttcagtttacgagccactgaataacgaatttatcattgtccaagttagatggatacctcgagaaggaatctcagagagatgaacaagctcacaaactgatgaatacctgttagggcagcttcagaattcctctatttcagaaaagccaaacgagagtatccgggaagcggaatgagtaaccagaaaagcggaatgagcaaccagaaagtgttcatccactgaatacaaatacctctacatgttaatagaatacatttttgttcatttctgatgcagaggaactgaaagaactaaattgggttctggtgtatgcgggatgatatacttgtaatgagtttatcatccggcattgaatcaaataaattgttttatacaacgcatggaattatcaagaaacacgtgaccatttccacccaagaataatcaaagatcatatataatagtagcttacatctcaagttatcgaaaatccccacaccacaacactcctacctctctcttttgttactttttttttttgtgcatagcaaaatcctacgacaaaaacataaaaataataatcctcaagttcctcttaagtaatcaattagtcagaatgtcccaaccgagaggagataacaattatcaaatcggaatactcgatggcttaaactttttttacctgcaaattatataactctggtttcggatatcattaagttccctcttcttcttcttacttctcgatgccttgttgcaaatactgaatcaagtcgtatccagcagtagtccacttgttatatgcgtccgtacatacatgaatcatgaagtgtgcagcttcacgttcgctcatttctgggtgaaatcttttcctaagattaccaattggatctcctctgctaaagcaaggcaacccactttctagcatcatttgcaccgtgctgatgattccatccatctgccgccgagcagctaagtaccccttgacgcacaagctcacaaactgatgccatgttttgcttttcataacacccgagggatctagcaactgagtcatttcgtggctcagtttgaaatgagcactctcgaatcgcatgttcccaccaggcgaagtttccaaaatgaaaccaaagtcgatgtggacaagtcttcccacgctgcattagcataacacatggtaataaagttgtgttacttccatgaaatttccaacactatatttttccatcgagaggttttgataaacttttttccaatgcaccaagtggaaagaatcaaagaacaaagggaatgtgcaaaaataggaaacatactcatcgaagaggagatttccattgtgtctgtctttgggctggagtaaaagactagccactgcataaccggcactactgatgaggaagttctcccgtgctgtttcaaaggtggttgagccgacgggtccatagtcttgttgaaaaatctcatacaaacccccgtcagtagtctcacccatttgacttctgcttcttgtattaggcaccacctgtaacaaaagggaagaaaagagatgtgaacaaaaagtctgatccttatttgatacaagaaagttctcataccaccgtatctgtttcatccagcaaggatattaaacattttagagtgagatttacctcaattatgcccctttccgcaccagttgggagtactccatatggaaaaagataaaggttaagaccagctgcttgaaatatgtctctaagaagagatatcacttgaagggcaagaacatcttgccggcaatcatctccaacctgaatgaatacaagagagaatcatctaactcacagtaaactcaccaactgggcgcagcatctgaatgtccagaaaccactagctacgttttttttccaacgttttccaaactttatttacttaaacaagtggtagagtctgacaggagaagtattttcttttttctgcactggcattttctataaggaaaaacatagaaattttgtatgaaaatcatgcggaggattaccttgaaaatgcaagcctgtggttttacatcactgtggtcaccatcacgatcaataacgttaaaagttatcatgatagggactttggcagctgattgtaagggtattccactgtctacacggatacccctaacaagcttgttaggagcagttggcaaataaaggtcatctccctgcatttcaattttctccaactccctgccatggagagtattattagactatgcagacacatccgtaacatgataaggttttatcaaatttaaaatgctacctcctaataccggctctgcgttcttcctttggaagagggaataacaccccagatatagaagtaaccttgtcaaagaagtcaaactctctagtgaacatgtccaaggcgttggggctgaaaccatcaatgatatgctgccgaacctgtggcaaaatttcttggaatgccgcattctgaaatattacagaaacaaagagatgagctcagattttttaagcagatcagtcaaaagatatacaacaaagtttctaccgctatctatagtttaacgacctactctctgtctcacgacatcttttgtccaaactatactttccaagaacaaaattatgctatgatacagaacaataagcagtcataaaacccattttcaagatctcggaattttgtgcttataaccagcggtcaacaggctgaatcaaggatattttctgcgttctatcacatgtgaagaataacataaacaaagaattcacagatgtattctgcaggaggccatattttgcaactgtaggatactgttttcctcaaactaaggcaatgaaagattttctagccacatataataacctaggagtagtaagatgtagactttacataggagctaacaccaataaattataagcagaaaatgataattatgggcaaaccttatcgatagaaccatccttcggagtttcctgcacatcctcaccctggcattataaaagatagaagtgaacatcaacaatctctataaaggtttcaaagcaaaattaagatcttgcaaatctagtaggttaaacttacttgcaaatgccaaatgagaatgtgggcaaatatgtcacttctttgggtagctctaagaagatacccttcaactagcctctgcatttaaaaagaggttgaactgttaaataccttacgaaacaggaaaaagagaaagaactcatgtaaggtattaaacaatatccagccccagtagcatttgaagataaagctatgacaagaaaaacctcaagcgattgaatggcccaactacaacaactacaacgagattagacatggttttaaaacaatgtgaagctgataatccaatactaatttcaagaaacgtaaaagtaatttagtttagataaaagaccaagaaaagaaaaggttgaatgggctggtcaatccaatttttagcaccattgttgaatgagttctgggaattgcttcaatacaccaaatggagaatttctattttgaagactaagaaaaaaggtatatatgatttaatttcaagaattaagatgtgccttcgctaattttatgagcacaaaccgaataatataattcaaattgcttagagagagagagtcatgttagagagaagtggcattaaatatatagattttcatgataagacttaccccatcatcatagcgcaaagactgcaccaactgcggcatgaaaaaagtaactcgttcaggagggtaggactctaaaactcgtaggacatatgccatgacacgtggatgtcccttataagcaggcgtgaggaactcaagagcctgtgtaattgaacaagcagcccagtgcggtagctgctgcaacagcactgagttctcttcaacatttttcggtgtaacaaaatacggcaatgcctcaggaattgtacgaagatctactatatttgtctgcaagaaagaatatcagtgagaacgctcattttacatcatttacatattaagagatatagtcatggtatcaaattatattttttataccaagaggtccagagaatgtactatcctagcaatctgattctcaacagaagttttagttcttacaataaatatttaaccaaaagtaccatgagccaaaagttcttcaacataattttttcccagttgcattatgcctcactgcttttgtgtggtattgcaacaccagctcttttaaaacttaataccagagatacagtatatccatctcaaactacaaaatgtcaaaaatctgtctttctacagtcttagaagaagtagtatctgtaaattcatacctgaaccagctgagtgacttcagatttcacagaagcatttgccggaaatcttgaggcaactgataaagcaatgcgaggatccactgaaaaggccgttttagcatattcggtccatttctcagagcttattttcagccgcgaatacggactgtccctgtacatacgttgccacttggaagaatgaatatcaaaatgtaagtcaaagaaaacgactgagaagtgaaaatgtgatacaaagatagcgacttttactttgaactaataggttgtgcccaaacgtcaagcctgtcagcttcatgctggcagagcattaaaagcaactgcttccttttttcttttcccagagtgtagttgtccatctcaccccagacgggatgatactgatcagtctgtaaacatccagcccaaagaaatatcattgtttgtagtcaaatttacaggtgaaagtagaaaaaaatcgcagatcgttgtcttaccacatcaatcaaattcccactttcacgaggttttcctttggaatcagattgacttgattctgatagctcgtttgataaaaagtgaacaaaaactgaaacagatagagcctcgctatgacaaaaatttggaatatttacatcataccactctggctgatgagcaaaccagcctaaagacgtcctgggataagttgatgtgcacaaaaaataaaacaaaggtaaatcagagataataaaattgaaatagctattatttaagtattttgaaaacaccgaaaatgccatgttggatggctaagatgacataaagcttaaattgttctccgcatatgaaatagctactatcatagcagatactagtccaggcagttcaatgtgttgtgcaaaggcaatttatgttaaatcctacatccgacaaaacactaagagatcacatgaacattaatatttagaacatagtaaataaatggacgaaaagaaaattagtcagacgcgtgccgccaaatcatagagacaggctgagagatgtccataaagaaagcgtaacaaaatgtatagtgcaagaaaaaacaaaggaaatccgcaaaaaaaatacctatagattcgatcttctaaaagctggagtccagatcgaaatttctgcatgttgccttgtgtttggcatgagcagaatttcagtccaaggagcatcaaagaaaaaaaggtaccagcagctgcagggtggcgagtaaagcaccattcaaggtctgtactccgttgtaacatccgacctagcagcaacagttgctccgcactattatgtcgaacaacctaaaaaagcatagtggcaataagaaactcactcaaatttatctgcttccttgatgatcagtaagcaaatttttcaagtgaagcaaaattaatttagactgcaatttgtcacctaaggtctttcaattgattcaactaggaggatcacaagaaaactcagcacttataacacttaagaccgtcttaaccaatgtggaagaagaatgaggtaaatcacacatgagttccctctgtattagaaaaagtagagaataaatcctaacctcaaaacgatctatcaaaaatccaagccacagtctgtgagcaactatctggtcaacagggtcactttcaggtggatcttctggttcccctggggaaagatggggtcttaattttgcagctgggccagagtatcgtacatcagatgcaaagagaccacgttttgtatcaattgtccatatccatgcatcaacaagctcggcaaggacaagagataccagttgaggagcagcagaaaccaaccaggtccatataaaaattccagtttccatagcgtctggagtagatatatatgctggacaccaacaaaggagacgcagtaattgagaaaagccttcgacatttgttttcgactcaccaccctgatgcaacaataagagagattagaatgtacagcagaaaatagctggtagatttcacagttgttggtaagaaaaagtgccccctctgttcttggtaagaaaaccttaccaggtttgacagaagtaatgcagttgcttgggaacaagtttctcggaattgcgacttctccacctctccacccttttcagcagtatttacaaattgctgaagaagacgcacaaacctggcaattaacatctcattaaatgaatcatcttctggttgtggtgcctgggaaaatgctccagatattaatctttgaaggccaccaccaaaaccactaggtgtcgagccagattgaaatccaccaatactgttgtacaaccttcgcatgccagcaatttctccagcatggttgcactttaccgttgcactgactacaccagtaccaagtacttccaagttaaaggcttcagaaacttttaagtttgcccctgacgctgcagctgctgcagccatcacagctgggatattagcagttcttatcccagaccaaagttcattttttccagttccaatttttatctcagatagaagagaaaccacatcagttgtagtttgtgctcgctgccatgtgtttgctttgcacagcttatcctgaggttcatattaaaaacaagagaaagaatgtgaaaataactcaaaaggaacagcaagaacaatctaacataaacagaaaacacggactgcactctgctatgaggatatagacaaagttaatctagaggaacaacttaagtgcctacgtccaaagcttttcatagttcgtttgtgaaccaaaaacagattgtacatctgaaggggccaaggaatcatacagaaacatgaaacaggaattacggtagttactagtcagagggcgagaaagactgaggtccagctgctttaagcattttaagaaaggaatcgatttgaagaaacagaagaaatctatcaaacataaagatattttgaatgagcatatagaagataatatgaattggcaaaaagaaggaaacctgaagcagaccctgactggtgcatggagcatatgaaagcgatattatgatccattctcgtacaactttctggtataaggatcgaacagcagcagtccaagcaggatcattgacaacagttgaaggtgtattgtcatgaactgaaaacagcaaactatccagacatgacgaatgccagaggacctgcattttctcattgttagttgatctacaaagcatggggagtccaaaagaacagttgaagaaggcaaaagcaaacaaacatttcctggaggtatactccagcacacatacagaaggcaaaaaccgatagtaaaaagaaggaaacaaaaaaatctaatcaatttacaatggagaggatttatgtagaaggaagtaaaccatgaccaaaatttctatggtaaagacaagtgaaacagaaatcacaaaacattacagtgcataaaaataaacagtctacaccactgatgtctaatgtaagtgaattgaccaatttgtaagagatcaaaagaaagaaaaacaatacgaacagctagattcaaaaggaaaaagatctgcaatgggtaacacatgaaatttttgcccacaagtgagaagaaaaacacttatggatcaaccaaggaacttttgttccatgtaaaacctgaggttcgggtcttattcctggtatatcttcggttacactcgcattggaaaaacaatcatgactaatcatatctctatctctccataatttatcaatgtgatatactcatatatgaactatatcacctcgtttctctcttacaaaatggtgaacctacatataatctttcgaacgagagaatgtagacccatatgtttttacctgaggaaatttgtctcgtagctgagtcaacaggttcacagagatatctcggacgtgctcatctctctgtgacatactctttatgaggaaacatgcatgtgcatacgttgtcagttctctattacgagcatctttcccagtaagagatattcgatcttcctgaaaccaaaagaaagtttctgtaacatatatatactgtgtaaatgaagaagcaggaaaaaggaaaaaaagaccaaattgcatatacaaagggacagaatgattgtgctagagttgccactaaaaggtctttgacaaaaacaatttagatactatgaccaggtaattccataccagccatgagactgctgtttcaaaggctctatgcacaattgccgtcaaacactgggaaacagcaggagtaagatttggagttttcagatattcgaacacacaactgaaggcacttctagaggcagaaacgcttgattcaccattaaggatacccccgttgctaataaaacgtatgatctccaaaaaagccacagcaagcaaataggtagccttcacccctaaaagaattgaagaaagtgattcctaagtatctaaaatatcacatcgaagtccatctagcagatattgtaaataactccccatctgttaacctgagatagtgttcattgctgcaacgtcaactctgccacctaaggcagttgaaagagcaagtctctgggttgaagctactttctcatttccatttcctcggcggctaccaggattgtgaagtgcgttgagttctaattcgtcttcaagccattttacagaactgacgacctacaaagagcaatgctcaattagataaaattaaactaccgaacaattatctcctgggagatgtgagattcagttttagtaggctaataatacggtgaaccacaaattaaactctgaagacgaccagattgacttacaaggggaggagtgccttgagcaattcgctgaacagctagagcccactgattgtcccacatgtaaggaccgcccacagcttgcaaagcagttgcactcatacttcccacactgttcactgaattggaggttgacttcagtggtggtgtcggagttttcacaataggaggtgctaagccaaagagggctatataaaaccagagattgcgaaacaacttcaaaagtgaaggttccacatccatagtaggatcaaaatctgaacatatttctgcaacagcaggaagaagagggcctaagaaatccacaccactcctagaagaaatgaagcatacaataatagtcagtatgaaggaaaaatgttttaggtggagaaatattaactgcataatttccgatcgtactaaacttttaggcaaaatggagtgcggaagataattgatatatctttatgttaacagcaatacttagcacttgctggaaacatactgtagccagcaaaagctgttgccagtagatttctcaaaatttgcgcagattgttttatacccaaatattttttcagcagagaacacttaaaagatatactaacccataaacagtgaaagaaactcaaagtgaatacaagctaagatcatataattaccctccacttttggactcagcagccaagcctacatctgaacacaaggaaagcaaacgatggcggtagtctgaacgcaattttgtatccataagaccactggcaattgtaagaaaacctgcaggaagagtctacacggtagttggattagtgagcatcagtgtcatagtaaaagttaaaagaaacacagcaaactaccatgtatcaaatgacatatagtaatacctctacacgctcggttgtggcttccggtgctgacgttttgctttctacagatcctacacttgatagtttgctcaaataacttctggtcatcagaactactgtctcacggtaagacttatcaaaccctaatgttgctatcctagaaacagcatcaagaagctgcacaaattggcataaatgcaaaagtaaatatgtaaaaaaaaaacgtaaaaaagatatagatggtagcagtttctgccattgccaacgttggagaaagtagcatatataagatactaattgatagtcagccaggtatcactgtagaaattgaaatcgtacttggagtcgcaaaaagctaggagtcgaagcatcaccctcttccaagctttcaataaaaagtggtaaaatcatgtcagctacttccggcttcttaacagcaacattgagatcagctagcagccgaatcacattaagctgtacagcaggtacttgcttctctctatcaacctggacaccaaatgatgagccttattggaaagatgaaattgcaattcaacacaagaaaggcaaattaaccagctaagggaagggtattattatttctccacctgttcttcataatcatttctttcacgaatacttgaagctaaccccataatgaagttgtccactggagctcggtccttggcccaggcagattcaataatcacacaactagtcttaaatatgctctcaagcatagccccttgatccggctgtaccaacagacattaaaaataaatagaaacttccttcagtaaagtaaaggtaaaatgtccagaagagttgtgacatgatgtgttcgattatacttctatggatcttcagacatgatcatcagtagtttagagtatgttgctcatatgagttaagacataacaaaattaccagtgcacagacagctagtaccagtggtttaagtcggatgagcaacacgcgaagaggctgccctcctcttgccactgcaatctttgcaatcccagaaagcagagagtcgaacagttcttcacaggccttcattttacgccacacagatgtcaagcaggcatctgcagcatctaaaagtaatgcaagcgtctccaggaccaaccttttagaagtttttccatctgtttcaagagacacgaggctcttgattttcattttagctgcagcctgataaacagacagtttggcattgactctagttttcagaacttggccctgttcgttccagtctcgctttcttgactgtaaaacaaaaggcagaaacagagtcatcatcttttctaagaaaacatgacaagacagtaaaagggagtatcaactaacaattgtttcagcaagatatatcgtctctagcattcctagttaagggcatattctagaaaagaccataatatatcaccacaagaaaagcattaccttcagaaatgcagacatggactgaagctgcctcttggctataaatctcacttgatcctgaagtttagagtcaattttgactttatccaaaatatgggttatcaatctaaaggcaatctcttgcttctccaagctctcaatggattcgtcttcaaaagaagcaacttgttgtctaaaaacagggttagcacctccactcccctcgctaaatccaaagctcagctgatcaacaccactcttccacacaatactacccccattcatcactacagacgatgaactcttagaggataaattggacccatggctagccacctcatcgccaggactagccatttcagtttttcccgagggataacggttcgtactaataggagagccctgagacgacgaagtatcagtttcagagttagccgagttctgctgccgctgttccttgggcgaagcaggagcacggttcagaacaaactgatcaagcagcattgttatcaatttatctccatcagactgcagaatcgacgggaaatgctgagaaagcgcgaccaagaaagccttagaaattgctggatccccgtcgctatcaccagaactcggtgcaatagcggctatcacaacttcccctgtaaacctagcaacctctgtaccaaattccggggatagatccgccgcacacgaaagataactcaagaaatcacaataaaacgaagagatcagctgcgaagggaaagaatgcggccagaaggaacggcggaacgatgcaggtatagcgctgagaaactcattaacgacggatttggcacgattatcgattgattctggattcttggagatgatccgagcaacggctaaaacagcgttgagatgactccgagaaaccctgggcgattcagcgagaagccattccgtttgtggacaacgaccgcatatccaagctaacttctccgagaattgcttcggattctttgctataatgtcacaaagctccgtcagtgcctccatctccgattaaacaaaaaaaacaacgttacgggaaaattagctggaaataagaaattttcgcgatcagatctgcctctgaagatcgagtcaaaatctcgtaggatccaacaagaacgggaaaatcataaatgtgagtgtagaaaattggtggtagaattcaaatttcttcaattcgtgtctctgggtgagaggaagaagaagaagcagccatggaagggcttgtgggtcgcctgagtcaccatttatttttttgtcccttccctttctttttttctctctcttttcttctccgctctcgggttgataattctgtccgttgtggaggatgtacgaaggggtaaattagtaaaatactcataggttcttagaccaaatcggtataaccggtctgacaaaatcgacgttatattcggtttattttatttttggttgaaacacgatcttatttatttgagtttatgaacgatgacacgatgtggtgttatcaattggtgaactttcaaaagatttgactcaagaattgtgaatttggtagttaaaaacatgcgtacatgttcataattttaggcgaagaaagggtcggtaatttgtgagctgacttatctttccattctcaattaaatatgaaatatattcaagtatacatgatttacagtttaatttatttagtcaataatttaatcatatttatgggatatatatagagagatgataaatattttgaagttggagaattatccacaattttgatttatatatttagaaattagaggttatacaaaaatcaattttgaatttgcgacatattagaatgaataaaaaaaacgtttagatttagaagtattgttaacattctaaatatcttccttaatttcaaatcgcgattatttaaaatcaaaatattcaaatcgactataattaaaaattagtttagacaaattaaaaaataataatgaaagttgacagttgagatacacattcaaaagaaaatcatatccagtaccaatatctatcaattattaatcgagaattccaaataaacacatgtaacagattatagacttcatgattcatatataaaaaccataatatactatattaatgagatattaaaacaaagtccagaggaaacatacaacgaagcagaaaacgacaaaagataatccatgcaatgcaatgcaattgcatatttctctcacaattattcatcacctaaaagcaacagtacaaaatattgtaaaagcaaagttcaaacgatattcaaccaaacgtagtctgaaattgaatcaaacccaggataggagaatcaacctaactcaccgctttccggcgacacaggtaaagaggtcagatttaggctgaagcatcttgcagagacccatatacgtcaagtaaagaacacgatccttagcaccagtacgatgattcttggaatgtttgcagaaattcttaagctgctccaatgtacaaaaacccaacgtttgtcccaaaagcaaaaacaaccaattaatctgacttttccgttcagcaatcaccggtttcacagctttttcacggccacaaagctcacatctccgttgctctggatacgcccaatccttatgagctctgtccctcattttcctcttctccgtcaaataaaacttcacaacctcagcgaatctctcccttagattgtagctaacctgatacactttctcgcagtgtcgacattgtacctctccggtgatggttgtgatctgattcgattcgagatactcaaggctttgtatctccccacggcgattagtcgcccatggaaacggcggagaaatcgtatcggatttcttacttacggttgatcgtgatctataaatacgaacggaaccggttactggtctcttcaccggcggaggagttagatttgacgaaggtggagctaaacctgacggcgggaagaaatgagtaaccagctgaggcggattcggtgtctgttgaaaatagttgctcatccataaaggtatctgatgagacggcggagggggatcaggcaccatagaccgcgtcgccagaaaatcagcaggtgttggccacgttgtcacaggtccagggaattccggtggtggagctataggaaccggtgacttcacaggacggatctgagaggaatacgatgttgagcccaaggttagcgaaagaggaagctgctcatcgtcatcgtcatcatcatgagtctgattcgtcatggttttttggggaagcgaaacgagtctgaatagcgaacgaggaagctgctcatcgtcatcgtcatcatcatgagactgattcgtcatggctttttgggggaaatgaaacgacggaaaggaataagacaaagtaaggaaaaagatggaggttagtgtttttcttttatgcgtggtggtcactgtgatggatcgtacactcttaacatttagagaagcgagaaaaacgacggaaaaatcggagagaaaatactgagaaaatgataagaaaatagaatcttttctgttatgcaaatacatacactcgcattttacggtgttaaaatcctttgaatttttaaattaattcaaaatttgtccaaaatactttagtttgtgccacgtggtgataaactattggacgattatttttttatattgaagggaaataaatattaaggtgaaaatggagattaagtagggattgtggggtttttatgtgaaaagcagaaatcttaacaaacaaaagattcggataaaacttaattatagacctattttcaaaatttgaaatacagttatcagacagctatttttcagatctttagttttgattatttctgaatattagattttcgtgcttttcttttcttttttgtaccgctgaaaaggaataatgtcttaatcgttgattgaatgagactatagttcaattaataaatctcttacaagatattattatttcattacttctttaacatatgattatggatgtttatttactactactatttttacgtgtatattacaagaaaaacaaaaaacacttttcataccgcagcggtattaaattagagcatcgcaccattcataattacaagtaaatttttttgtaattatgtagattttttgtttaacaaagaaagtattgtaaaaaaaagttatatagacagctgaaatagcccaacaaaagcccaatagtggccttaacataaaaatccatattggaattggaaccactgtattcttcagtatttagtttttttttttttttttttttgtatttggaagtagaaccaccagttcttttttagtattccgtatttaattattgtagcaaattatacagatagaaaatttattaaggcccattgataccctatgatatagtttttggaagctcaagtaattttgtagtcgtattatcttagagcatcgcaccattcataatttacaaaaaaaaaattcagctgaaatagcccaataattcaaaagcccaataaatccacatttttaacaactgtttaatgttttccgtatttaggcttagctattgtattttgtaaccaatgacaccaattatacaagcgaaagttgatagattcttatcttaccagatcttagtaaaatatcttgagatctccatagattcagttagggtttcatatgctgccgtggaaaacttgtaattaattatataggttttgattttatgtgtacatgtttcaaacaagttacgtgatattatataatgcgcaatcggataaaatttttaaaataatatgatatttgtttgtgtaacaatctaaagttactctcaaattcacatctgaaaaaatacctcttatttacgggtttgtcgtcgtatcagtttgctatctaatgcccttaaaatttgtagattcagattgttgagggacgtagaagttttgttagaatgaaaaagaatgtataacttctgctggttttattttggtttgtatttgatctatagtttattccttatatataaacatacacatatattactcttaacgtctataaagacatatatatacatcacaaagctaagtgagtaacttgatgaaatgttcaaatcgtggtgatgtgaatggttcgttgtcgaatgtcgggagacattactaaaccttactattattgggaagaaggataagtcgtaattgacttgatgttaaaattcgtcggaccaccttctattataagcatcagtaagtctaaatcatatatttccgcacgatcgagtcacttcgatccaaaattcgaaaacttccaaagccgacatatattttcatggaccataagttacatacattgtgatatataaatatgtagtgtatatatatattaggacgcatgagatattatattttacattaacattactagtattctcacgttgctactgcaagttgcacaaaagagaggcaataccaaagccaacattaaggctgtctttttcttttcttttctttttcctttcaaaccatagttattacaaacacatactcacattatatagagctacgtctattttcttactttgttacccacacaatgttatcaagagggaagaaatggcaaaccggtgctgacctcggctccatcttcaacaccttaaaagctacatgatccgcgtcccacgtggatgtgtccatgtggcagacagcgggtcctactacccgttgtctcccatcatccgtcaccaaattaacttcaaagactctacttccacctttatgtccatggcaatagtaaacagcataagggtaaggcattctgtgacatcccaacatcttaatcccaacaagttcctttggagcctcgacgaatgtgtagttatgcaaagcgtagcttatcgaattttgggccggtaccattactttagtcgtcatgaccttgaggtcaacattataccccattgttttcttcacaagatcgatcaatgactccaaagaagttccacaaaacttatgctctccttcaatagctttagcatcacaatgtcccaaagtctcctttatggctttcccttgaggagagtctttggtgatagagaagtggtcgagaaggaagtcaagctttgacttagtgaaaggaatgagatcggcttgttgtcttgtgagaagtggaggaagcttttgaagatcgtttttgtagaagtaaatcagcaatttggttcctagtttgagatcattgagtgtgaaatacatgtacaacgaagggtcatcaaattcaccatctttgagcaaatgactaatatcttgaccttctttttccttgattgatatcaactttctagacgtgtgtgcctccactacccactacattcaagaaacacaaaaccaataaattagataccaaaaacttcagaaagattcaaagttttcttttcccattaaaatagatttgtttatttgaaaaagttgccagaaggaaaagaagacttttttcttcctaagaatgtggtaagaaccatgatgcaaaaacttaggtacaatttggattcattacaaacaatttcatgaatatatgctgtagattcttatacaagtactagtttctttttttatccgattgaagagagaaaagaaggttcttaaaacattatgatgcataaacttatgtaaatttgtgtgccacaattacatatgtgattaatttccaggactcttatgtcttatattaaatacttttaatcatatacatatgtatacatacatatatagaggtacatatgtttaaagaataaggctttcaatttgagcctcacacatatagaggaacatatgcataaagaatcatatacatataagtgtaaaattgttaacaatatatatggggagagataaacataccagagagaagaggatgagagtgaggaagctaatagagagcctaaaagtagaagccatggattgtattttctctgcggagaaaatgagtttcttcttcttcttcctcttcttgatattttgactttttatataaatatatagaaagaagagcaaaatattttttataagtgttcaagtgatcttagatctcaatgaagtctgaacatccatctatgtgtatatttataataatccattatgaagatgctgacttcttcattatttttaaatttcgaggatttattcatttatttagttttacacataagtagactgttgacagttttcactcaattttatttgtaattattaaaataattgctacgcctgcagcttcttaaatcgtcatctaaattgaaactgtaaaagatacggggataaaataatttgatattaatccaaagagattggtttgattggattctctaatacaaacaatatagttcatggatcatcctttacgtcgtaattgaaaaataaaaataaaataaagaaagaaatgaatcttgtttgtatattagttgtggtcgtaatcatttttttaaaaatagatagagaattctagactcatctgtaaatagtaaggtttaattggaaaataattcttatattatacgtgcaaaaaattgggtatcaacatttacttgtagtctctacgatctatcggggttcaacgctaaggcctatatatatggatatacgtaaacaaaaaacaatcagccataagaaacaatgagtgttttctaaaaaacttttcgatacttgcgtcaaatatataataggttcagatctcagtagatgaagtaaaaattataatttgtatatttaaaaagaaaaaaagaagctcaaaattattataagtatgtgttgatatattgtgagtgtgaattattaaaaaaaaaatatgatggagaggttagaaacctgttaaatgaagttgagactaatatttatttgtgatggatgatttatacagtataacttttatagattgatatttgataaattaatattcattttactgtaaataaaaaaaaaattctagtctgagttatgctattttaacatttaatacgattcgataaattaataagataatactttttttagaatattgttatataaatacatactttcatcgatattataaattaacaattgtgttaactttagtgaaatatgactatatattattgttggtttttcttaaatttgtcgtagttattgttagagttcatttctaatatttttatttcatcaaaacaatattatgtttttagacagaattattcttttttacttttaataagtcttaaaaatatattgattataacgattttggttagaaaagttttaaaaattaaaaaatttatcaaatcgctgtataaattaatatttttataaattaaaaaaaaaatcacggcttccatattataaatttgtagatattttgtgtagctcaaatttgtctcttatatatatgtatatgtcatatatatatgcgtgtgtacttaatttgtattaatgattctgattctatttttttatatataggaaagttggtcatttttacgaagtcttgtggtataacttttcaataaatcttttgttgacaatgtgaatgatggacctttggtgaattgaaaaggattaaaacaataaaaagtatattttaaaatttaattaggaccacaaataataataagaaaaaataactgaataaaaagctcattgatctttcattgaacttagtcgcagtatcattgacttattttttttattttttttacatagtcactctaatcctaaggcgacaaccaacccactatataaaatctttgactttaatacatcatccattatgttttatcatccgaattgcaaaaaaataagaagaagaaaatcagaatgaatattcatgttcgtggaatctgtttttagcatatggatgtgcggttttattttacaaaagaaaaagaataacgaatttaagagaattttaatgtgccgaaaatcacagcaaactaataagggttttaatccattgtcaagatttgtttgaaatctgcttttcttatgtctaacattcatatacttttaagaaaataaattgtgtgacattaataggaaattgcagagtgcaaacaaaaatatgagtaaattggttgggagaagatgaatcagaaaaaattagttttacggtaaatcaatacaaagtccaaaacaatgtaaatattttgcctaaattaatctcacacgatttttcagttttgaatcaattccgacataatacatgagacaaacatatcaaataagagttttttaacccatctctatttttatttttttactctatttttacctatattttactccaacacatctttatttttttctctatagataaaaaaaacaaaatagagatttctattttttttaatattttttctaacaaataaatatctatctgagaaaccatcagagtaaaaatagaaatctctatttttcatttatatttttttttaaaaatagagacaattattggagattatataaatacatgtgagctcgtatttcttgaagcattaaatatctagcaactcattccttctctcgcccaaaaactcaactgacgaaggtatcacaaccgcaaaacaaaagcaaatgccggttttcttattattatttcgaactttagacctttttgtaacgtttctttaatttttttccttgataaagaaccctattatatcttagctaaatatttacctcattttgtttatgagctaaaccaccccaaaaatattgtagttttgctttcggatttaactgccaagcaagtgattagatatattaaaggaaaatgaatgaaaggacaaaaaaatataaacgacaatatttgaatactgatatttatctccattctcaaatatttttgatttattgtgacaatatttggttgtttcccatttgctacatctttgaggacatgaaatgataacatatatatgaacgagtataatacattctcgtttcattttacaaataatgtcaatttatgctaacattttttatttaaaaattatccttataagatttcagtgtattattttaccatggtactgtaaagtcggatgctatatatatatatatatatatatatatcaaaaatgacactgaagaatttatttgaactaaaactaaaaacgtaaaataaaaagaatttttcaaaaatcaaaaattttatataaaaatatagataaaatgttaatatagtacaacttctattcaaacagagagaataaatcttctatagacagtgaatatccattataataacgagcaatagttgtaatgttgcagtacaaaaagagaattgtaatatttgtgcatgattgagaaatctaagttgactttgaattaaaaggctaattccaacaagtacatgtagaagttgactatagctatatatttactacaaattgatcatttcaagaaagacatttaaattaagatatgcatgcatgacttgattgaaccccactcgcttgcttcgtgccattcgacaagatgttacttttaaatgcaaggtaaattatggatatactcttctgtattttttgtagtagatatttttacgaaaattgttttttttccaaaatcaaatgatatttattaattttcaatatagaattaattaaattttaattaattttgaagatttatatgctgcagattagattaccattggtgaaatcatgtttaggtaaataataaatgatgttgtagtttaggaaaaaaaaaaattctttaatctttatgtaagaatgttaaacttcaattataaaaatatgaagcagtattatataagatgtttaactaatcgaataatattttttgggatgaaattttcttgcatatgtttctaaaaaaataatatgtgaaaaattaacattcattgtatgtttataagaaatatatgtgagttttgtttagataaataatacttaaaattaagaatttgtaaagttatactgcacttcaaatatgttattttttccttttatttaaaatatcagcaacattctaaatgattttattttctttaaaaaattgaaaaaatgaaattagcaaatatgtaaaatttaaaacgaatttaagaaaaaactttgtaaagatatgatatgctttataaaaaaaacttggtggcgtacctactaaatatgatcacattagagatttgtatcctttagcatatagtatgtagtatagatatctatatttttatttattaaagagcatattcataatataggtattatatgttaattacaataaacgttcaattcgttatgttagtttttagaaaacttattgcgtgtgcatatcaatgtgagaaagcgactccacatgtgagatgttggtctgagaaagctttctgcacttggtcggaactacttcatggactagaatgcaatccatctattcaaagaaaagcagttgtccatgcatgcctcggtttttcacatttggaagcagcgcaacaatgtcttacataatatgcgatcgatcactctgcaaccaatattcaagtacatagaccatgacatcaaaaacattatcacaccgagaagaaagaaacgtcaatttggtaacttaatggcgttatgcctgcggtgaattctcctaagagttctcccaaattttattgattccttgtttttaactttttcgccaaagaatcatacatatagatttgacaccatttcaacttatcaaatacaagtgaataaataatttcaagcttgaaaggaatttaatcatgatctaaacctaaacgacaaattcttcacaagtgagaatcactaattgactaccccttggtcgcatatacatcattgttgtaaatctgaaaattggtttggatttgatctgatatgtcattcatataaaacttgtattatttattttagaattttgccgcaaacagataaatcatcatctatttagaaaattttcatttgcaccacaattaatcaggggaaaaggtgaaatcacatatcttatctacactctttattaattaaacgccataatataacaaattttcaaataccacttatgagaagcactaagatcacctttttctttatgactttctttctaaagctaagctggtagtcatgactcatgattatccttttcctaatgggaatattgtggaagcggtttcaaatctttagacaaaattccatggccactaaaagttagcaaagttaaaataagtttaaaaaaatatgagtgtacttggccatatgccatattgttgagatcataacaagagaaataatagtttattgaagtttagatcataatcacaatacatcattgccttcatcaacattttccatggatttgagaggatcaacttcaatactaatggtggggtcttattcatccattgctctctagccaattaagcagttaggttatttgtgtactctagtagttgccaaatcaatcttaatattcacaatgttgtaatttctaattacgtatagataaatgactagataacacgtggctttggttttatcaggaaagttttccaaatcatatatatgaatgtagaatagtgttcttcattaattattaattagcatctcaccatctgagactgggagcatgtgacaagttgacatgtgtattaagagaactttgagaaaaccacttttatgatactcccatctgagactgggatgagtaccattttataaaaatatgagtagtgaaaaaatattcaaaaaaaattctaacatgtcctttaaaacattttaaccttataattttaacaaacatcttccaatatgcgttatgaaaactttataaaacttttttataacatgcttttgaaaattttataaatctgtatttttagaaacaaagtgatacttttgaaaatagacaaatgaagtgctattttttaaaattgatatcataagtcttaactgtggtttgtttgaattttatttatatacttgtcaaaataaaactaaataaataaattaaattattttataatcatgaagataatattatcataaaagataaatataaaatcaacaaatttatatttgttaataaaaatactttgagctcttcttcataagacttttccagcttccatctagaaaatcacataaattaaaagataaataaccgaataaacatagttcacattctaactcttagtcttagatttgttttaattttcaaaggtttaggtattgtatatgttttttttattgggttgctagattttgatccaagaagaaatgacgggttgtagtatagatggtttgtttgagttttttcccctttgtttacttcgtttggtttttgtccccagaattgttcttgtactcgctggtttatgtctctacaaagtccacgaccattgccggctctttgtatttcaacttgaattctaaattcgattgatgaaaaaaaaatgtatctcttaaagtccattagtaccaaaaataactatatcattactacataaaatagtcttgggttttccaaagtatttcgttgatatatgttaagagttcgaaatagacacatagatataatgttgaaatgggacctctcacataattatctccttttctcttcatttctctacctctcaagtttccaatcccaccctaaggtaatttatttcttaacctaagtaaatttgttaacaaatcttaactagctacaaatgtgtattacaagtcttaaataaaaacctactttaattcaaaggtattaaaccttcctaaattgatacttacttagtatcgatcggtctagtttagggtttggacaacacaccatcatggggacgaaattagtcattctacggtgtccaagacacaaatctcggactcgatgtggatatgacacttcattataacttttaacttcataaaaactaactattaggaggaagaatcggaatctgcatatcaatcacaatagactatagtatacttagattttgatctaatcaatgggctccttcaactaataagtagcccactaccaataatgaaatcataagacattattaaattaatcaatgttctaaaaatactttggttatgtgtcccgtagagctaatgtgcacacacaatgaaagttgacccgtttcacttgtcccacttttatgatcttttcttttaggttaaatccaacttttataatctcatcttgttatcaaacaaaacttttggcctgtctttttcataatttaaagtaactctcacggagaaaagccaacattttcttcttgttttattctttttaagaaaaatgaattcaaggggaccccaaatttaaaaggaaaaccaaaactcctttctatgtatttattacttgaagttttctatgtaatcaacaatcctaacagtagagaataaaaaacatcgttttgggaggttttatattagcatatgagaatagttctaaaattgttttacacaaaaattagattttcttttcctctgtcaatggagctatatcacttgtcattttgcttaaccctttgcgggaagattgttatgaaacagttttaatggaattctagttgccaatgtcacgtttaatatgttttgtccctatactttattgaatcttataatctttgttatagaattatctacttttagtattttacattaacataatctatagaattcttctttgttctatacaattaaacaagtaatatattcttaatacatattaaaaatggtggtgttgctatctgagctgtaatagttgattgctccagagaagaatagacaaaaatccttacttaagaggcccaccactctgaaaatttagacaagaaaaattaaacaaaattaggttacacatattatcatttatatatatgcacaacacaaagttgaccttgcaatgtactattgaataaaataaataaatgcaagaagagagggaattatcactgttaccaagaaaacaacttcctctaaacaggtctctatatatataaactttaacacctaaagaattaacacagatcaagaaaaaatcctcaaaacaaaagttaaagcagacatgaagcaacagcaacgttacttggtcgtcttcatcgtccttttaagctttcttctggtaaagcttcttccttaattatattaaaaccctaattaagatctcatatatctgaatgttgtatatatttgttggtatagtttgtgaatctgagtgaaggaagaacaggaggagttgcagaagaatattggaagaagatgatgaagaatgaaccgttgcctgaaccaatcaaagagcttctcaacaatccttttaggaccgcacaagagagattcatccagaatttcgacaccaaatctgttgtcatcatctaccacaatcctaatgaataatcaatgaagtctctcatatagatatctatgactttaatttgtgtttatgtatggatcgacttatacgtgcacgtatatgttattaattaagaaaagaaaaagctgcttgagttgttgtgttatacacgtatactaaatatgttctgtttagtgcagaaatgttaaccctagctataagggattttttgttcttttttttttgttaccattaatgtgagtgagtgagttttgtgtgatgaaaattagatttgcttcacattttgttttgatatatataaatcaatatactgtgcctttcgtgtcttgtttcttatattattttgtgacattaattaattatcttatcaaaaatttattttattaactgtgtcctatggaaaaagatgaacaatatgagttaacctcatctcaaggagattcttttttgttttgtttttcgaataacttctatttgaaaagttttatttttctacatctttatataaacgaaaagttaatagaaagtgaaacaaattattcaagagaatattaattatatatagttttcttttctcaaatgatttgttcattagctattaacatacaataaaactaactttttgaaaaaataataataccctaatatatatgcattatctccaaatatgatgaataatattattcattcataaaatatgccgttatccatatgctgttgtcgtcttcaaatctacattggatcaattataaataagtcatccttaaaggtagacaaagtatgagaagaaacaagaatgaaaaaagaaaccatttaagtcttttcataaatgtagtggacaacaaataacgttagtgtagagaaaaagagagatccataatatacggccacccacaaacaccgaccaacccaattcggctttttaattatttatttattagggttctaaatttttaaaatattaatgtaccacagaacaacagatttacaatatggtaaaaaacctcagagtgggataactgatgagagagcataggtcaaatgaacactttcagcattcacatcctgttgacctctgtggattgctggttccgacatcgatcgtgtctggtaggtacctaaaagatcgaacatcaacaagtttcagacataatctcgagtcgagacccatcaacccgaaaagaaaaataccattaacaaagcctatgattgcgattgtatgtttttaacttacatttcttcctcttctccactcttcattgcgttcgtagttatgcacaggaacgcgtcttctacattggtgcctactttagctgaggtttcatagtatggaatgtttcctttcgaagcacaccaagctcgagccttcttctctgatacctgaaaaaccataaagtgattggaaacaatgcagagaggcttcaaatttcaaggttgttcttcattacacggagattatatacataccacccggctgcttccaccatccacatcgatcttattaccgataacaacaaagggaaagttctctggatccgaaggacttgcctgcaaatcacaattaccgcaatttcaagccaagttctttctctttaatctactaggaagagagagtaagatctatatatatttatacctggatcagaaactcttccctccagttgttgagatcctcgaatgattttgcggagttgacatcatatacaagaacacagcaatcagcaccacgataaaacgcaacaccaagactctgaaacctttcttgaccagctgtgtcccagatctgtaaaaaaaaagcaagaccttagctcttatggtcaagcaaagagagcaatatatatagtacttgggatcaattcttaatctaagacactcttatggtcacccctttttgtatgtttcctaagtctgataatgcccaagcagaatcacattagaaaccagtatgaagcgtttcaatattggaatgacgcacaacaaattccagagaacaaaagtgtcaattggtataagataagactacatagggcttaatttccttcaaaggtaagcagagatagcctgaagctcataaactatcaactttttttattccaagttttcctctgccactaaggagtctaacttataccaactgcgctaaaataaaataaaagaggtttactgataaagcgctgccacaacaaacctgtaaagtgaaaagccggtcttcaaattgaacttccttagtcaagaaatcagccccaatagttgccttatactggttgctgaacttcttattaacatatctaaaggcgtgttgttaaagtgaaacagaaacacaaactcatctaactcgacaaaaggaaagattgttactcataaaacagagaccaaagaatttattcacatatatttttttttaaaaacattgtagtagcatcctcttgactccatgcacagaaaatttaggatactgattcattaaagaagtcttcccaaccctgcaaaatcacaaattcaaaattcttaacttcgataaacacaacaataagacttttagagtcatagttcaacagcttcactaggtatcacaacatacaatatctgattcacaacatattcactctcactcaccaagaaaaaaacaggttaacaacaaattcttacttgattgcgaacactagaccgaatgatttcttataaaagattgcaaattccaacagaaggataatacaaatgttgaatatgatacaagattcactattcaatctttccagtagacaacaagaacaccaaatctgaatcatactgagagaaaaatcagacatgaccttaagatagcagcatcattacttgagactaattctactaatctttcatgtgattacaaaccttcccacgagaactaatccaatctctaatcatcacttcacaattcaattccaagtaactacagaacaattaaatccagaagacacagaaatcaacaacctaagagatcacaccaattcagatcgaatccaatcaaaaggtaatacacaaaattcgacttcaatcttcaaaaattcgaaaccagaaaaagtatttacttactgatcgaaaaaacactaaatcaacatgtaaagagagaaagagttccttacccgctatcaccgaggatgatgactttgaggagagttcttctacgagaaggcatcgaatcacgaacgatgatgggagagatctgtacaaagacaagagaaagctctctgcgattttctgggtttatggagaagacgctgtttccgattattttctttcttctctgcccccttgattatactgttgctgacctgtcatttttttttataatattattttcaaagatatttagtggtgatgatttatggattttaacaaaatgtatgtatatcagtatatccaactaattaaccttatacagaacatttctatttattttcatactaaaactttgacctttattttaggtaaagaatcttatggtttatccagaattttatcttcagatttaataaaaaatttgtgattacttttaaataaataatattattttgtttgatattattttatttatcaaaacagtacggagccgtacacattttatttacgatacgtatttgctaattcgttcaatgacatattattttatcaaatatcggtttttaccattttataattatagttaactaactactaaatttcttcttttaatttatattaacgcaatgtaaataacttaaaagataggaaatgtacggaaatatacgaaaaagtataaaaaatttaattcttaaattataaaaataaataaaaatacagttaactattagcaaaaaataagtatttttgactacaaaacctttatgaaatataatttattttggagaaatcaaatgatgtacaattaatatatttaattaaatcgagattatactgtagtcaaatattttattttccttaatgacaagattaaaatatccttatcaaatgtttgaccctgtatattttatcttaatttaaaaaaaaacagtaaagcgtcagaaaatagtaatacttaataatttaggctcccttcataaagaaacaaaaatgttagggaagggtgatagatgacgataatgatcgaagggttatgggtgaagaatgatgatgatccaagggtcacaatgtctcacaccaaaacgataccaagcctctttaaggttatgactgttgtatgtaattaattagatacatgaacgaggacaaaaactctttaggaatgaaatacaaattattaaggaaaaatatgattacaccttttcaacatttcaatggattctctttataaaccctctctaatcacatagataacatcacccatcaccaccacatatcgataaaaaatcagtcatggcttctcctttgtatccgtctgtcttaaacaatcctttatcttcaattgtggtgacacgagacgagttcaatgcttttcacacaatcgacagaaccttgttcagtcgtcttgtcttcaatctaaaccgagacgttgaccagtcgtttctagccatgtgttttctcttgttcctcgagcaatccagttatgcccgcgacataatcgcgtaccttgtctcgttaccaaacgcttttgtcgacgcggtggctaacgaaatcggtgtgtgtataaatttgttatacaacgtagagtttgcatcaacgttcttcgctgctgacaacgatgataactccatgataccattgctcttacgtattactggaggaaagtttactctcagattgatcaaccaacaacgcaaaaacttttgcgctggagtgacaaagagttggaccgatgtttgcactcgagcattctcagatttatgcgagacagctcataggatcaacagggagaaacaattggctttagagagagagaaattcatagaggatatgaagaaactcaggttgagtctccaacaagaaaaatctaataggttaagtgtacaacaagtaaaaattgcttctcctcctcctcctcgtcctcatcctccagttgaagacgaaacagaaaaggcccttagagagaaagagacaatggaggtaaaagagaaggaaggtgtgctggcggcagatgatcggacggttttcctgacgttttcaaaagggtatccgatctcggaagcggaagtaagggtttacttcactaggagattcggggaagtgatagaagcggtagagatgcaagaagttgaagcaaacgagcagccattgtttgcgaagatggtgatgaaactgcagtgtgcgtcgatgatggatgagattgtgagtgcgaggtttagaaacaagttcaccatcgatggcaaacatgtttgggctcgtaagtacgttcgcaagaatccttatccagcttcatcctctactcatttttgagtgtttctgaacttcttatttacatgttgtgcttgttgatgttgtcgttgttgttgtttatctaataaaattgtgtcgtcaatcttattattgtgctacacattaatatatgtttaaattggcgagtacaattacttttttactagttggtgttatttttatatattttgaatcatacaatgtttgagaaatataacgccggaaaacttccaagaacaaatgtatatctatgtataattaaattcataagataaaataaaaaaataatatatgattggctaattatcagtttctatatatttaattattattaattaattgatagttttttttatttgtttggtcttttgttataggatatttgatttagtatagtctgtcaaataatcaagaagatgttgtgccaacatcctccattagcatcatcgctccgaaatgttttatctaaggtcatgttacttagaatttgtgttgaatgatttaattacaaaatctacatcgtaattatatttgagttttaaaaatgtatatttttatgttgtatactttttaaaatcgacgtagcaatttaattattagtcaaaataaaaatgaaaatatgattagttcatagataactgtatcgttgtcgtttttagaatttttgttattacgtgggatatactccatccgttttaaatgaagtgttgttttagaataaatgcagttttaaaccgattaatatactacaagaacaaggtttttcttttccttcttcgatgaaaccatattggtgttaccctttcttctttggatttggattcaaaatggttttagaaatagaaataaactatcattgactcatccatctagatggaaggtcgggataccttaaataataaaacacgtagaacacgtagtaataataatgattagaaactaaaagttaatcgtaatgatcaatagtatcttgccaaggttagaacacttagatgaaagtaagcttgacacatatggtatctgtggttatgaaaaacattatgaaaaagttgtgcacatgttgaatgaagcagttgcttatcttctttcacctatatttatttaataaaatgatgataggattaagttttagggtaaaccaaacaaggatttagaaagagtaggaagattttgttttataccctaaggatgctagtagctcatgccacgatataccacttatggcgtgacaatcagcaaagactcatgtaccgatcattttcaagataattgaccgacatgtgttcgtaatgccaaaccgaagaaagtttagaaaactcatgggtttgtggcttccatgggagtgaactccagatcaacccatctcaaacttgttttgtactctatctttttggcaaggacacagttaatctttttgtataaccgctacatttcattatttatgatatttacatttttatcaaaaatgattcacgaagattaggaatatgttttcttatcgcacttaccattaagagggacatcgaaaacattgcatagaagaaaacaacacaaatgatggtttgattaagtaacaatggcgtgaacctctatagcaggatttaggctaaatctttgctgcgagtacatcatgtgacccaaatttttaaaaacgtatcaatttatcaagagtatgaacttataaggggtaagtaaatgagagataacatgtttatcagatgaaatcaaccaaagttttttttttttttgttgcttccacatgcgcatatgtgaatacgtaaactgccgacaaaaaaaaaaaacattctttctttattgcgttttctaagcgagaatgtcgatgtgatcagttaatgcgaacgggtaaaattagatcagtatttataaaaacaaaaaggcagtggaaaatctagggtttctaatattaatagccttgtaatcagcattaacttagagatatttaaatctcaagtttcattgtcaacagaacttattagttattattactgttgagtgatgactgatgaccaacaacgagtacttgatctttattgaagaacacgcaaagaacaaatagctctcgtagctcagttggttagagcacccgtttagtaagcgggaggtcttgagttcaactctcaacgaaagcaattttttaaacaaatttacattttacaaacagaaaatctagcctgtaacggaatattgtcgttgtgaatattttctttttgcctggctgtataatccccaaatatagaaataacaaaagaaatattcgaaaactttcttaaaaatagattttgagaaaagaaaaaaaatggttccttgttcctaggagaacaggaacagagttgggtgttccttgtttcatctcacattgaaaccaccggagagagagataatggcggaggggcaatccccggagaactcaccgccagctcctcctcctccttctcctccgtcacctccctcttccaacgatcaacaaacaacatctcctcctccttccgacaatcaagaaacaacatctcctcctcctccatcttcacctgacatagctcctccacctcaacaacaacaagaatcaccacctcctcctttgccggaaaattcctccgatggttcttcctcgtcgtctccaccaccaccgtctgactcatcctcacaatcacaatctccacctcctccttcaacgtccccgccacagcagagtgacaacaatggcaacaaaggaaacaacaatgagaacaacaaaggtaatgatggaagcagcggcgatggaggaaacaagaacatgtctcatactcctccaccaccttctaagacttcggaccatagctctcactcgcaaccaagatcgctggcgccgcctacaagcaacagtggctcaaattcgtcaagtaatgatggtttgaacattggtgctgttataggacttgtggctgcagctggaattttattcattgtcatgatcttgttatgtgtctgttgttttcggaagaagaagaagaaatcaaagcttgatcagatgccgtactacggaagcaatgcttaccccgcaggaaaaagtatgtacatataaaaaccatgcaccctaaatttgtttcttgttgcccaagaaatagacaaatcactatctcatctaactatctacaaaaccttgaaccctaactaaaccccggcccgtaccatttcgtaagctttagtttcacctaattcttttaccctagtttcttcttagctatgaaaagtgtaaattttgtcacttgtttccgattcttatttttttttccatcacatctcatctaagcctttgtcatacttttgtttttgtttgttttttagctgggggtgatcaatactacaaccaaaatgctgctacacaacaacaacaacattacaaccaaaatgatcacattgtgaatctgcctccacctcctggatcaatgggaacaaactgggtgagttcaccgccaccaccacctccaggaaattggcagccaatgccgtcgccaccagcaccagtgtcaggaggcgcaaatgtgatccaaagcggcgaaatgagctcaaatttctcatcaggtccatacgctccatctctaccaccacctcacccttcagtggctctgggattcaacaatagcacattcacttatgaggagctagcatccgcaactcaaggtttctcaaaagaccggttgttgggacaaggcggtttcggatatgttcacaaaggaatcttgccaaatggtaaggagatagcggtgaagagccttaaagcgggtagcgggcaaggcgagagagagttccaggcagaggtggagatcatcagccgcgttcatcatcgacatctcgtgtctcttgtgggatactgcagtaatgcgggaggacagaggttgttggtctatgagtttctccctaatgacacacttgagttccaccttcatggtaattaatgatgagttttcttgtgttcttggtaaggattatgacctataaaaaaactaacacaaaattttcataaaaaaatcaattgaattatagggaaaagtgggactgtgatggattggccaaccagactcaagattgccttaggatcagcaaaaggtcttgcttatctacatgaagattgtgagtgatttatctcatttcatcttttcactttaactctaaataaatccaaagatatttacatgtttgtacctgaaaattgtggttaggtcatccaaaaatcatccatagagacattaaagcttcaaacattctccttgaccataacttcgaagccaaggtatatactttagtgacctaaaaattctgtttcttctactctttacttgtaattacaattttctctcttgacaatattttgtttttcaattaatctccaggttgcagattttggtttggccaagctctcccaagacaacaatacacatgtatcgactcgtgttatgggaacattcggatacttagctcctgaatatgcatcgagtgggaaactaactgagaaatcagatgttttctcttttggagttatgcttcttgagctcataaccggacgcggaccggttgatctaagtggtgacatggaagacagtttagtcgattgggtgagttatatgtaatacattcatttatataaactcataccaaaaacaaaagaaaacagtttcatgttttaggtacatggttattggcaggcgagaccattgtgcatgagggtagcgcaagatggagaatatggggaattggttgacccattccttgagcaccaatacgagccttatgagatggcacgcatggtggcttgtgctgctgcagccgtaagacattctggtcgtcgccgcccaaagatgagtcaggtaataataaccgtcacacataatttactactactactacgaaaagtgtaggtgttagttattcattgatcgtctagttcacaagattttggatatttcttacggaacccatattgatcttttcttttcgcattgttcctagattgttaggacgttggagggtgatgcctcgctggatgacttagacgatggtgtgaaaccgaaacagagttcaagcggaggtgaaggcagctcagactatgagatgggcacatatggtgctgagatgaggaagtttcggaaagtgacattggaaagtcgggattacggggcaagtagcgaatacggtgccacaagcgagtacgggcttgacccatcctcttcaagcagcgaggagatgcacattggaggaagcaccagcaaaactactactactaaccgtgggatttaaattacataaaccaacttattaaaacccgttagattatattattcttgaaaatgtgaatgttgatgtaattgttcgttaaacaaattaaagagaaaaatattatttatgtattctatgctaaattgtgtctcaacagtctacgctaaagatgattaaatgttaattaaaactgttgtatgttacaaaattatccatgatgagaagtacagtctgaatatcccatttaatatgaaaaatacattataagtcatggatgaaaagtgcattcgatgaaaaagtttctcaacagtttcttctgtcatacatgaaaaattaatagtatgcaaggcattgtaaagttaaaaacttttctagtccagcactttcgtaatatgtttatcaattaaagattgatccgcggtacaccacgggttgatatttcattcgaaagttaacgatttcattttaattaatattatattacatatataataatgggtccgagagtatttattctaaaaggaaaaatatcaaagacatgaagcagaatcttacttggattctcgcttggctactttcagaatattgtttttgcggcagtctccgcctcggattcatcccggatctttacgcctatgccaatgtgtttttggtccatgataatcttcttcatgtcccaagccgatgtcctctttgggtcaaacagatgacgtattttgctccaaggatgacccgaaagtgcttcgatgacgtaccaactgaaaagagactcctcgatccgctcttgataggtcgtcaagtggaaccacgctgaacaacacgttgtgatgattgccttcgtgaaccacaaggtggagattatcagaaccgccgtgatgacctggagcaacacgagaagcaccaccttttgctcctttgtcgccttattcgagaggataataaaccaaggtgtgatgataaacaccatagtcatccacacccatgccgcgtgttgaaggccatggagaacataaaccgtcagctgcatggatctgaagatccaccttatcaccactccgatgatcctcaccaagtagcaagcgatgagcctcgaagctacggttatcccgcatgtcagtgccaattcccatatgggaaagctccacaaggtcttacgccgaaaacttgagatgcttgccgcacaagccgtcactacaacggcgccaacaatgaagatcacttccaaagcgatcacaagaatccaccacacggctctcggctttcgaaatccgatttcctcctttggtggataccgaggcctgttcctagaggtaaggaacacagtttttgccacctccgcttgttcaacaacttcagtttcagaattctataagaaaccaatgtagattattaagttattttgatatgaaattaatttattagcttaatgtagtaacttatgccaaacacaaaattatggccttatatatttgtgtttctatttgtttagaatgtcaactttgaatccgcaaatttattctttctgagtttaaaaaatatattacttatgttttgcttattttttgtttgatttttgcttatattttatcaatctgttttttcttaattatttaaattctcgtagtaattattaaatattgaaagatgtgtagtcactaaaaacgaaattgcatcagaaaagtttagattggtgatttagaacaaattgaataaattagttactcttatcttaaattcaatttgaattttgaaagtttaactagattataatttaaaagacttcataaattctattacctaatattaaaaaatttcacgtttcaatactaaaaatgtgctatgaatgcgtggacttatgattatagttggtatatatagaaaagtatgtatagatagttcaaacccttttaaaaagtgaacatagcgaaggtttattttatttatatatataagcacgagcttggaaggaatagtagcgccaacacgattcccacgacgaggttgaccgttaccacgacgagccagatccgcaacattttggaatattgtttttgcggcatgcagtctccgcctcggattcatcccatgtttttcattgccatattaagaggtgtttctcttgctttaacgcatgtacctaatattatttgagcttatcttctcttgaacttatcttctttaatcataactcgattaggaagccttcctcttcaagcttatacgtaccaaacatttttaatcatagagaatacgttatcacctaaaacttgtgagaaatatataagtttggatcacttacaatccattcttggagaagtgggctacttatcctgattgtctcatcttccttcttttctccgaaaaaggtttagagcctttaacgcgtcatgtctctgcatgaaccgagaaatgtcacccaactcgataaacctaagagtccgaaggtacttatataccttgatcaatttctaaaaggacaaatacatcaaagacatgaagaggaatcttacttggattctcgtttggcgacattacggaattttccgtaacgtttgggtttagaacgataccttatatgtatttcgaaagatacattataactcaaaggagagctatacaagggtctacacaaaaactagtcattgggttctaaccaaggggaagaatgagaagaatagagacaaggaaatgctccaaattaaacaagcttaaactcattaatcagcgtactattttggaaatgaatacgtagtttattatatcaaagaccaatgtttcacaacatcaagcatttgattagccctttgagtggcagatgagataacgaaaaaaaaatcgcttgtaaatgatgatcctaggttgttttctattgtgctagattgagaattgagctagaaactttgtggaatcgggccactggaatagatctatgggtaaatgaaaagttaaaaaggaaaaaggaaacgttgagcccaagaaaagtaaaagcaatatgataaacacgcaaatatcattcgttcattacaatgggtgcatactggtaatgaaaaagaaattttgtctggaaagatgctccgacaacaaattacagtcgttgttcaatcgtcgtccactttgccttgattgcttggttgattgtgtttctgagcttgatacatttcagcaatctgaaaatatgcatcggaaatttataaattaaaaacaaaaatcagaaaccagcctagtcatgtctatgattgtggttagggtgagaagagctttcacctggtcagatgttgttgcttcctctggattcttgtctttccgtatacggactagacgaggaaatcgtagagaaattcccttttaaccataacaaacagaaaaatgaaaaagtccaatcgtaaatgcaatagctcaaatgaagaaaaatataaaaaaaatacgtatgctaatgttgaaccttgtcagggtccacaattccaatagcttcacgatatacagggctaactgtcaagtcagctgctttcacttcccacaccttcaagcaagcatattatttagctttgcatcaatacacttggacccataagatagaacgtggacgtacgttatctacaaatattactataaggcatacctcggtgggctccaaccagacatctggattgagatcgttatcgacttggtagtattgctggtttataatcagcaagaactctcaggcaacataacatatatggtactgcatcaaacaaataagctagagagaagaaataattatcttactttcggagtagcaatcactttagagcaaagactggaagacaaatcttgaagctccacatcagaaaattcagtacctactagcccaatttgtaaacaaaaatgtaggagaggaaattgagaaacataacaaaaagaatgaaatgccaaggtgcattagactgaccaattttacaaatgctctggaattcttccttatcaacatcgtagcacgctagtaaatatgcaccaaagaaacctataaggagagcatacatatagcttccgttaacaacatcacttgtgaaaaaaatgtatcatctacacatttcgaatggtgtttgtacctgtgcgtttcccacgtccatggaacgtagctattggtacaagatccacggaatctccaatgctgcagcatatataccctagagttagttagtaaaggactctactatcttaacttttaaattttttttgtttaaaagagtattattgcttgtccatatagtccttcttcagttttagccaattatttgatctctttgcaggctcataggttgcatttgagtacaatgactttatcattaaaccttcacatctgccaaaataacatacttgtgatgaagaattgaaacatcatagagattatgaggcagtgtcatatgaatatttaccctatgtcaatagaagctttaagaaactcttgtaattcaccaatatcgttggatgttagagcagttgcaaactggaaatacccaagatcttcctcaaatgaatcgtgtagcttctggcagaagcaaggtgcaaacaaatgattacatatttgcacaacactagttgcttcactgataaaccattttacgatttactaatatatggcttacctctcggcgaatgttcagattctcatggataagtagttggccatttaggtataatatatcaaaagcaaagacgcatacgccaaccttgatatcactgacattcacatttttatgggctcgtgtactctaagtctgagaaaagaaaacaaagaaaacaagacatataaaaacctaaactatcagtaactgtaacaagttatctttaaactaatgttggcaaaaaaaattgttgtcaaatcaccaaaatctggtctagtagagcttaagcttaatttgatcgttcattggctaacaagaagaaaaacaagaatgttcatatttgcaaccataaagcctggctattgaggtacctggagtggaagaattttctctttttctctgttgaaggtgacaacctcgcaatccagaataaaagatttcacagtgggcttctttaacctgtatagagaagatatttacactaacttcattagaaatatgggctcattctaattttttcaacaagtaacaacacaacaaacaagtgcaccttgataacacaagagcaacatcagggtacttgccagtgtttctttcagcatgtctactgaatatctcgactgtaccatcctccatataatatatctgcgagaatagattgatgaaaagccaaacgtagcagcacatataaataactttgctttacgaataatagcattcatcggataagagtagaaagcaatggatcacctgtgcacgttcaccatcatatttgtattcagctgtgaaaacagtgtccttgaatttctcaagtatgagatctactcttgtagttgcttttgcaagcatgggcctaactggaacaccgagtgtgaggttacaagttttaggaagattccatacaccactagttagaagagcaccaacaataatgtcatagacaggaagcattgagaatacttctttaacaatcgttgcagcctacaaggacagacaacaaggtaagttgtgacgtctctaaaggaatactgcaaatagagcctaaagccacaagtaacatccttgagaagcaaacctcatctaaaggattcttgatatttgggggcggcttagaatgctcttcgttatatacagcagcctgtcccaaggcagctaaaacagtttgacgtgagaaccctaaccgcaaattatcctgcattgtaacggaataaggaacacaaaggaatgagcagattttttttttttgtaacaattgatctaacatacctgaagtaaacgagttaagtaaagaggttcacaatctgtagttgccacaagaagtgccttcattagatccttcttcttatccttactaccttttccagattcctaacacataacatagtccaacaactaatcaaaaagaaagaaaatttaaagcaaacacaagaaagtgtctaagagaatcaccaaccccactcctctaaactctattatagagcaaatttctctccaacctacttttgtatctcactctaaaataaagtaaaagagaggattgctctatattcagagcaactatttttactacgctctattttagagtaaaaaaaatagagatagatggtctaaaataccttagcaattaggcgaagtgtatcagcaaccttgacaacagttaatggtttgggcatgaaaatcatagtctgagaggaacggctcccatttgctacaagccccaagtctcccagttgcgtatattgctgctcaacgtgggactcagttctaccaaaagcttcagagattgccttaataatgtaggaacccttacccattcccaatttaataccttcatgagcaggggcaatctcatttgcagcaagataaacagtaggtagcaaatcatcaggagtagtggcgataacggttctcaacatgttacacagaatatgagtgatgacaatcctgccactttcagctgcaatcagatcaaaagctaaggagagaaacataaacggaactctctcccgtttctcccaacaagacacttttccggatcgaaatcacttggcttcttcttcagcaacccaattttgctcttcagtttggtaaccctatctgatttgggttttttcgaatcagaaataagaactagggttttgtcatcaaccctagtcggtggcgtatctacggtttcctcgagttttctcttcttcttggcggaagcattcgacatgagaacgtcaaatgcagatatcactatgttataagcaagagcttctccagaagagtggagaagagaatcgattgacgaagagaagaagataagagcgagattatccaaccctagcgtatctagaaagttttctgttttagtatgatttttattccattacattcatggagccaacctgaaattataaaagaaaaaattagcttcatttatttaacctttgttttgtgctaagaatgttctaccactttgatttcaatggttaacacgtaagagttatgcatcaattcctctgtttaaatccgatgtagcagaatcataacctactagaaatccggattaattgctattagaatttagtgaggtattgtatttattttagcaaccatattgcggtcatgtaatttaaatttttgattggtattggatgtgcaggaaggcattgtccatatgattgttacaacacattttctgtgccgtggaagctaaacatcatcctcgtatttattcattttgcagccaaactcttaccatatgctgcatctctggtgagtagttacttcaggatatgttaattgccaaaattgaggatgaagctctactcaatcacttcaacctaactcaaatccatgggtgtaggtaatttcacaagatcttaatttgcttgaattttcatatctctcaggttggtgtgatgaaaatcaagatctctcgtctgctaacttacttctctgaccaggaatggcaatgcaactagcacatgaagttgtcactaatgcctctgtgaatctagacccaacatatgtagagggggtttgatgcggtacctagcaaaaatctgtcgcttactagtggagctcttcttcaggctttcagtaagaaaaagaagcattcaactaattcaggaattgacgcagagaattctgcttttgaagtggaagataaaatctctcgaggcactggaagctcttctcgtggaggatgatgactgagttccaagtcttgaggaagatgattatctctcttctgattctgattctgatattgaatcttaatgctagacaaaagagttgacaaatctgtcctaaagaaaatgttttctgtttctcaaggtaaaagaaaatgttccattgaataattccaaactaaggcactaaccctgactattcagtggccatatagtgttaccaagaacaagtagtctcaacactagaatcagctattcagataatcaaaatgtaaagtgatcaaagtaaattcaaggtgaattaaaattactatcagaattagctgattatcatatcaaaatcaagtaatttaaagcaattccaagatagttcaagatcatacacgaactaatgaaaatttatatagcatcaataatcagagatacatcataaaaaaaaggaacagccttgttggatcttcagcaactagaaatctccattgtttatttctgcgaacgaatcttgttgatttcagatttagcgtaatcaagttgtttctgcgcagagattttcgctttctcggctgatgtgaggaagaagaggttaccgtttttctggtagatacttcgagaagaagagagactgctcaattcatctaacgaaacctcttgcctctttatctctttctcaagctcgaattc

SEQ ID NO: 83 - DNA, 100975 bp, Arabidopsis thaliana
gaattctttcacagctctgtctctggcaattagactcattgtaccatctaatcttctgaattctatactattttcaattagagatagctccaccaagtcaagcataccagtccactgagaaaatataatcgtttttattggtcctccattagaaggagttgacttcagactcgttttctcgacaatggtgacatcatcatcatcatcatcatcatcatcattcggctgctgcgaggaagaagccatttgaccattctgtgttgagtttgaagtgccttggttagaaagcgactgcagaatatctaagacagctttgatctttgatgaactaaactcgccattctgaaaaactgatttatcatgactattatcctctgaggaactacaacccaaatcatcagcaacgcaacttctaagcgtggatttagagaaaacaacatcatgcgcaagctgttctctgcatctaggcgcagggcacgtgtcctcatcccctgtgatataatctgatacacactgatagcagaatatatggccacacaaagtaacaacagggtcttctggtggatcctgcaaagagaaaataaaacggaatttatgggtaaagaaaatcagaacaagcagctagggacttagattatggcgaacctgaagatacgctacttatatttgctaaattattatgcacttacatggcagacacaacagatgggagacgattctaagcgactgagcaggctaactagatcctctttagggagttttttaacagcttcttctgatacttttccaacagaatctgagttatatcttttaacaagttgggggtggtcacaagcttggcgtagtcgcaaaagcatgagaagaatgtttgcatagttttgattcaaagttcctgcagcagcatatgcctgcagagaaaaaaatatcatctcacatacttgacaggaaatcaggaatcactgcaaaacatttttttcaacgaaaatgcctccataacctatgtttataccatatcaagttgctagttactacgtaagtatcatatttttcaaaaacgtgcagatcacagctataaaccaaggataaactgatagtttggaggagcacagaaagagcaccttgaactgagaacgggaatcggattcaagcttcacgtagaaagaccgctcctctaccgaaaagtccacctggctcaaattaattgtctttggtggtagattaattataggctggccatcaagcaatgttcctagatcgcagatcagaagaagagtatcaacttatcagaaaccctcaaaaacaacacagttacttgagggataagaggagtaacatgaaaaatatatcatctaaaagcagaagatcagagtaaaatgaaatggaaaaatgcacaaaccgaagaatagtattggacttaactttaggactatcattaggtaatggctcaggtaagatcacagctaatctcattataaagtatctaagatataagcagatataataagaaaatgcatgacatatgatataccacttttgtcaagtcctgtccctcaccaatccaaccactaaaaggaatagtgagatagttaaaatacctttcgtacggcgtagcattatagcccttagaacagcctgaagcttcttgtacccttgaagggaatttctggaaattggacccttaatttggtggcagaatgacttgtacacagcatatggatcatattttagaaacctgaaatagctgtataaatcatctattgtattttgtattggtgttccagacaaacaccacctccttttggctcgaagaccgcaacatgctcttgccacctgggttctatgattcttaattgtttgagcttcatctagtacaactctgaaccacccaacttttgctagagtaccagagtcagggtcagatgaatcgccagcattattgttaccttttttcttcttactcttcttagtagtacccactacatttttccgtttcttattgatggagaagccagaagcgagaccatatttttcagaatttttttcatcattctcatcgtcatcaaccaggggttgctttggaacttcatttgaaacaatggcgtaagttgtcataaccacatcatattttgctagttcaataggatctttggtcctgttaccgccgtggtatattaaaacagaaagtttggcttcatcagtaaccttctcatcaagttctcttgcccactgccgcacaacacttgctggacaaacaattaaagtaccagcagctggtctctttctgttgaatttgcgtgttgaagtactcgcttcttctcccttggctttctttatgcctgaatcaccattcacaccactaccatttgaagccttagactctggtttctcaaatgcattttctgactcatcatcagcatccagatccaatgcttcagcctcttgattgcctgaattcttggactttaattttgcctcgtgcatttgctttaggataagcgcaatagtcgagactgtcttaccaaggccctgtgcagtagaccaaatggaatttgagggaaacctagtaagatcatagatagttaagcggaaaataactacgattaaaagtaacctgatcatcagctaatatccctcccatacagtgcaaactattagtttccttctgaaacatccatgccaatgcaattttctgagaaacaacagtgttaagtacacaagaccattctgacagatactgaaagatgatgtaaacctgaatacctgatgcttcataaggggaaccgaaagaagaccagcaggtaaatcgacctcggacttgggttgattcagttcctgcagaaaacatgtacttaattatcagaagtttaagcacttatcacaccaattcatattgtgggcaaaagtctttatttttaaatcacaccatttcataccaggggaattatgcaaaaacaccaaactcttcaaatggaaatcataaccttgatgcaacagtgcgaaataagagacgaatgcaacaatagtgaatgttcctattccttctcgtttgtcaaaaaggaagaacaacaatgcttccatacacatggtctaaaacagagaaattcagcatgttacccggtctcaagcatcattgagaaattgagacatccgaacctttaaaaacctattactcatttctgacataaaacaaacaggaagaaacgagcctattccaatcattcaatggccaagttcaacaaccccacagctggcgaaaaagagaagtgcattgcacaaaagaaaaactaagatgagaatcgcaaaagtcaaaagttgggataaggatgaacacctgtagtgcagcctgatagatcagcctctcgtcattttccgaattcctttcttcgcctatgccattcctatgcattggatcacttaatccattaaaatgtgaaggagacgcagatgttccgtgcgccacagatggaggtaggatccgagtgccgttagtcacacgccccatgcctagatcatcatgtgctccaccacgaaagtgactcgcattcccgttacttgtaccaatatcaggtctaggaggaaaaggaggtcgactaaaggttggtggatgtgtccttttaaaagcttgttgagatgaaaatttctcataatcaccaacagagatattgggaattctggaagttacgatactcccatttcccggaatatgtgtatggtgttctgcccgaggcagtggcttggattcaaaaccattacgtgagtcgagatttgtaagtcctgttttagtgtggccatttgcaccggaagaactcccactaagaaagtgcggtctcagcgtagagagatctcttctatgagatcctgcaccaagatcaacaactccataaagctaacctcacagcaaaacaaataaaacaattgataggtcagaaatgcaaccttcagctatccgtgggggatgttgaggcctggttctagtttcttgtatctcgacatcactatcagaactgatatcaatagcggaatccatcgcaagacctcctttaagagaatcaagcggtcaagtttctaatcagcctgaaatacgcaagaaaggaatgttaatcatctaaaacgcaaaactttacaaagcgctctgttattgcgagaaaggcaaatccgaaactaagattaccaaaagagtaggatcaaacaaagtaaagctacatactttatgaagagaatcacttgcttattgtaaagtaatgctaaatcgatataaacaatcataatcaccaaaagaatgtttcaagtgggcggtggctttggaaactttgtaatgtttgaaaaaattagcatcaatctctagaggacgatcaccgaaactcttcagcttgaacaaaaaaaaaactccaattgaagattattcagaaacccaaataagcaattaggacagaacaaaacagaacaacgtcatgcaatggcgggacaacataatcaaaaaccaaactttcgatgtaagaaaccctaagggcacgacgaaataaggaaaattggggagaatcagtgagtaccggggaaagaagtaagaagcaaaattgagaaaagagagagtgtgaagccaattgttgttcttcataggaagggttttttcctcagttgacccaaaggaagaatcagagacgcaacggcggcgttttgatcggagagaaaaatgaaaaaagaaatatagatacgctctcatcggttttttaaaaaacgaggaaaaatctcaacaaataaattaaattaatagtaggaacaaaaaaacagaaccaggcccaaacctctcggcccatattatttcaacttcacatatatatatatatatatatattaaggatgattgttgaccaaaaaaaagaaaaaaatcattgagaacataattaaacaaattagactgtgaattctcactccataaaatgggtatgaaatcaaaaaaaaaaattgttataaaatttactagtactgtttcttattggttttgaatgtaatatatcactaaaaatttcttatataaaagtaaattataatttcaaaaatactaattgacataaaaaaaattgagcttccgagatatcatttacattaatcaaggtggacactactaatatttcctggaattttaagatacatggatcttgaatccacatccaccatatatgagaaacgacatatccagatccaaatccgttaatatcggattcaaatccaccataaataactcacaattaaaataatagtataaaacaaataaaaagtttgtatccaaattaatcataaaacaaatttaattatcaactatttttcaaatggattaaatttaaaatattgcacaacaaatttaaaatattttttttggtgattttttgagcaatttatataaaataaggatatcctaatttttaaatcaaaatatctaaatccaaagattttggataacctatttttagatcgaatttcagaatgaatcttggatcccgaatattttgtctagcaaaaattcagaacccattagaaacaaaaaaaagccattgaaagaattcaacaaaatgagattttaccttttggactaaagcaccgatacttagtctcaagattttactaagatttttctcgtagccttctagtattgggattgtttcaaaagtaggacaacagaaaaatatgtggtggtattagtagatttgttgttatctttagaatttagaaagacgtatatttatatagggatacaatatagttcgagttttagttattggaaactttattccctaaatactaaaaatcttgtgaagtaaatatttatagttgaccaaaatttcataataattaccttggtttggaaaaaacataaaattgactaagtttattatagacaatttattttataataataagaaagaaaatcgcttaaaaatgttaaaagtaaacttcatccaaagtcttattatttatgttaaacttataaaaaatacaaaactatttcttacatgtataaaaccttgtaaatatcttagaaaacattttatatactttataaaaacttttaaatatcttataaaaccttataaatacttggatcgactcttcaaaaattagttactatcgagaagtaccatgtaaacaataaactttactaacattatcaggtttaatgaaagcatttttgaaaatgtatgaaaatgagtacaacaaaaggagcaattttgaaaattcctccactttaaactattttgttaattaaaaaattaactgaaagctaaaagaaaatttagactattttcatagttctcccaaagttaaatctaacaaaaaaagagttctgatgtttacacattaattaaattaaataataaacaagaaaggctcttcctcaatgtgaaatgaagaaacctccttggcttttattcttgtgggagcaatacagtaaaaatatctaaactaaaaaaactgaacatcaaaaaataaccaaatcttgaggtttctaactaattgtgaaggccatttgatggaattaaaaggcgttaacaccgaaaccaaacttgtaatccttcttcacatgatccacctggttcatttaatatcaaaaatcagtcattatcaaaaactagtcattaacaaatgcactaaaaaatgtatagtagcggattaaatcattttctttacctctgcagatagaagaaatctgagtccaataggcaattgttcttcaaggtaagcagcgacaacaccgttagaatcaacctttcctcttaatcgagactacaccaaaccacaaccaaacccataattagaacagcgctttgttgctgtttcaaaactcgaatgggaccaaaaggaatgaggtatgtacctgtctagtaatgaggtcatacccgacactagctgtaacatctcgtgacaaataattgtagatgaaatccgttgcaaatgacaactgattattgaaaaaataagaattagcttatattactctataggattaaagatgaattaagataaggctggattgtttaccttctctgaaaccttatgaacatagttcatgacagccacaccagtggaagcaatttgcccagaggcaacctgttggataataaaacatttaaagaaattcaaaaaaatgaaaaggatcatactcaagttagcttgaagattgttggaatattgtaaaccaacatagaaaagaagaatcgattttctgattgagttgccttattctaactaagaagaaacatttaccgttttgtcagtctcatatcgagctgcataaccaacacccgacatcagttgctgaccaagccagaaagcctcaccacccaaagacaggtgtggtgtcacatgctggaagaaaaagatatgattcagtgaaaagaaacgaatatctatttagcaactaacaaaagattaactaatgctgacaaaataaacaaaagcttgtccagggataaacggaaaagctacctaactatagacttaaccacagaattttagtagaacagtttaaaatggtaaagcatagtcactttacctgaatatagttagctgcataaacggaattgtttccaagctgaagctgagttctgtagtcagacccctaaataggtgtaaaccgtgaattgtcaaaaccaaataaaagctaaaaggaaaaacatactgaacagagaaaagccctcaccttgtaatcaatgacgaggtggccttgcgacttatcttcttcatctgtcagctggcagagaaaagaaacaatatggttatagatagaaagaaaacattatgcagctactacaacaaagaccagacacacaataatttctggttaccagagcattagccttgacggaaaaattgtcagttaaatcgaacttggctctcgcatttagtctaccgtccgtcgtgatccttccgataagatatagctgtttagaagtttgtaaatgttatatcttgctgatggaaaccattaatagtaccacagaatacaatcaataaacaacatacctttggatcgatgaaaccagcaccaaagtcataattggcagttggaattttgattatttcggatgatggagttggattaggaacctcagttggccccatcaatatgctgttggaagcatcaatacacaggcttggttaagaacacaaataagaatgatgtgccacaaattaacctaaaatctcattacctatggctgagaaaaaacttctggttaagcgacttgttatagtcgaggcggaaaccctcaaatagctctggctttaaagccactgcaaagtgaaatcaaaccagtcaaaacacatgatcttaaaatcacaggctaagttaatacattataaaaggttatggccacagatgtaaaggttacgaattggtagaatcagaagcataataacatatccataataccaaaacactcaattacgattgttggttcaaacgcagagatataaaagaccaagaaatcagcgacctaagacagagacagattgtgatctccaaaagaacagagaacgaatatataaagcagtagagagagagggtgatactgaactggtagcttcacggttgagttcctcatagaggacagggcaagggaggtttgagtaatccactttctcgtcaagtttggtctttgcatcgacttgcgcagtgttaatcggtggtgaaaagccctccatcgctgctgtttaccgtcaaggaagaacttttttgggtcgctaaaagagaaaactgcagaggaatcgaagacgaagagtctttcaagggtttttgggttttgactctgcgtgtgcgtcaagggttttgtaatcgtgtcaatcttagtttggcccggttttattttacttttttgaaacgggttggaaccgacctatttcgggtcatatactttaccggtttaccctcatgctcataattcactattttattttcttttggtggcgaaaaatcagtaattatattaattacaagtttattttcatatagtaaactaaaatttacaaaacaattaagaagatcatcaaatagtcaacaaatctccaaaacaagatttacttgttttggagatttgttgcatatttttctttatttggcaggcgaaagtgtttcactatggatcaataagtttgataacagagccatgtagatcagctcacatgaaggcaacggaagaggcgaaagaagccggagctcttctttcctacgatccaaatctcagggaacctctttggccatcacctgaagaagctaggactcagatcatgagcatatgggacaaggctgatatcattaaggtcagtgatgtcgagcttgagttcttgacaagaaataaaacgatcgatgatgagacagctatgtctctttgacatcctaatttgaagctcttacttgttactctcggtgaaaagggatgtcgttactacactaaggtaatgtaccacaaacattcatatgaatccatcattatcaagatcttggtgtgtgattttgattgatgttctcttgactcttgtgtaggatttccatggatctgttgaaactttccatgttgacgctgtggatactactggagctggtgattcttttgttggcgcgcttctaaaccagattgttgatgatcaatctgtactcgaggttaactcccattgatattgtgtgtctacttaatcaaatgaatcttgatgatatttactgatttttattttcctaggaggaagagagattgagaaaagtgcttagaattgcaaatgcttgtggagcaatcacgacgactaaaaagggagccattcctgctcttcctacagattgtgaagctctcagctttcttaagagacaagtagaacagtaaaacttatcttcgagtctagaattctccttgtctattgtaataatctgttctggattcttcctgatgattctgatcatttgtaatgtttttttttttttggttctctctctgtcttttctttttcttcttcattgtattgaataaaacaaacttatggcttctgagcttttcttgctaatagaaaacaaatagtttttcgtagttgtttggaaccgtagattgcatttagaattgtttctcaagcctttgaaaacagagtaataatcatgaagaaaccaaaaaaaaaacaagaaaaacagagagaacacatttagtatcaagtttgtagcatcaaagcattaagcatatagatctcacagattaatttgagtatattattactattaaaaattactttttcttattgtcaaatagataaattgattgtgtgaacttgaagatttttgatttgctcttttaagtctttagcaacgcgaacaaaaaagaaaaagaatatgtaaaatgcttgacgatcaagtcataaacttattggtctgcaatactggagttctaatttacactgtaggattgaaagacattcaagaaaagatcaattgattgtgtgaacttgaagatttttgatttgctcttttaagtctttagcaacgcgaacaaaaaagaaaaagaaaaaggtctactctgagctaaaagaaaagacgaaaaaaggacgaaaacaacttcaaacctaaactgtaaagacttctcatctcaacaacgtaagaagatcataaattgatcatcacgtagctaaatttgaggactcacccagaagcaggaatcatgtccaaaactttcatcatgaatgcaaacgtaaatgcatcttcttgaagcttctcgaatctgcacgtccatcaaacaaaccgagctttcttggtcagtctaatcacagaaaatgacatgtattgcatcgttggaataaaagaaacacatacctcccagattttgagaaatgccctgcgccaagctcgcatttgaacagaagtacgttgttgtcggtcttcatttctctcagttttgccacccacttgccaggttcagagtacataactcttggatctgttggacagacagaatcaattcaaaaacatcgttacgtcagatacaagtctgagaaagcttaccatttaactcagcagttttatttatctatcaccaaaacagtatatagactaaaagaaagcttaccatttaacccagcagttacaagcatatttggataattctgcgccgttacctgtgttatattgtccatagatgcatcatcacagagaactttcataccatttatcgcagataatatgaaaagaacccaaacatatactcacattgtctacaggggaatatgacttcatatagaagtaaaattcttcctttctggggtcaccccactcctgaagccaaaaattagacaacttttaagcacttttttaattatcatacaaaatcaaactacagctacttcattcataaggaaatctatccatccttatgctttcccagttcctaatgcaaatccctatgaagacatgccagatgttgtactctgtaaagtaagaataatatatgtaattcgctgttttaaggcacagaacaagcatcaaacacacctcccactctgatgtcgtaagcggaattgttgggtccagcattgttgtcaagacatctacaaaaggaactccagcgataaccaccttgaacaagtcaggcctcatattaacaacagcacccatcagcaatccaccagcacttctcccttccatgcacagtttttctttcgagcaatattttagttctattaaacgctcagcacaagcaataaaatcagtgaatgtgtttttcttcttcaacagcttcccattctcataccactgtctccccatctcaccgcccccacgaacatgagcaattacaaaggtaaacccacgatctaacagggacaaccttgatgccttgaaataaggatccacagaaatctgtaataaagataaagagtattttatagttccgttggaaagaagtaaaaggaccgagaatctgggaaccataaaagcttcaactaaaaatacctcatatgaaccatatccataaaggagtaatggatcagatccatcaagctttgcaagttttttgttatacacaatagacattggaatttgagttccgtctgatgcagcgacccactttctttctgtaacataatttgatgcatcaaaacctcccaatacctgaatgaaatacagcaggctatcataaagatcaagcgatgaccatttcaaaagagaaggcatgttagggaaaaatgcgtaaaaacacagtaccagtaaaaaaaaactaaaatttttcataattttcatgtgttgtatttcaaaattgtcaatacgacttattaccattcaatgaaatacgcttatgcattgcaaataaaatcggcaactaaatatgcagaggacataggaaattgatccaaagtgagggagaacgaatgaataagtagttttacttactgtgtcaatcttcttgacaacggaagtgccactgtccatgtcatagtcatacacagaaggaggtgttttcattgagcagtatttaaaccttaaaaccctggacgaaaattcggactcggttgagtcaactgaatagaccgggtcaacaaagctcacattacgaccaccttggagaccttccagtggctgtccctcagcaggaagcctatgaactgtgatcttctgcagtccgttttcacgctcgaagactgcaagatgatctcggaaaagctgaatttcctgaatctttacactgtccatgcaaatataattgtttagctaggcatacaaggtgaccttgatgttaaatgcattataaaactaatctagcaactggaaaacaacccagcatgcatgtcgtctaagccgaaggatatacatgatattaaaattagttatacttcatttggattttggataggccacaatggcaaccagattctaacaaaaaaagtttacctttctctatgtggaagcagaacagttgtctttgatgtgtcatcaactggacaggcgatcagttctgagttgtaaaattcagtgctccttctctggatgaaaaagtggttcccacgatgactgacagatgaatcaattccatctacacgaggtgtcaacaccctgagtccatcctgagtcttggacacatcaagcgagaagacaaatcttgtagttttgctttcagatgcaacaaataaatacttatggctctcagaagcgtggagttcaagagaaaacatatcatccttctcatggtaaaggcatacatcactgctctgctctgtccctaatttatgtaaccaaacctgttacaaagaatatatgaagatcagaacatgaaagccaaaaatattgacgtatctcataataagtacagtcaaatttggtaagaaaatatggcatctatgaggtgtataatgtcaacaattgatcgaaacggtaaaatctatattcatgcaaaagttaatcccttcctccagtactatacactaagacagtagggtgggaaaagattgaaggtaaaccttatcaggtcgcaggatttcgtccattgttatgtagagcaaagcatcattaccagcccattcaagataagaagtaagtcctttaagctgttgccccactggttttagggcttcagagtcgatgacattcactgtatatatctcatcaccttttgtgtcctctgcatatgccaccaatttatgatcgggactcgcctataaaaagaatcaagaaaatgaaacatcaagttagtaaagagcaagtttgaaaaggatatctcttaggacgatttttaaagtctattttctagtcaaaccttgaaggccccaattctgtagtagtcatgctcttgagccttggtattctcatccaatatcacatgctcaggaggagcatctggaccagttggcatagtatcatagacagaaggctcagctttgttgtcagtgatcaaacgtctacagtgctgaatatattcctttccttgaagatttttctcataataatagtaaggacccttgcgtagaggtgcagatatatcatcttctttgatcctccctcttatttcagcaaacagctgattctcaaattgcttggtccctgaatttttattttccagtctaatttatcacaagcttgcataatcaacaagtcactaatactccaaattgaaaacaaggaaagctaaaaaccctaatcccctaagtatcacaacgtcactgacagaggcaacttgaaaagactcaccagacatgacgaaatcagtgtagtgattttcttcacgaagataagaaagcatgtcgggattggtgcgagaatcgtcacggagccagtagtaattgtcaaccctaacgtcaccgaacatctccatcacatgctccaccttcttcgctacaggaggggatctcgattccgccatgtctctcggtgatgtcaaccgcactgacgcagctccggtttcagaggaagaggaaaaagaagaagacagccgtagaatagagcggcggcgaggaacaagaggaacgaggcaagagagaggagtatcgaagtggagaagacgactacgagtcgcgagaaagtgagtgccgagagatacgagtccacgccttattatcatattacgtgtccgttttagttgcctagagactcgcgaccagtttgttaatagaggacaggtcatatccggtttggataaaccggcctatctatgattccggttacaaaattattaactctttcgtgaatttttgctaggattattgaacaaaaccaaataattagattagaaacaaattactgttgaatgttgattaatggtcttctatgttcttgtagtggactatttttgagcttgatgaattttataagcctgagattaacccagaacctaatcaaaccgtgctaaactgcaaataagctgagatgataaaaattggtcttgcttacagaacaaagatgaaacaaaacaagaaagaaagcacgtataataataacatccagaagaggttcaggttaaagtgcatcaaaaccactaaaattaccaaagtgacattcactttcacaagaaaatgtttccaaaatggaaaaaggaaaaaaaaaacaatggaagtgtaaacaacatcagaagatataccttgaaagaacataagccaatggcaatcatgataatggctaacttgataagagcaatacgagactaataatgatgtaggatcatcatcatgaatcacaggaaataaggaacacctgtccttggccctctcatttgattgttctcttctgtctccgtgaagaacttcacttccctttcctggtaattaagcatattttaacaaatcattactgtcagtgaggaccagatcctaaacacttcccagaaacaggtctatatatgaaaagtaacacacagagcacaatcaatatggacagactgattccacgcgaactgtgaattgttactaaataaatggcttaaacatcataactctatctcacaagagtcactcatgtgtatatgtttgggtcgagagacaagtatcaaaggcagtaacttatttaatcaaaaaggaaaagtagaatccgaagacgagtgcataaaagtaagaagaacatgaaacaagatattgtggcagatcagtaacaaaagagaaaacaaatgcctcaccatgttgtcattgaaactcaatatagaagccacattcccacaacggtagcagtaattaggcgcagaccacacctttacaaaaaaaataaagagaagaaacatcaccaagcagattatacttccaactatccaaaatgatcataaggaagcaaggcacttacagttacaagacctttatcttggaacatgtacttgagaccttcttgtacaagctggtgagcgcgacatactagatcaagattgttaatatggttaaactgcacaagaagcaaaaccacagatcagggaactgaaatacatttatttcttttcacaccttattcaaatttcaaccccagaaaaaaatataaatacctcagtggtaaccctggacccgaaaagccaaccagctccacgtggactgacagcccatgtttcaatatcttcaggatcactccacataagatcacagaagggtccttcatgcggtatttcgcaattccgctcaatcaatcttatctagagaacaaaataacatctaaatgagtaaatgagatttaatctaatcataaataacacttgcatggtgaaaaccaaaagtaatttaaaatagcacattttaacctggtcaattgtccgtacatcaggtgaaaggccaccatgaacacatagaacctacattgaggatgcaatacgttttaatatggtatacagctaacttatgcattcataaaattatacaagaacacatcataacacaatgccaaagaagctgagaaatacttacagtgccatctataatagctgaaagtgtaagatagtcaaaaacatccgtgcaatatctccaagcattagcattaccatacttcctttggcattcgtcatagaaaccatacacctagcaaatataaaattggtacgacaatttaagaaaactataaaaatgaacctgcagggcacaaaatatcactacaatcttcgtccttgacagtggatgttaaaagatataggatatggtgtaggatagagataaatcaagagcttccgagaagaaaacttatggttgcaaagggttcacataaaatgcatcttagttaacatctatgcctatatctagcatggcattgccacatgtacaaaataaactttcaaaactagttataacaattgagcgaaaattacttctcaaccagtaactgcgtgaagagcacagcaagtcagcaacaatagatataaatggattagaataatgcatacctgagttagctgtctactttcatgatttccacgcaaaagagtgatattggctggatgtctacatattgaaatacaaggaaacgagtgattttaagctcacagcaaagtaagttagaatataaatttcctggaatacaagttaaatcgattttccagtagagcaatgcgtttacagcttaaagagcattctcaagagaactatgatatacagtgtgaaacggaaggatgacgatccatgacatatataacgcacaatttctacggaaaatcttaccttgctttaagaagcaaaagaatggtgaaaacttcaagactgttgtaacctctatcaacgaaatccccctgagaaaatcccccacagataattaaactatgtgttacatattgatatgtcatacgagcctacgcccaaagtcagagtctataccataaatatgtaattggtctcgggaacatgacctccggtctggaaaagtttcataagatcatgaaactggccatggatatcaccacagacggtgacaggactgttgacaggttgtacatttgattcctcaataagaatttctttcacctatataatagtcaaaatatcttgtgaattaccagagtatcttagcaaatcattgtcatgaaaaaagaagaagacggctgctactacaagtttcaacactaaaattactataataaatcctcaaataacagtttgcaagcgtggacttggtgcatccataaattggctaaagaagagctaaacttatccctaattccttagaatttagaattgaaatagcaaagtcaataaatcctctattggaaaaatgagagaaaaaccctaaaatccgtagaccaaaatggcaaaggaaacagtaagggagagagaccagattcaaagtaaagtgccacaaagcaagctctaaagtctcaaaagagtaagcgaagaattgggtttttgtagatgcatgaatattcggggaagagaaagcaagcaagagaagaaagaagaaagaagaagaaggcgtacgtattcgcagagaagttgaagctcgtcctcagagagatgttggccgtctttaaccttggaaatccattgatctaaatccatggcggccttttattatcctctctgtctctctctttcggtggtgaagtggaaattggtgctgtttcttcgatttcaatggtgagtctcgacgatctctggtgaagaattgaaagaaagatagatctagcagagcattgctccgtccgcttagggttacgtaagggggaaagagggagagagagagaaaggggaaacacaacgaaccaaacaatctcgacccgaacccgatttggtcttcctccatccccaaactctattcgttggatatttatttttaatcatttttttggcaacatattaaacatcaatttaatttttatctattacttcattacacaaatctttaatggagtatactacacattttcaatgtttttgcaattcttttcttggtaattttatttgtctacttgaatgtgacaattgataacacctaaataaaattccacaaatacttaaaccttctttatagtattttttcttctttttaatttttttaaaaaaacacatttcgatatatgtgttgttgaatttgagtaagacctttttgataattaaaaactcctaaaaaaaattatttaaaagtcttgttaaacaaattgtgtctaaagacacatttcgaaatctatgtgatgttgaacttttgaggaaggttgtttgtgggagaccgtacgggatatgttagaaatgaatcaatgatcttggataggcattagcaatacgatcgttcaagagcgaacctcactcgattcatttcaatgtttatgtttgggtcttcccatttggcttctggttagggataatttgagaaggaaaagtattgttatgatgacctctaaaaatgacaaaatggaatttgtctcaccaaaaaatctccaatgttcaaattacatccgaaaaaatcactagtcggagggccaaatattacggaaagtatatattggtgttggtttggtttatacttggtcgagaggtgatccgaaacttagttccacttaaaaaagtgatgcatcgcaaaggtaattcgaaatttaaattgtgaagagtttactcagctgcaagaatagaaatgatttttctcagacatgttcatttcgggtttgggctggattgagtttttttttaacccacgacaacattccaagaaagatcacttgttgaagagggattccaccaactgaccatctgatacaagtgcatgatttatcatatgtaattttatccatcaaattatctaaatttttgtagagtctaagtcgagatatcactgaaatcggccaaaaaaactagtagttaaatagtttttaaaatacacattgtccaaacacgataaagattttttaaactcaaaacaatcttgtataaaatctatacaatttttttttccctttctaactccatatgtttacaaacaaacaaacttgtaaggaaatttatattattatcatagtttaccaccttgtagttatttctcgctatgtccattttaattagcttgataaaaaacttaactatttaagaaatataaatattgatttgtttttgcaacgactatttatattcaaatacagcaatggttcactggactttggaatccttgacaaatagatatactgtataatataaaaattatttactgaatttgccaatagatttgggtggcaaatgaaaaacatgactctttcagtcccaaggagccttctcacttctagcagcaaagccaaaaaccgtagttacatcaaacgtgtagaaaaggagacgtgcgtctcaagaaaaggaagtaaccattaatacctagtactcctcaacctcccccaccaattcatcttcaccttctccgctgaaccacctgtttcttcactcccaagtttgctaagtatcagtttcgtttcccttagtctccctccataatctttcttccatgtctcaaacatctgtttcagccttcgtagctcccggtccggattcaagtttgcttccacctgaccagatttcacttccatcaagaactttctgtcgtcaccaaatacctgagctctttgtccaaattcctcagctaaccggcttatcacgcttaaacccacgcctacacttcttgacctgccatggcccatttggtaatgactacctcctgaatctaaatctgttgcatcgcttgcattcaccgatgcatccgagtttctcgctgagtcctcaacctctaggcttttctttgcgatggaaagactggattgcaaagatttcatctgcttttgccaaatttcttccatggatttcatctttgtttcatattcagaccaccggttatcgtactgctggactctttgtcggaggatgtcgttctcctcttctttctcacgaagagcagcttcggttctaagaaccctacgctgaagatcggaaagatatgatgccttcactagcacctcgtctgactcatttctctacataaagaattggtttaagagtctagcaatatgcatatatatcatgtagtcaaatgcacgaagagaatgaaagctttgagaggaccttggtgccaccagaactaagccatccaatatcccccgcacatcttctaaccagctctccacgaattgctacagaaaaaggtttcagcatttcttgaaacttctattttttaaaaatatattttgaggtttaatttgtttcaatcatgagaattaatcaaccctattttacctgattgtattacagcagatgcatcaactgtggctttatactgttggctagcaatccttctcttaacatggctttgtatagcagcagaagctcgatgcctctgcagtaactccgtgtattcctttctcatcttttctccacgaacaactgaaacagaaggatgtgtgaggtatggtttctaacgacataacaaatacaaaccaagatattgaaatgagacaaggggcaatacatgattgaagaatagtaattccggttttaagctcttttagacgacagcgagcttggtgccctctaaaataactttgaagacgtaaaatgccatgcagagtgcgattccttgtatcttcaagaaccccaatctgcaatggtgaagcaagtatactgcagtaagaatgtctaatttgtggcccctaaagtcaagacatcagacgactagttatagtacctggccagttctgaaaaacaattttgtgtagccaacttggtacatctctggcaagatattaaactgatggagaattgcaaccgaaacacttagaggatcttttgctgcaatgttctccagcagaaggaaaccatacctaaagtatgacaaaagaaaaacagcatgaccattcaacattattgcaactaaaaagtatgggaagcctattataagaggacatgcaatacaatgaaagtgcaccaactggagatggagttgttaccttcgggcaaatttatgatgaaacattctcgtgggaaatccagaccgggatattcgaacgacctctaggacaccacaacatcttagctgctgtaagacaagtccttgctcatacaacccggcagactgaacattgtttggctttatgcagcgaataaaatgtggggtagtgttccctagacgttgcatcaattggaaaagttgaccctgaaaaaaatatcccggcatcgtcactaatcaaatattataagatgacgtttccttctaaagtaagcagaagccttttggacaagaaatggacaacatatgttgatgagatgaaagctgtgatgagtaaaccctcaacaaattttaagagcagaaatagaagcaagctgtgtttaaggaaatcacccaaccttaaatttagttgctacactcagtcgctgggaatcagctccacctgctttgtgtaaaggaccgacaagaggtttttcagaataaatgagcatactagaagcaaacgcctgagggaggtggcaagagcaagacgacaaaagttgaatagaatctgaatgcaacaaatctcggttcttctctagaaatccagtcgtctcatatgtaacctgagttagaaaaaaatcacactaggttactgattcattcttgatttctaaacctcaaaattgatcccagaaactctactctatatcatgtcttgtgttctgatatatcatgtaaaatggtgccactgagtttttagagctattacctctccagcataatgcgcaactgtgaaagccttcccccgatctcctctaaaacaggaattatcatttagatgttgtttaagcttgttggcaagtgtcaaatctgtgccatttggaaatgtggattcctcatccagaagagaaagcagccctaatggtttctgcacagaaacgattcttaattgtctttaaacacatgttttgatataacaatagatcgttccaacacgataaactcaacagttgctatgcagcttgatgatgagacatcatcggcaaaatgttaatatattatcctgagtaacagacatactgatatgtaacatatgatgattgctgactctagatgaaattagctatcacattaccttttcaaagagactaagacattcttggttgtcctcaaaatcaacccttgtccagtcaatgccatcctgaatatattcctggaagagaagacagaaatataaatccctcagaactcggtagctggtgtgtacatgtccatgctctgcctagatatactacaaggacccatagcagaaaggggtttacgttacctcctgctcaagcttgaagagatgacggttgaagtgttgctgcaatctctcatttgcataatttatacagaactgctcaaaactatttttctgcaacatgtatagtatttattcagcaaaccaaattaacattggtacaaaatgtaacacagaagatgtaatgtgcagatagcttatgtaagttcatgcagtaaaacgcaaagggagactaaaaaccagcatacattgaatgattcaaagccatagatatcaagaatgctgatggatctgccagttctcctctttcccaccgcaagagatttgttaatctgttcaactagccagtcaaataggcaggcatagattgactttgctaaagcatctcttgcgtcaatggcctggaagcaaataagaaaaactttcaccacaaaaataaatgaacaaggcttgattccaaataagtaagagggggcatagatcatgattacagtgttaaaaccaaccctactcagaataaaagtacacacaaagaatcaagtgaaaaaaaaaatctttctaaaaggcctacctgcgatagtgttagcttctgtacaatagtatcattattaactctcatattacgctttgatagagctagcttaagctcattgatgttgcacccaatcaatttagcaacagttgacaaacctggaaaacaaaaaaacaaaacagcagttatatagccttgcattgcgcaccctgccaaatgagctacagagattaagcagaaaatttgctccaagtgaatgaaacaaaaaatatagaggtgacattttcgaacaaaatacagaaaaacgtgataaatttaaaggagcaggtatatcactattaaggactgaagagccatactttcatctggttcaggttcaacgtgattttcgttgtcaataatggtaaaagaaacattccctagccataatactgcagcaagcattgcaaatacattttcttgatcttctttactaacatgcacaatatctaaagcttcctgaaacggcaacgtaaaaggtcgaaataaatgtctcgaagttgcagagaaagaaaaagagaaaaggtttgacttaatgagggagttaccttaacggcgtgaaaacgttcagcgtcatcaactccgttaattgaatagcaattgctttgtttcaaatagttatactgttttgcacttgtcaaatttaacttctctgatttaacaatgagcgaaacaaaacgtcagataaacaatattgttccaccagttagtcagtaaccatatatatgaatatgtaaatttctatcacactaatcattttcacttgcaatagatccaacataagatctttaaaagagaactgttgatcagatatccaaataatacctctaagtgtaggtgaagccccagcacaaagttgatagaatatatgatatgacctttctccttccgtacattgaaccactcttgactatgaaagtgtgacaacagaacatgaaaggatgtcaatattaaaaatcatttttcaacatgaaagaaactgaagcagcaaaaatattgaggaatttaccttttctagtaaaactgcaaaatttaagacaacaagaaaaaagctgtcagattttgtaaaggaaaattgaaaaaaatgtgtgaagcagcactaaggtttatgcttacatgtttgaatttgagcacccgaaatcttccctgtttcactaaaatgaatttctatcaacttaccctgtcaaatttaacatcagagaaagattaagagataaataaagacccagaagttttaaagacacagagtaaaagaaataagagtaaacaaggagtttggacgcttacaaaacgactagaattatcgtttctcaatgtttttgcatttccaaatgcttccaagatgggattagtctttagtatctcatactcgatcccacttccacctccaagagcagccaagtattgcatcgctatctttgctgtctcagtctttcctgctccactctctccactggatgaaaaagaaatcttgtgataagaaaacacttcaagatgcacaaagtggaagaactcattctttcaaccaatccactattttccatagtcgcactaatgcatctattcaggtcaaaactaataagttttggcaaatagatttagtcccacactatattaatactacagaggcacgaaaatatgcaatattagtatgaaataattcatgagcaaatatagacactcgtaagcttcacaagttttgcttacacttaagttgttacagttaacatatttaaggaggaaactttgactaacctgataatgattgattggttaacttcatctgtaatggaaacaggaaaagataagactgaaaacatagaatgtaatacattaagaagatgaacatattaaaaaaaaaaatcatgatccaacctcgtatcatttcacgtattgctgtatctgcaatagcatagacatgagggctctcatttgatctcttcctgtatgcttcaatgttgcgattaccgtacaaaggaacctccttgaagggattcacagccaccagaaccggccctgcttttgtctagcaccataaaggaaaattcagaaaagcaaatagtaaagggtataacattttactatatatagttcagagaagagattgtcaacatgtcagaaaaaataaactgtattagcacaaacggcttacatatatcatgtcctggttgtacctatactcaaggttgtacaacactgctggctcatttaaataacttagttgcatgagatcgtctactccatcaagaatatcaggatttgcaggtactaaagtctctgatttgacttttaaaacctgttgaatcaagtgaagagatagtttccgatcaaacacttacaataatagtttacattcacccagggaatttaacaaaatcacttacttttccctcagttaccacgataacagactcttctcctgaagttgacattatctttcccagctcccagttaccgtttggaagttggacccaaaattgcagtacctgaaatcgaaaagttgtcagtttaatcgcctctacataagaaaaggaatgtttcctctgatgtttgttacaacatttcatcctaactaatagtctcaacatggccatgcaacaaaacaactagaccttaacaatacctttttccgagcatatacatttgtgtcgctccacttgcgatcattactctcaggcaagggcaaaatagaatctccatcaccaattgaagaccgctctccatttaaaatgctgcggacactataaggtgaatcctcattaacactatccattccaccaacagaacttgcagtgccattaaccccattctttaagtgaccatttggtggagtaatcaaattggtctcaaggtgatcagagattggtgaaccaagaaatctatagtcagccggcatcgttttaagtgactgaaaagatgccttaaccttgtgtgccattttcctgtaagagacagaagtgttcagttcaaaagcaatgagaccataaagaaaactattttctaatagaacaacaacaatgggggaccatactttagaataaagtactctctcaatgttcagtcactattataaagttccaaaatcaaaagaaaaaagattctaaatttagacaatcctctgaaccagaaaatgcagagactttctagttctctctctctaaatgaagaactcttaacttgatgaagtaaaagcaatgcaaaatccagtggatcagttgaattgttaagactctaaaagattattgatctgctcgaaaacaatctaatttagattgaatcttgagttatataatgattttaataaaaaataatgacgtttttcttcatcagcacaagaccatttctcgtatctctctagaaacgagcacaaatcagaaaaaaagattcaaactttaatagatttcataagaatgagcaatactaaaagattgaaattgattcgatctagctcatagtcagagaatacctttcaaattttagaaactcaaaaaaaaggagaaaccccgccaatcagaaacccactttattggagaaacttcagattcatacaaaattgaattcgccgatgagatcgatctcaatcatacacacaaaagaatggcaatctctgaataaattcggtgatcctgaatgtaaaactcaggaaacaaacaatgaaaagaatatagattaattaaaacatgttttggaagaagaaaaagagatataacagttggggtttaacagtaacaaatggcgactgataaaattggagagaaagatcagaaaaatggagagaaaaatcggaaaaagaaaaagaagaagaagaagatgcaactttttctctgctgagtaaaactgttttctttctttcgtctaattgtatatttgtgtgtaattaattagagagaatgatccgacaattttgaatgtcttttttggccaccaacagtggaattttcagcacatcacatggtcaaatttccgattttaccctttatatttttcttaaccgatgctttttggttttcaaattagactttaatgacgattattttcctcaattaatgggttttattaaattataatcaaacaaaattattaattcttcgaatttttcttttgaaaatgatagatgtcttcatcttcgaattgttattatattatcattttattttatattgtatataaatttactcgttcaaactcaaaagagtattttacatttttatcatatgatagattatgagtttccacaactattccaatcataaatttaaggggtggaaaaatactaaaataaataaatcgaagcctatcaagtaacaatagagtaattagaattggtccatgtctcaatcacacctctgttttatgtagtcaaccatcattagattatcttacttcttaagctagttgctaaatcagatcctcaagaccacgaccaaagaagtaatctccgtgattccccgctaacggattagcttgatccgagagttgattctctaacaaaaactgaacattgataccttctagattgaagttgtaggagatggttatggattaatctaaccggatcaaaagcattaagctgttgctgagtagactgtggctccattgattcacctaagaaactcggattcgtgaagtccatgactgggatgaatgagaagcgagatgagattggatccgacatcgggagaattagattggggattggattagggttagggtcaacgtattcgtccagaaaacctccgttgcaaagaggacaaggatcagcggaggaagtaatagagattgtgatggtctgatcgtattggtaacaaaataacatcttctccgcctctgccacgacggagggttcgattgagtttccgccggaggtcatgacgaaatctacaaatattaaaacatagaagacgagaaaatgggaggagatgagagagaaagagagacgacgtttcagcgaatctgtaattgcgtcgccactctcaccggcgaggactttttcaattatgggcctaggcccaattaatttaggtggtttaaatgattttctcaagtatggggcaaaattaaaagaataaaaaagtagtgtatcttaagaaaacaaagtattggattttatttttactactgtattatgttttcttaattttaaaatcttttaatagaatataactaataaagaaacttgataaaatgcatctattctttttggtgtagctattttttgttaatatggaatacatataattaaaatccggtttattgataaaaccgtcaaattgtattgaaaaaatgtaacgtgtaaaactaaaatctagttttaaaaaaaaaaaacagtttaaatattattaaaaatgtatggactactacttagaattcaaataatgttaatagatctttcatttatttttaacccacacgtatttatgtgaacttcatctagtgatataataagttaaaccattaggaaaaaaaaatcaaacaaagataggagaatcatagtcatattttttaatttaaattcaaatcattttttcatggtacataatctgcatcatttacagcaaaaataaacaaaatctgttagtttttaaatttgaagatatgttttcaccctataataatctcacataagttctcgaatattgaaaaaaaaatggttacatacgtcaagaacaattttttattggtgcttataatagttttacttctttttgttgtctcgtaatatgcaagatttaatacgaaggttacaacagatgaaatatgtggcatgtgtgcacccatggcagtcaatacgtcattttgctatgagttcatgaaatcaatccctcaaattgcaacattggatatttatgatctcaccaaatttctgatcaattacgattttcaaataacattagatttgacgaagcatttccagtcactcacaaacaacacaacagatcgcagttctaaagattcctataagttatgtttagatctttttagtcttattgatccgcttgaaaccgctcttaaagctttagcagccaatgactatgacactttaaacacgaacgttggtgttatgtctcaatatgcagaggaatgtggaagcgagctgtcaagtatcatcaagcctatttcaaaactttcgaaaggggtttctattgtcgaaaatgtatctgacattgttcttgtaatttcggaatattttttaagaaaaaaaaaaattcgatgtaagaaatcattacccaaatctataataatgaattaataataataatgttgttttccactagacaagtacaagataatagttatatgtcaacaaaatttataagaggtcaacaaaataatgaatttattataaatttataataatgaatttataagatgtcaacaagattcttttattattatttctatctatatataccactagacaagtacaagataatagttatatgtcaaaatctacttgtctttttatccacctctaggagctctactacaacaaatatttttattatattgcatatcatttttgtgtcatgaaatcctaatacagggttttcttgtgtttttgtttctatatatatatatatatatatatatataattctattttaaaaaaaattaagttaatatatttgtttgtacacatgcacatgtataatatttaacctaagcttttaagaaaacttatacatgatagaaatatcatagaccttttaaaagatattgcttctgaaatgactacgtttttttcttcgtggatgtaaacgagcttcacgtcgcattaaaatgtatgcatggtttatttattgactacacatatgataagaaaaggttagtatgtgtataacatataaaaaacatgaaatttaaaataatcataaagtcaaacaaataattaattggaaccgatgacatcaagataatgagttaatgactgttggcaaagcaaacaagaataatagcctgatgcaaaaacatactccatataggaaggagaagactaacaagctttatcagaaggcgctagtaaggttacagttgagttctttcttcttataaaatgaaataaatgtcacatttatacatgattatagaagaagctctaagttttctctatttaacctttcttcgtttctctaaagtcatcacagaatagaaaaaaaaaaactttaaacaatggagactcagcttcttaactccaaactttcagttttcatctttgttatagctttttttgtttctcatccatttgcatcctcaacttcctctaatctggtggagatggtggttccctccaatggctttccttcttggttaactgattttgatcctgccaaggtaataggaaaaagcacttgttctattaatctcatcaccgaaacattctatattattatgtttaattgtctctaaattggaattttatatgtatacacttataccaaaatctatcaacgctccttaatactgaaatatgttttttatttgctgataatcccactattaaaatgtatactttcatggccaaaagatgatatcaactccaagataacttgttttttaaaattaaatgtgtatattctttaaaaaaaaattgtcttttcagtaaacataatcgatcttcctgatgacaaaataaaaaataatataaaaatcgatcttcccatctttcttaatttagttttgatcgatggtttacattacattaaaagagctcacaatagaaatattcaaaatatcatccaagaaagaaccaccatgcatgaaccacaaaggacacatgggaggatacccaatatattttattttgaatgtttgttcttcttagaactttggtttgatttcaattttttttcttgggttttaaaaaactatatttttgatagctaaatttctagatagtgcagattaaaaaaaagaggccacagtagatatatattttaaaatattaatcttaaacgtttgtatttgaaaagttggtttcatgttcagtttttattttctcggggtttttaaaaaaaaatgtcttgcattaattaattaaaagaacaaaatgtagcccatgataattggaaaaagcccacaaaggagatacttaaaatatcaactaagaaataatccaacatacactaagcatgctttgccaaataattccttatttcattttcattactatgtcccccattacattacacaaacacttcattgtaactacttgagttgatcgaataaaaaataaaataaaatatccgatggaaaagatgttattgaatttgtttgtttgctctaacaggaaattaagactaaatgtttgatatatattggtaaacataattattgaatgaaaaactaaaccgtattaaaccaaatcggtttaatgaaactattttaatcatctgtaaatgctcttcgatagttaagcttttaatgtcattatatttgtttctgtaaaaattacaatatggactatcttaagtgaattgaaaagaaaccaaataaatctaaggcattgatcacgatttggtttattatatcattcacataaagcccggattatatgtcggaagctatttattattgtatttcttaaactcacatatgttttataaacttgcagccatcgatggaaattggttcatggcccaggatctttggatacagaacacggctggaccagcaaagggacaggctgttgctcttcgagtgagcggtgatgctgtagtcatctatcggtgtcgcattgatgcttatcaggataccctctatgcccattcatacagacaattttaccgtgactgcttcatcacgggcaccgtagacttcattttcggtcatgcctcagcaatttttcaaaactgtcgaattgaggcccggaagccaatggaaggacagagcaatgttataactgctcaacaaagtgacaagccgggtacatcggggttttcaattcagaattgcagtataacggcaagttcagatcttgttccagtaaaaagaatggtgaagacgttcttgggaagaccgtggggtgatttctcaacagtagtgtttatggagtcttatctggatgatatgatagatccaatgggatggactccgtggaatagcagcaccacaggacgtttgtccacactatactatggagagtacaaaaacaaaggccccagagcaaacacaagccagagagttcgctgaaaggggttcaagataataaccgatccgatagaagcgaacaagtttactgttgggaagttgataaataaagacccgtggctgaacgccaccggaattccgtacaacgagggtctttgattagatcgttttaccattagtatttaaagcattaaagaaaatagaatctgtcaatccattaacaaaatatattaaatggtgaaaaatatattaaaatatattaactggtacctatcaattctcgatcaatttcgtgatccattattattagtgagaaggcatctttcattgagattacaactcggattggagaagagaagaatcaaatcagagttgtgatcggacatgaagaagaggaagctgcaaagacaagattaccaaacgacatcctcaagaaggttcagcgattgggccaaattgagaatctaacaaagatcaagcccaacaagcagaaggcccaagcgcagacccaaaacaactcacagctccaacggttatctccacgtgcaaaagaagacaaagccaaaagtaaaacaggattggatcaagtgactaaaaccaggagctgtgcgggcaaagatggagtagttttaaaaaaccgttttgagtgtgtaagatcaatagaaacctgacatgtgtcagaacaaaccctaaagtcactgacattgtaactcctataaaaggaaaacatgatgtaaccttaaaccttaaagagaacaaataaaagaaataaaacttatctttttcatatgtagcttctgagcatctttactttcaattattagatggtgaaaatcagttttttatttttctttctttttcttgaataatgaatgaactagaatttctctcgtactacgtacgggttaagaattacttaacgttacatacagatttattctcggtaaagtaccatattatggagaagtggttttagcttaactttatttgaaaatcaacttccaggaaaagaacattgtccgtctaaattcattacggcccaaaaaaaataatctttcttactaatgatctggaacagatgaaagatattattgggtttagggagacaaaatttgtggtcttataaacgcttttattgatgtcatgtaattaaacgactcaccaagtttggaaaataattttttttttagagccaactaaggaaatgcatagggaatcaaataacagtgagcaaaagattgaactaaatatgagtacacgatcatagtggtagagtttaagaaacttgggctttgagtttaagataatgccacctcataaacttatcttcgtcattaaactacttgttcaacaagccttgttgctcacgtaagtgtataatgagtctaatgactattttagagtctcaaagtaaccttactaataacataagatatttgtgttatgtttgagatattcaccggccctaaaataaagtgattttactacctaaaatgaattgttgtacaatatgacccaaattatttacaatatatattttacaaaatttaacattttcaaagctacctcatctccactacatacaaataaaggaggatcacaaacactttgacgtaacgctataatgaaaactcatttttcgtatccctttttatatggagcattttttatgcccctttggccctttttaaagaatttactggcatgtcatgatattttaaaaataaatattttataatttttaattaataaagtttaattatgtaatttcttgtaatttttaattaataaatatttggagaattttttgttaatatggaatacatataattaaaatccagtttattgataaaaccgtaaaattgtattgaaaaaatgtaatgtataagactaaaacaaaaaatacagagtaaatattataaaaaatgtgtggagtactacttagaattcaaataacattattagtttttatttatttttaactacacgtatttatgtgaaccttatctactgatataatagttaaaccaatgagggaaaaaaaagatgagcaatagaaggtgcttgttgctttaggaaaaataaataaattaagctttctctcctagtcctgattaccgaaaccaatcccctaccttcttttgctgaaaaaaaaatcaagtaatagaaggttttgccggcgtccggatctctgtttcaccattttcttttgcttcccaaagatctctgttttacattgcttttggtcaacttctcaatcaaccaagcctttccctcttaactcaatgtcggatggttattgatcagatgctagagttggatggaggttcccagaaatctcctttgggaagctatgcctactacttttctcgtgattttaaacctaggaagccattcttttacaacagtatctctttctttgaacttgagacgattttctttgtgttgctcagatctcccgattttggctctccctcaatctgcacaaatgccttttcccaccagaattcgccttcggtgacaaactaacctaatttatgtcgatgtcactagattggacattcctttctaccttctgggcttaggcccaattatcatattttcaaagctcaactccaaaaagtgtattccactgttctctctgcaaaagcccatgttttgcataaaacttttctgatcttgcttagcgaatttttgtgtcgactcatggaactgattgttaatggacgtcgattggaacataatcaaacaatcttgctatgctggtataaaacttatctgagaacatgaccattagaattacctaggggtaatactctctattttcaaagcttgaaaaacaccttatatgatagcttcctttatcaaggcttgttgaataggtcgaggagaaacggcattatgaccccgtctctaaggagcaatggttaccgtagcttcttcaaccccatatccatgtattccctgtttatcgagctcatatatgtacaattaccaacttctgggaccttttccatatgctcaaatccaataagctcatgtctgattatttttgttatgtgttaagtcgactaaaaactttgtgtgaaattcttaattttcatggtataatactccatgtgagagaggatccacctattatgttacaaccttatactctttttttacgaaccttggttttagcttcatataatatgttgtggtatgactttctttgcttgaaagactttggtctaatgctgttgaaccttcatgcgagagtttttatggtggcttgggaagcttgtcaaaggaccacccctcatcatgctcgcttaacgtcttcaagtcatacacctcacttcatgtttgctattgtttgcctaacctcaactttcattcggcatcaattctagcaaataaatccaagcaccagagcaccatcaccactacccaaacctttgtcaaagctctacttcatgtagctctcctcgtgccggcgagaatcatgtctttgaccccttcattaacgccacttcgtcttttgacagagacaatttgtttttcctttgaatcgctcttgaaagagtcgtcgataaactttgatctcacaagtaccataagcatctttgcttttggctcaaaactctcaaggaccctttgtcgattagccctatctatctttttatcatttttctggtaacttttggagtatgccccttattgttgtgctttaaactttggaactttttccctttatctttgtatttggcttctacattatggaatgaaaacaaacattgtccaaaaataaaataaaaaaaacaatgaggaaaaaaatcaaacaaaaataggagaatcatagtcatatttttggatttaaattcaaatctttttccatggtacataatctgcagcatttacagcaaaaatgaaacaaaatctgttagttttaaatttaaagatatgtttgcaccctataataatctcacataagttcttaaagattgaaaaacaaaaatggttgcatatgtcaagaacaactttttattggttcatatagtagttttacttctttttgttgtctcatcatatgcaagatttaatacgaaggttacaacagatgaaatatgtggcatgtgcgcacgcagagcagtcaatgcgtcattttgctatgagttcatgaaatcatccactcaagttgcaacattggatacttatgatctcgccaaatttttgatcaattatgattttcaaaacacctttgatctaataaagcatttccagtcactcacaaacagcacaaccgatcccagttctaagggttcttatgagctatgtttacatctttttaatcttatcaatcctcttgaaaccgcacttaaagctttggcaaccaatgactatgacactttaaacaggaatgttgatgctatgtctcaattcgcgatggaatgtgaaagcgagctgtcaagtgtcatcaagcctattccaaagctcttgaaaagggtttctatcgtcgaaaatgtatccgacattatttttgtaattgtggaatgttttttaagaaaagaagaaacttcatgtaaggaatcagtatcaaatctacaataataaattaataatcataatgttgtttggtatgatgttgccattaccgatttacaccgataattaattgttttagtgttaagaaaaatcgaaatccaccacaagagcataccaaatcacgaaaaagcttgtttgatagatcggattggaccggctttcgtatttgaaaaagtcatcgttcacctgtgaaaaattacgcaactccggcgaggactattttcaactatgggcctagccccaattagtccaattagtaaggagcttaaaatggttttctcaaagtacggggcaaaagtaaaagaataaaaaagtagtggaccttgagaaaagtcatcaccagctttccttcctatgccacacaaacgtgttcttctgaatatgagtcaaacacagagaagattaggagaacgtggaagaagaagccatggactctatcgtctccagttcgacgattcttatgcgatcatatctcactcctccggttcgttcatgttctccggcaacctccgtttccgtcaaacctctgagctcagtccaggtcacctccgtcgcggctaaccgccacctgctttcgttaagctccggtgctagaagaaccagaaaaagctctagttcggtgataagatgcggcggaatcaaagagattggagagagtgagttttcgagtacggttctcgaatcagcccagccggttttggttgaattcgtcgctacttggtgcggtccctgcaaattgatctatccagctatggaagccttatctcaggtttgatacatttaatctctcttttgtaatcatcagttcttgctggagaatcgtgagagtttgaaattgaatgagatcgtcagagattttcacgcatgatttggtggtacaaacttgggatttgagattttatgtatgagaaactattgttaatcatataccattagctctacaactactaaaaatgtcagttagtgactactgtttagagttgagcttccttttgcaagtgcttagagaataaattcagttctgagtgtttttagttgtcttggttatttaaactcaaaatgtttcctttgtttctcaggaatatggtgacaaattgacgattgtaaagattgatcacgacgctaatccaaagttaatagcggagttcaaggtttatggtttaccgcatttcattctcttcaaggacgggaaggaagttccagggagcagaagggaaggtgctattacaaaggccaagcttaaggagtacattgatggtctcttgaactcaatatctgttgcttaatcgtctctctccccaccggtattcttctgtctcaacactgtttttttaatgtaatcaaatctcttcaattgtgatgatcttcatccccggtttctcatttgatgtgtatatcttgcaacaaattttacgaatagaaaagagttgttctcttatcagggaaatatgtatttaggcttatttgcttatgcttgcaacaaatctagttaggtttttgcatttcttacagataatctcatttgttggtaaaaagaaaagaaaatcaaatgcaactggatgccaagaaacaaattctgcttggattttattggaatgaatcaggttaaagaattcaacatttaagattttttcaacaacttccattcttcttcttcttttcgtctcggctgcagattctcacatcttgctgccttattttcccttgaaaaagcaaccaaaaacccgtgcttaagcaaaaccaatgcctagaactttgaaacatttcactttcttggctcttcaaacctccttgacgtagttttcttcacctcctccaataacagcatcatctggcatgtaacgtttccagaacggatgttgcttccatactcttcccatttcttcaattggaaccccttttgtctccggcaacaagaagtagatgaagacggtcatgactgcaaccattcctccaaagaagtagaagagaccaaacttcatgtggcaaagcatcgtgaggaaaaactgtccaatgaggaaagtgaagaacatgttgacagagacgttgatggcttgtcccgctggtctgatttccaatggacagatctcacttggtactaaccatcctaatggaccccatgaccatgcaaatcctgcaacatacaaacatatgaaagccaggatccaatctgctgttgcaggtgttaaggtccctgatcccgtggttccaaacttcataccaatcaaggtaccaacaacgatctgcaaaatgacccatcaaacaatatatgtaaggtacgcaatcatcatttatatacattatgaactgaaaacgtttcatttttccacatgtatacgcaaactcggaactagcatttttacctgggaaacaatcatttggatgcctccttcaaggaagagaatccttcttccgtacctgtcaaccgcatagatggagacaagggtagagacaacattgaccgcacccgtaataaccgctgagatgagcgaggcatcatccgcaaaaccgagagtcttaaagagaacgggggcgtagaacatgataacattgataccagtaatctgttggaagaaaggaatcgcagaacagaaaacaagagcgggtctgtattttgcctgttggaaaatgttcttccatggattatccactttcttagcagcctcacaagcatcacacagatcttgaaactcctcatctacgttatcagctccacgaatcttttgcaacatctctctcgcttgttcgtacttgcctctctcgagcatcgagtttggtgtatcgggcaagacaaaagatccaataaccataataactgccggtacagcggctaaacccaatgatactctccatccgttcttagccatttgagatgttccgtagttgattaagtttgcaatcaaaatcccgatggttatagccatttgaaacccgatgttaagtgctcctcggatcttcgctggagccatctccgagagataaacaggcgtagactggaaaaacaaagttaaagatggatgagccatactgaaaccaaatataccttactttatttcatactaagcgctaacaatatttttatagctaacaaatcaaatatcgtgcaaccaaacagcaacgaataaaccaaaataaaccgcaactaaattttgatagtattaattatttatttgtattttaaaactgaaccttagatgtaagttgattctagtttggaaattggaaccactctgaaaaattgagaaatttttgaaccaaaccgagtccagaaccagaatgtcttgagctaaaccacataataaacacaccatgaccatgttgagttgttgactcacctgattggcaaatccaacaccgactccgagcaacaatctaccaacgatgagcattgcgacattggtagcaaatgcgttgaatagagaacctatgaggaaagcaacccctccaacaaacatggagattttgcgtccgtacttccttgtgacagccgaagctacaaaggaagacgcgagtgccgcgaggtagagtgaggaagtgaacaactgtagcaattggttatcgaatttgcagtaagcagtctcgcgccttgcttcgtgcatttgcttatccacctccgggaaaaacttgctcagaaactcctccatagatgtcactccacctatacaacaaaagaagtcacgttacattccccgaagctagagtggacagcgaaagcgaaccaaaataactcaacccgaagaagaaaaaggcgaatgtggaatttacgaacctgagataccgaggtcataaccaaagaggagacctcccatagcggccacaatacatgtcatgatgacaaagacggtgactccgccttcatagctgtttcctccaccaccaccttctgatacaaaggctcctccagccattattatttattcttcacttattgattgttagtattattgccttttgctttgttattcaaacaagaactagtgagcttatgatccaaaactgaagagcttgtgagctccttaaatataagaattttcgttatctattattaggaatcgattgtgatattagctgttttagatttatcttagcttatgaataggtgaagtggttttggtatttttttcatgttcttcaaacccagttttagtggagatcttactgtctttttttgacagtttcttttgtttttttactgacaacttccgctcatttctctgtaatttttattacataaagactctaagagatatgttgaaaaagacagtctaaccctaaaataggatcttgtattaatataataacagtcgcatttagctgtgaactaattgtgatttcgttcagtacgtatatataatatagtctatttggagacatttcatttctagtttagtttggttcatatatttaggattgattattagatacacgtcattgtagatcgttgttccagctaatttgagagagaacgttacaaagataattgaaaatgaagaaaaaaacaaagtaaatatatctacgtagacaaaaatgttcattgtcattatgaacacaccgtacgttctctaatagaataggttttaagatatttctcatctttgtaactctgtaatatatatatgcaaattgaaaaagaaacaacaacaacaacaacgttcccatttttgaatcatgtcattatgtcaatctcggtgtaattaacaatgagctggacgaagaacacatagcaaaacctccgagaatgaagattggatcagttcaacatcctaagccttggtcatcaaatatatatcaggctcatggacgacagaagtccgagtttgtaacatgagaaaagatattacaaattaagtttatcactacgtacgtacttgataagtctaaatgaaaagtgatggaacaagaaatctttagaataaacatgtcaagtgatcatgacatgatgcaacagccatgaacaattatcagccaccctttcattacgtaattaaccatcacattaaatctcatgaagactttctttatctcggctgtctcctgattaaccgaaccacgacttcttcttctcaagagctcaagtggcttttttgcttatattcacaaaatgaattgatggctattaagcaagagtgaatgaggatcaaacagtgcacattcaaactttgggtccaaaatctttaacgaccatattcatcatttagctaattttgtctataaattgattatagcatttaaaatcaaaatttcttttatttccaagacaaacagtcatacatatatatgccagttagctgttgttttcacctttgaatcttagaatttattttttcaccaacgttggacatgctctttataagagtttggagggcttttagttatggggcaactaaaccttgcacggaattttccttaattagttcatgtttaaatgtatcatagttaactatgtcatggttaatccacaaaaaaaaaaacatattgtgtatgtccaactactcatccatccttttaggttcatccttgagaaccttgccatatatctacttctttttgggaagtacgctcggtagtggaatggatagttgctttttttttttttttaaatggatagttgcttcatcctcaactttagccacaaaatctaaaacttggatggcagtttaatatttttgatctgttaaatctcggaggcgccaaacttttcgtttgggtgaagagatcctttgataactcccaatacacataatgatctgataccaaatttgtttttattagtgtcatcttatataacattttttatttatgataagatgtgaatatattaccaaaacgtagtaagaattttattttaatgagatttactaatataaagttttttttgggttttatttaaatgggttaggagtgcaattgaatcattttttcaactatttcaacttaaatagtaaaaaattgattgaatgtttattcaactcttttaatttcttcaattacgtcaaccatttgcactggtttgtcaattacagcaataagatttttctctgaaaactcattacaagaaaacttgttctattctttagtgagtttttaatctactaattatatatatgaaagttagccaactctctccatatgattgacacatcatcactttaacatttgccatgtatccactgaataattaatgtaagctcttcaacttttaatttatagattaatgatgtatttattatttaattttacatatttaattgtactaatactaaatttattttgttattaaatgtttttcaataaaataatttgattgattttctcatactcaaaagatttttttctgtaatcttaactcaaattatgagtgtatagtagtcatggattaattaatagtttgaatagtttgcatattgttatatatctatataataaatcgccgagggtgaagagtatgtaagaagtttaatcatcaaattcttaggtttcgagaatcccaatattaccttctatttaattagtttaagacgaacattgtttaggaattgtgtgtataatgcattgttgagaatgttgttagaaaaaatatattttaatattaagaataattacttattatataagtaaatgattagataattaaaaattatatttaaattaaacgatacaaaaaatttaaaaataccgcagcgtagcgcgggtgattacctagtcatagtaaaattagtagtgacagattttaaaaaatgacaagcttatgctagtaactttacaaaatagatagcattatataaatattttactgtagtatgagtcaatacttttttaattattaatttagtcaatatatgttagatgcaaatgtatttttttttattgaccaatactttggtagtataatattagtagtattagatattattggctataaatagattcaacattgaaacacaaatcatatatatgaaagaagactaactctctcccacaacttgacacataagcacatgagagcttgccacctagacttcataaaataagtaatacataattagtaattaattcaacataacaactaaaataggagaatataattaatgagaacttgaaccatcactctttctacatttttaattcaatatatcctctttaattttgagatccacttaagtggctaaagtgatgataaaatccaaacatgttacacatattcctggcctaaaaattagacgattattatgaaagaaactaaatgaatatgcagattaaatatatctaagcttttcgatatttatgctaagaaaacaggtaatttgaaagatatttgaggagctatccttataactaatacgtaagatataagattatgacaagaacttaactaaactttctaagaatatcgagttgaatatgcttagattgaatatgcaaagacatgattaataaagacatgttatatttttagtgtaagaaataatttttctaaaatttcactgtctcacaatctatacatataactaaaaaagcaaggatatataaattcaaaaaaaaactaagaatctaaaacaacaataaaaaacaactcaagcacattcgtttttcagatgaactaatatagttggacttttcaaaaacaattacaaaacatatttatgtttcaaaacctatgcattcaactttactttatataaacagacattatataaaacaattagtaaatagtaatacgtaaacccgcacgtagtgcgggtactcatctaatttgtaaattaataattcctcaatttgcacccaaaaaaagaattccttaaccacgaaaaaaataaaaaaacaaaattacaatttaagggggaaagttatatgaaattgcaaatataaccaccaaacaaacaatcgactatcgaggttacccttaagaaaatctttattcgcaagatctctctctctctctctcactcgacgcactttagaaagaaaccctagtccgacgacctctccttcgccgctgaatcctcatcgctggtcagatttctatctatctcgctcttctatgtttccctatctcgttggtcagatttcgaatcttctttttgttctcatggtttttgagctcaaaactttggggtttcaatgtctcgatgttatttcttagcgaggtttcaatgttggctaagtgaagttttggtattgtcatttacagattcttggcggctttctttttgatgaaattggattacgatggctggatatcctactaatggatcagtctacgtttcaaatctccccttaggaactgacgagaatatgttggctgactattttgggaccattgggttgcttaaggtatggtattggccaggtactaattgttgcttttgttttgacgtcattgcaatcttttataggtcactagattttcgagtttcttacatttttttctacattgcttttagagagacaaacgaactggtactcctaaggtatggctgtaccgggataaagaaactgatgagcccaagggagatgctactgttacctatgaggatccgcatgctgctttggctgctgttgaatggttcaataacaaagattttcatggaaacaccattggagtttttatggccgagtcgaagaataaaaatgctggtgatgcagttgagtttgttgaattcgatggaggtgctgaggaaacaaatggaggtgctggaagggggaggggtcaggctgattcttcggcaaagccatggcagcaagatggtgactggatgtgccctaatacaaggtctgtgatgtgatatcggtgaggagcttcatctagctcttgtttccgttaatttgctagtttttatatattttatagtttctagcagtagtgttctcatactctttcattggcagttgtacaaatgtgaattttgcattccgtggggtttgtaaccgctgtggaactgctagaccagctggtgcatctggtggcagcatgggtgctggtcgtggaaggggtcgaggtggaggcgctgatggtggggccccggggaagcagcccagtggtgctcctactggtctctttggtccaaatgattgggcttgtccaatgtaagcattccgattaggtttgaaatagttagttcagtttcagaggataatgagcgtttggtacttgattaaaacacatcgcaagaaacaatttatattcagtagcaaaagagaacattcagatggcatatagcgttgctggatataaaattaatttgtcttatgtatggaaggaatatagcttgtatatcaatgcttttgatgatgtcagttgactctttacttagaaagaagtgatggcccgctctgctgtgctgtgtctcttaaactggtccaaattatgtgtggaggcacatattttttccttcttttttgaatgttgattctaatttcgtaattttccttcagatggctgttaatctgaaaaatgtaatttgaaacgtgggtaggttgtagtcttgatccttctaagaagttatatttgtgaagataggctgccttcaattttctgtgtctgatacaaaaaatggactatgttttagtttaattgcaagttatgctatgtgtcatcgagtagcttaactaagaggctgcactgtgtgaatgtgagttcttatgcataatgcactttttctttttgcgctaattctttcaggtgtggcaatgtcaactgggcgaaacgtctaaaatgtaatatctgcaacaccaataaacctggtcagaatgaaggtggtgtgaggtatgactcaaagccagtgataagattgcctttgtattgttatcttgcaatgttcgagctgaggatttggattataaatgattttacagtgaatgtaggagaggtcgtagattttctgttcgatgtttgtagttttgttgtcagcagggtatatttattctgcttttagacagggcctaatagatacctgggaaaaagtctcaatactctcttctgcaatttgaacgagtgcttgttttcttcgacaattgatttatcccacttgtaatgttttattttggccaaattagagttgcattaagaaacattaaggtttgagtttggaaggttgtttttatctagaccagtgcttattcatttttttttctctaaataggggaggccgtggtggtggttacaaggaattagatgaacaagaattagaggaaacgaagagacgcaggcgtgaggctgaagaagtaagatatgcttttcctgaagagttctttgttttttgtttttttgttgcaattcggatgagctctcagttttttgtatattccatttgacttatacgtctaatatatttcaggatgatggtgaaatgtatgatgagtttgggaatctaaagaagaagtaccgtgttaaaacaaaccaagctgacaccagacctgctgttgctgctggtcgtgctgggtgggaagtcgaggaactaggtaagttctgtttaattttaactaatatgaactaaatctatgcaatcatcaaataggttgagcttatgaacagaacctttccactataatagagatttatttggctcgatctatatctactctctgtgtatagtcttcaaagaaagtttctgcttgtcatctagacacttgagtgaaacttaacatatatgcggggagggatttgtttgaaattttacattaagcttgcagctaacttgcctatagcccaagcctagtggggatctccaataaacagtgttgttccttgttagagttttcttcttttcactgaatagatatagaggaagatagaaaagaatgtttattgctgcttccccaaaaatagaaaggtcatgatccaatgtagttgttcataatttatatgaatgtggcaggtattgataaagatggaagagagagaagcagagacaggcaaagagaccgtggtagagatcatcactacgataaggatagacgcagaagcagaagccgagagagggaaagaggcaaggagcgtgactatgactatgaccatgatcgggacagagacagagactacggtcgcgaacgtggaagcaggtaccgtaactgagagattactcataagtgttagggtttagtttctcatctgttttgtcgacttacttttacaacggtatcattacaatgtcttcgccttttgtttacttattgtgtgaagtgaaactcattttggtttgaatcaatggctattgtttttcacttgttttggtctgattatgttctgagaatactccatgtttatcgtttcgaaaattggtaattatggcaaaacatggttagcgacgtcaattgctaatttagacgtgtattaagtattattttgtcttttgtagtattatttttagttgtccctttgtttttttttccatcgccaatcatttcatcgctgtatgattttaatgggaataaaaaaaatagaacaagaagatttttgtggacaatatagtttctgaaactataataggataagaaaaaattaagcttatttgtggggatatatattaatgtcatatcattgtcataaacatggtcggcaaaacttgggacggcagtttaccagaataatccggtcgacagaattcaacagttcctctctctaaaagatatgaaggagattaattttggctttgttagcaaagatggccggtcctcttctggcaaatccggcttttacaagcggttttggccggcttttatccttcctccgccgttcgatcggttgttcttaccgattgctttagtttctttttcagtttttctttcaataatttctaaagatttcaattggagattaattttaggtcataatagcctaagattaagttttcggatttgtatctttagaaagtttgatttgcagaattacctcaagtatgaaaggaagttttgtttccagcatattgggattgcctgtagccgtttctacatgtttatggagcttcgatcgatcaaatttgaggaatactcagatttttctttcctcattacctgtttttgccaaatctcttgattgatgattttggaattgaattctctgtttgtgtatcctcccttctctgtttagcagtttccggtgagaaaaaaacaaaaatcgatgtttgccctttttcgacgttgattgtgttcaccggatcggagtctttgacggcacaggatgacaggaacgtttcatcgcttctcttgcaacacgtgtcttgttatacgatcgtgttttgttaaagagatatccttcctttaaagaaatgtaactaagtggacctttgttgggctgtattctgtggatcattaataaacataatctttccagtgaaaaaaaaaaaaaaaaacatggtcggatatgggaaatacgatgaaaaaagctcgtcatggactcgcacttaaaacaggaaaatctttttcgtctagaccccacttattcacatgcactacgacataattccaaattcttttaaaaaaaaagaagaagttaatagaaagagtgaccaaagtacagtatatgatgatatttataacatacagttaaacttctataaattaatagtcgataaattaataacctttataaattaataaatttttccaatcccgaatttgtaccagtgtaaaaagtgacacaaatcgataaattaataagataataacttttttgaaagttctatgtaaatatatggtcccatcaatatcataaattaataattgtataaatatatcaattatatatatacattatatgtaggaatttttctgaaatataattctaatatttttttgcttaaatttgtatttatttttatttaaaatttagttctcgtattttactgtatcaaaaacttttggtgttgttttctaaacatgatattattgtttagttgtaattgattcttgaaagatattttctataatgaaaaaaatcctataattttttttgaaaagttactaaattaggaaaatctctctataaattaataaatattaatttatcgataaattaaaacctctctaaattaataaaattttgtagtcccaacattattaatttatagaggttttactgtatgttgtgtttagtaatgctgtattaatttttttagtgacctttcaaacactttgaagttttgatattcatgtttgagtttgaaaagctcatgtacaatatgaaccgaatacttgacagtgaaaaataattatcataatttcttaaaagtcaatccttctcaaagatataggaatcaaaattctacagcattcttttaaaaacaacataacaagacaaacaaaagaaatcaatttatgggaatttgagagactttggaatttatgtggttttattatactagctcaacataaactttgtcttacttacctctaatttctcaaacttagattcagtttatatatttttgtgcattttacaggtgtaaataaagccaaatgaaacactatatatatccactcatttacatgtgcccactataattattgctctattcaatccaagaaaaaaacacagaggaagaacagaaaaaagctcacaaagtcacaagacctcagtaggcttcctagttgttctatgaaatgtctcctctcaacgatcttaagatcaatctcaatggccaatacacattcttcctcaatcaggtaaagaaccaaacctaaaactcagttcaaaaaaccacagtcttgattatgctctgttcttaattctctatgtgctctgttttagaacgtgatttcaaagtactctggaagcttgaggaagatgattaaacagagcaaaaagaagagaaacaagaaaaagagaatcatcactatcgagattaatgattttccaggaggaccagatgggtttgagctggtttcaaggttctgttaccacaacggagaaatcttaatcgacgtctcaaacgtctcgactttgtactgctgctctgtttttctaggcatgtcggagaagttctgtttctctaatctcttccttcagacagagaagtttctagaagaagtgttctatgggtcttggagcgacatcgtttcgtgtctcaagaactgcgagcaagtgttcttccaagcagattcgtatggtcttgtagataaactcattttcgcagctttgaacaaaatctctcagaattcagacgatttttcttcttcttcgctttcttccttcgcctcttctctttctcctgagatggccaagaacacgtcagaatcagacggtaggtatatttcgcggtctgttgcttgcggaagaagcaacgagtggtggttcgaagatatgacaaatctttccccgaagatcatattgaagctagttatgatcattggagcttacaaaaccaacataaaaagcttagtcctaaccagatttcttctccattatctcaagacaaaactccaaaccaaatcaagaactaccactgagcttatgaggaacaagctcgagtactcagatttagctgacacagcggttagaggagtgatttccgcagggacacgtacgttttcttgcaggaaactcttctggattcttcgagttttatccagttttagcctaagtagagagtcaagaatcggtttagaaaccctaataggagaaatgctggaacaagcaacacttgatgatcttctgatatctgcaagaggaagcagagaaagtggtttctacaatgttgatcttgtgataagattactaaaagtatttgtgaagaacagagaagaagaagaagaagaatcaagagagaggaatatgaaagaaattgggaaattgattgataagtatttgagagaaatatctccagatcagaatttgaaagtccccaagtttcttggtgttgcagagagcttgccggattcagctagagattgctttgatggagtttacagagcaattgacatctatctacaggtcagttttttttttttgttaagttataagttttactattatttttttgtttttcttgaatttcttcaccaactaaatgattgagccaaaaatgttttttatcctgcaaaagtgagacacaaaatagagaataattttaattttctatatgtattggacatatagaagatgacaagtgccatacagatttcaataccatttgcttattaatacattttggctttatatatttattatgaagagttgaaatagagtcaactattcttttattcatcataaacataaaagatttgaagtttgagactttgggatataaagccaaactaagttttaatataaaaccgaaaatgtatcaaagaaaagatttgaagttttttgagattaacgtgtattaataatatacacacatggatgtatatatatgattaagaagatttggagtcatcctttagattcttcactctgtcttgttactgccgtggggttcatgtcagacccacaaggccacaacagtcttgactgtatgtttcttcttgtttttctctgtaatactattagtaaaaatatcttaaaaaggaataattctggtaaggtactatcagttacacttgaaatacatgtcaaagactaacaattattcatgtacttttctattcacatgttttactggaattaacaatagttcatcattttcaaaaattgtagaaataatgattattatgtcagtgtatgattgattcctttataatttctgttgttttgttattgtacagtctcatccgaatctaacaccccaagatcgaacagagatatgtcgatgtctcaactacaagaaactaacaatggagacgtgcaaacagctcgccagaaaccctaagatccctccagaaatcgccattgaagcactcaagtccagatgtgggaatcaagaacacacaacttcagatgttaaagttgcaaacaagagtttttcttgtagatattcagaagagaagaagaagcctgtagtattgcatctcgagataacagagaaattagccgagaggttgaagactaaaggaggatataatttgaaggttatggatagtttcagagaaggcttatgaggaaaatggtaaacgtcccaagtcatgattcagcagtcacatcttccaattcatctggcaatctcatttgcaccccaacagtgtcgagagtcttgtacaaatcatcagattcaaggggtttcttatcatcgaaagctatgaattcacaaagcttgcctttcacttcgatccaactaaatcctggcgatttcaccacctgttgatctttcatttgctttcttacccgagcgacttcatcccagttttgggattccgagtacaaattagccaagagagtgtatctcccactatgactaggttgcagcttgatcacacgggaggctgcgtatttacctaactcatagtctttgtgtaacaaacaagagccgaacagagctccccataccacatttgttggctccattggcattctttctatcaaagctttcgcctcttctagcaaaccttttcttccaaataaatcaaccatacacgcatagtgatccgcttttggctccatattgaaacgtcccttcatgctcaggaaaagccttcgaccctcttccacaagacctccatgagcgcaggcacttaagacagccatgaaagtaacttcatttggtgaaacatgactactcaacatggtataaaagagatcaaatgcatctctagcatatccgtgtgctgcaaatccattaatcatcgcggtccaagtatacacatttttctcatgaagtctctcaaaaacaagtatagcttcctctaaacacccgcacttgacataaagatcaatcaatgtagttccagctgtagtgtttatctcaatcgaattcttaatcatataacaatgcacccttcttcctcggtgaagtgccccgacatgagcgcacgccgaaagaacactgcttagagtcttctcattaggcgcaacatcactctttaacatctcctcgaaaaccaacatccctttatcgaagcaacggctttgcacatatccagcaatcaacgccgtccaagtaaccacgtttctgctaggcatttcatcgaacactttctgggcatcatcataacaactacatttcccatacatatctactagagaacttcctatgaacacatcgcatttcactctccctgtttctaagtaaagcccatgaacgcttctcccaaatcgaacatcttcaaccttccctgcagctttcaagacgctaacaacggtcatttcgttagccgcgactccagtcttcttcatctccacgaaatacaccattgcttccgaagcagaaccatttctcacaaacccatcaatcattgcagtccaagtaaccacgtccttatcttcagctccatcaaaaagacgacttgcaaaatcgaataacccagaactagaataacccgaaatcaacgaattcctgacaaaaggatccgaatccaacccgaatttaacgatatgagcatgaaactgaaacgggttcgagtctctcagtttgaaaaccgctttgagaagcggaggaaacgtgtggcggctagggatgacgccgtttcgccgcatatgacgataagcaagaaatgataaccgacggttgagagtaatcccgccggagaagtgaccaatgagcgaatcccatagttgaatgctcagagtttggagttgacataataaacgacgagcgtagcggaattgagttgcggcggtgcagcagcgacggagaagacgtgagagaaagagatcgcgacgagtatagaatatcggagaagttaggagtaagcaatggatctgcttgagatgaagaaagtgtaatggaagatcaagcaatgttttgagctcaatcatgtgaattgagaagtaagcaaaagagagagagagagggggtggttaatacttcaattcgaattttccagttttcagatttcagatttcaaaggaaccgaaccgaaccgacattaaaccaaaattcccattcaattgaatcgaagtgactctgaatatcagtcggtttagtttttatatattttttttaatagccgtagagggggagacgagggttcgatccacgtgtcaaacagtccagagaaaaaaacagaagtaagaagagaagaaaatgaacttcttcttctgcaatttttctaactttgttagcttctacagattttgctacgagccattggagaaactgttattgccctaaagatatgcgttatttttctccttcttcttcggatacgattcatagatgattccacaaacttcttcttcgaattttgatttccgattacctgttgatgtgtcttgcactctgctctgtccatgctctaatgagctccgcgcggttttttttacaaggagtcgggttctgcgtccgagcgtcaaaatttcgaactttaggtttatttcctgtggatttcgtgggaattcgaaaaacctaagattgacggattctagtagaaaggctgcaaataggtttgtaattgctaggtttacgaatgaatttgaagacgagggtagttcgaaagagtccaatgaccaagccaatttcagtaactttagggaagatccgatagtggataagcttaggacccagttaggtgtaatccatccacttccgtcaccgaccattaatcgtagtgtaattagtctattcgtcttcttctttttcgttggtgttgcttttgataagctatggacttggagaaagaggcaaagagaaacaggtggagatggaaaccaacgaggagtagggccatggccacaggttcccaccagcttctctttgttcctagagaaggatttgcaaaggaaagagtccgtggagtgggtcaacatggtgttagggaagctctggaaagtgtatagagcgggtattgagaattggctcgttggtttgttacagcctgtgattgatgacttgaaaaagcctgattatgtgcagagagttgagattaagcagttttctttaggggatgagccgttgtctgtcagaaatgttgagaggaagacatctcgccgtgccaatgacttgcagtacgtgtatacttgtttggtactaacaaagttttctgcgttgattaattgctgggattgctcttacttggtttcaattgtatattgttttgcaaccattgaatctcttgatgagatttatttggctttcatttcagttagagttcacgaaataatcttcatttgaagagtgacctttctttgagcatgatttatgtacataatttggggcattggctacttcaaactgtttatctgtggctcagttcgaggtttcttatcatgtcattctttcctgttataggtaccaaattggccttcggtatactggcggtgcacgcatgttgttaatgctctctttgaaattcggtgttatcccaatagttgttccagttggtgtccgagattttgacattgatggtgagctttgggtcaaactaagattaataccgacacaaccttgggtgggagctgtatcatgttcgtttgtatcacttccaaaggtcacatttcaacttgcagcattcagattgtttaatctaatgggtatgcgtttatcttggtcttctgatccattcccgtgatattgtttgtgttgcttccttcctatccaaaaaattaaacagacaagccttttttagtgaaatttgaaactggtgacgatataatggggaaaggttaagtcatcggcgattgttttagtgaagagagttttagctttcgcgttcgccgcaactcacacattttatttttcttttgtcatgaatggcatggattatgaattcaggaattcccgttctatcaatgtaagttctgttgtggctgttacttcacgattttttatattgaaaaactgtccatatcattgttcaatactacatggacttagtggatagaaagggccactttgcttgcttagatgatgttctgtattttatctaactgcaatgaacttttactaatttagcgagcatatagtgtaagatgctttggtgcattgttctggttagataccagtatttcattttgtttactgtggagtctttaagctcctcgacgttttgcaatagtgggttccttcttccctcctattattttacccagcatcgtctcttacaggttcttgaccaaactgctgactgtggatttgcctcgattatttgtccgaccgaagaaaattgtcttggactttcagaaaggaaaagctgttggacctgttttagaagacctgaaatcaggagaaatgcaggaaggcaataaggattttgtcggggaactatctgttactcttgttgacgcccagaaacttcgatacatgttttttggtaagctatagttcctttacatgtcagtgtttccttcatagttggaaaagtggaatagacagacaatctattgctgaagtatcagcctctttgtgcaagttcagtcgactttcttgggaataaagtagctatactaattgagtctattggtgagatgttttgttttcctcggtaattggtaacaggtaaaacggatccatatgcaattctcagattaggggatcaagttatccgtagtaaaaggaacagtcaaactactgtcattggggctcctggtcagccaatttggaatcaggtgaactgctttggatggttcattcacaatctggtggtgaattatgattatttaaggattgaaatgtaaatagataagtgtgtattctttaactttgcaggactttcaattccttgtttcaaatcctagagagcaagtattacaaattgaggtcaatgatcgtcttgggtttgctgatatggctattggtactggagaggtaaataatatttccttgggtacatatttttttttgtaatctgtagaataataggcgttgagtacgtattctgtggatctctttaatgattgcttgaggaatgttgcttaatatttatgttactgtctgcatagccttattatttagttatatgtccaggttgatctcagatttctgcaagatacggttcctacagacagaattgtggttttgcgtggtggttggagtttgtttggaaagggatctgcgggtgagatactgctacggcttacatacaaatcatatgtggaggaggaagaagatgacaagaccaatgtcaaagccattgatacttctgacgatgaaatgtctgattcagaagaacttggctcatttgtgcggaagggaaagctttcgtcagatgatattgatcaagagtcatttatgaacgtgttgtctgcattgattgtgagtgaggagtttcaaggcatagtttcatctgaagctagagacggtataattgatggtggtgactcacttggggcaccagtaccttctaagccagatactagtaaggggtctgaaagaaacgcagatgtatcaaatttggatttgttagttgcaaattctggtagaggagctggcggtgatggaggtataccgaggctcaatctcttacgatgatttcctttctatgctttcttgacctgaaactgtaaaacctcctaatttcaggattagcattactgtggttcggtattatcacgggtatattggttcttgttgctatcaacatggaaggctcaagtttcttcaacccgtagtatagtactatacatctcgctggagatttctgttgcaagtaagtctcttaatatatacctcgagaacttgaaatttcttcccctgatgtgattggacagacagattctctttttgtcagttgttttccttatattagaacgtggaacaacactggtttgttcatatagtcaagaaccaaacttgaacttcttttttcctagaataattatgctacttgaaacattaaaattgtagattctgttactctttctgctgcttgtagtgtaccgaaagtcaaaactggacatcaggctttgtatttgataaaattatgtgtgaattgaaaatgagtcagttgattcttctaccttgtgtgacatagttcagtccagatattttcatgtcaaccttttgcctaccgtgtgtgataagcttatcaaggcctctttattttgtggcaggtctggtggtcatctcttctcaaccttagatatggcttataacgaggtctcagttttgtaatttaattttgtatgtaaatagccattagaagagggactcttactaaaggcaggaaggtttggatctattctgtccaagctctcactgttgtgttactctttacacttgtggttgatatacagtacataaaaaaagatagaaacttttgtatattttgaccaaaaaaaaaagagaaaattctgacttttcggaaataaaatataatcatcgattgtttcaataggattggtagtaggagcagaacttggttcgtggaaccatccttcatttccattcccttatggtaagattgtggtatttcatgattctcaaataaagtttgacaaagatagactgatcgaaaaggtggagcctcttgttaacatgggacagattagttgtgtcgccgctgaattccatgatctcactgatggcagactcaataatggttatggtattgaatgaagctctcacgtccatgttctgttgaggcttacaagactgttctagttggtggggaagttgtccgaaccggaacataatccaaaccgaactgaattaaatttttaaaattaaaccgaactgtccgaccactacaaagttttttcgaatttgcacattaaattaattaatttttgtggcattttgcgatcagttaacgagtggatatgaggtagcaaacgtagaaaggactcgagaagtcatggcttctgcttaatctcctcttccttaaaaaccagaagatcctttgttccacgtttctcgtttgtagcttcttctctctcagaattcaattcgaattttgacaagtcttgacgaagaagaagaaacagagctgcttcaatggcttctaactcattactacgttcttcttcaaatttcttcttaggatcccatatcataatctcatctcccacccctaaaaccaccagaaaaccctctttccctttctccttcgtctcccgtgctaaataccaaatcactcgatcgtctcaagacgaaaattcgccaaatggtaaacccaattcgccattctcgtcgcaagtagccttagcagctattctactatcttcaatttcatcttcgccgctagctttagctgtagtggacgaaccagcttctccgtctgtcgttatagaatctcaagctgtgaagccatcgacgccatcgccattgttcattcagaacgagatacttaaggctcctagtcctaaatcatcggatctcccagaaggatcacagtggcgatacagcgagtttcttaacgctgtgaagaaagggaaagtcgagagagttagattcagcaaagatggttctgttgttcagcttactgccgtcgacaatcgccgtgcttcagtcatcgtccctaacgaccctgaccttattgatatcttggctatgaacggagttgatatatccgtctctgaaggagaatcctcaggcaatgacttgttcactgtcattggaaacttgattttcccgcttttggcctttggtggactcttcttgcttttcaggcgagctcagggaggccctggtggtggtcctggtggcttgggtggtcctatggatttcggacgttctaaatccaagttccaggaagtgcctgagactggtgtatcatttgcagatgttgctggggctgatcaagctaagttggagttacaggaagttgtggatttcttgaagaatcctgataagtacacagccttgggtgctaagattcctaaagggtgtttgcttgttggaccgcctggtacgggtaagacactcctggctagggcggtggctggggaagctggagtgccgttcttctcttgcgcggcctcggagttcgtagagctttttgtgggtgtgggtgcatcgagagttagggatttgttcgagaaggctaagtctaaagccccttgtattgtattcattgatgagattgacgctgtgggtaggcagagaggagctgggatgggaggaggaaatgatgagagagaacagactattaatcagctgttgacagagatggatggattttctggcaactctggtgtgatagttttggcagctacgaataggccggacgttcttgattcggctttgttgaggcctggaaggtttgatcgacaggtcacggtggataggcctgatgtggctggcagagtcaagattcttcaggttcttttcatagctgttttataaaggttactggtttgtctatggagttatgtgaatgattcttatttctctctatggggtttggttttattttaggttcattctagggggaaggcactcggtaaagatgtggactttgacaaggttgccagaaggacccctggtttcacgggtgctgacttacaaaacctgatgaatgaagcggcgattcttgcggctaggcgtgagcttaaggaaataagcaaggatgaaatctctgatgctcttgagaggatcattgctggacctgagaagaagaatgcagttgtctctgaagagaagaagagacttgttgcataccatggttagcattttatctaactatatgtaatggagtacgcagctgggattcttgttttctgaccacctcaaatgaattttaaatttacagaggctggtcatgctctagtgggtgctcttatgccagaatatgatccggttgcaaagatttctatcattcctcgtggccaagctggtgggctcactttttttgctccaagcgaagaaagacttgagtctggattgtacagtaggagctaccttgagaatcaaatggctgttgcacttggcggaaggttagttagtaatggcctccacgcctcgtcacaaaagccagtctttgaatatacagagaagggtttaattatgttaaaccatctctatctctgttgtgttggctatgtcagggttgcagaggaggtgatctttggggatgagaatgtgacgactggagcatcaaatgatttcatgcaggtgtctcgtgtggcacgtcaaatgattgagagatttgggttcagcaaaaagattggacaagttgctgttggtggccctggtggaaatcccttcatgggtcaacaagtatattgctttctcggtttcatcattagggttgttggttcgacaagttggagtgttacttatatatatccgtgaaatgtttttgcagatgtcatcacagaaagattactcaatggcaactgcggatattgtagatgctgaggtgcgagagttagttgagaaggcatacaagagagcaacggagatcataacaactcatattgatatcctacacaagcttgcacagctcctgatcgagaaagaaactgttgacggtgaagagttcatgagtctctttattgacggccaagctgagttgtatatttcttgattcctcaaagttgccattgcttagtgcttacaataccataagctaataagtatattcgtgttcatatgtgtcaccgattcagtactcaccaattcagtatatttgtgtatattccgttgttttagtgaatctaaatatactttgtaatgcaatgcaatttgtttaaagaaaagtaatttgatctggtttactgcggtttagatcgttggcccattttcttaaagactttcaacgtaaataacaatactaccatgtaaacatacgatgtcttaccacaataaatttacagggaagtaagttttcttaagactcaccactgactttggcgacaataactgaagcatagtgagcaatgttagcctcaggggattgtttaagccttgcaatgaccgggaacaactctgatgacttcacaaactgtctgcaaatctggtggttcgaacacattttagccaatgagaagagtgcaatcttgagcggtgactcactcgctgtctctttcttgcttgggttcaaggcaagagtcgagcaatccgcaactagcctcagtaacgtctgcacacaaaatcccaacatcatacgtgaaattagatacgagaaaaatccatgtatcttgacctaacaaaataatctgcagttgtactaacttgtaaagctcccttggagactatatcttcacagagtttgttggagtttcggacaaggttgctcaatgcaccagccgcgtttgcttttgtcttgtcttcttcagccgtggtcaaaacgtttgctagctgcgttatagatcttcttagctcttcatacagcgtgtcgttatggtaagccgcatttccaatctgcaaaaagaaagaaaaatgcaaaaggcctcttttaaaatttgatcagaagtatcatggaagtggagaataaaaaactgttttttgatgattttacagcaaaacaagcgaatttctgtgttcgtttgtccggatcagcgcatcgatcaatgaggagaccgatgatttgatgttccgcctgcacatagtaaccacgcagaccatgtaagaaagaacagtctgttatgaaaagtttgacctctcatagtaaaagaagcttagtgctgtaacttacaagagcgctgtagaaatatccattgtgtctgcacatattgccaagagcactacaagcttttgcacgtatatttggatccacatgggtaagatattctttcaaaggctgtaaaacagaagcctcgccgatgtatttataaaaagcctgtacggttaacaattgttccaaattagataacatcatttacttcactgtactgtgtctaagcataggtaacaaaaagaatgcatcgtacgtaattataaaacgcttaccttatccatcctcgatagatcagatatgatcatcaaaatatcaagtatgacttctcttggacttgattggttgagtaattttttcattctattaggatctaacagacctttgctcacgagatctacagcaagacgtggacgacccaccattttggcaagaaaagcaacgggccttactaaatcttttaattccaaatgatccaagcaacgtaggattaaactcggcactcccacctgaaaaaaaaatttaaaaaatacagcttgtaacaataacgagatttcagctcatgaatcatgagaggaaaacaaatagataccaatcaacattcaaacaaaagtatgtaaaaatcaaggaaacagaatcgacgaactaacctccaggaggactattatgtatttgtccatatcctcttctatagcttttagcaaatctctatcttccatgcatactctcacaccaggagagccaatgttgagaatgaatccactatttacagaagctgtggcagataacgaacctggttgactttgcagagcaacaaaaggaaatgctaggagatcaattatcacatttattgtctctctgaccccatcttttcctccccccggacctccccagctctttactagcttgatatgagcatcagatagtaaacaagtaattagcttcatggtttcgattttcacaagaacctgacggaaagttgtgccacccgaaagacagtggcatatggacgaaatagtccatacaacgccaataggggacaagccaatccggttggatgtcttcttgatgtcctctggggaagcatttgaaagtttgccagctaacagatttatgagaagcaatggcgtaccactagcaataagctgctgcacagctagaggtccaccccacttcaatctggattctaataaaccgatacatccatccagaagtccgtgccatttggcataattggcagaatgagagatgacttcaccttcattacttggcataggcctaagatgataacaaagcttagtagctcgaggaatcagagacaccactagctcagagacagaagatccagcagaagatcctttttcaagagcgagaatagatgcgagagcaagcatagctgaagcagagtgattctgaagagaagcttcgattttatcatctgaggcaatgtgattggctatagcagaaagacgatgttgatgcttctttggagaagttgtaagcattaacagaacagaatttctcccagttaacttcaaacattgagcaactgttgccaacataaggcatgaatggaacaccagattgtttagtctgccctcgaagttatctttttctcctgtttgctggtctttgcttgataatgttgcgtatgatagtatagaaaatatttctgaaataactgtaccatcctctccaccactgactacggtcgtaataggcagtgaactgggaagaccacaaagcatgctaggcagaattccattatgaaggcagcatcttgacaagagctggagcattacataagtagtttccagttaagtttaaagagcggaaaaaaaaaaacacaaattcaattatagctgtgaatccagagacaacccacaaattttttgttaagatagccacaaaagaagagaagcatcacataatcacctgaattgcagaaaccaatggagcctccactcgttggtgaaggcaatgaccaacagcaacttgcacatgctttgatcggagatatgctcttgtcactgtatcgacaagtttctcagataacggaccccactcactgtttcctatgtcatgctgagagagacggttctgcaaggcatctagaggtaatatgtttacatcatcgttcttgaagaatgtttcggaagtatctatgagaatccatattgctcgacaagcttcacaggcagctgctaacatttgcgaagagccggaagttaaactcgacccagaagaagccagacaaagacacaaatgatcaactatgcgagacatgttagcatgctccaaaatctgtttagaaacagaatcaggagttgaagatttaagatcttgggcaactcgagataacattgttgtgatgcaagaacaggcctcatatataattctaccagttccctcttcttcccatctaacgacctacatccacataaagtaaaaaattagtacatgtggtttaatctcacaagagacttatgcgccaaaaaagtcacctgtatgaagatttccactactttggtccagtgcctgatgtaagaactatgtatgttattgccttcaacatgccctaccaagtttttagtgactgaaagactctgataaagaaataagtcggtgttacaaatcattgaactttctttacttgttaattgtggaaagcaggctgactatcaaataaagtaggtatctaatccaacacatgacagacattttggtcaagaggattcacctttggtattatgttgttgaactcgggtgatttcatcccaacaagagcgtcagtaaagtctagcagtgcacatgttattttctcaatcagtccaactgaaactatggcacgagttgcaaccaaattggagatgatcctgagggactgaacagagcaagcaacatctttgtccctgcacacccatgaacgaaaatatgaatatgcatgtatgcggaaatatacaacaatttactggaagagagtaatagatcataaaaccagaaagttgcaaccgtgttttagagtctatcttatgtaagaaacctatttctgttcccgtttgtatgatcaagtaggagcacaacattatataataaaagaactccaaattttaccttttagaatctggcgattttgaaaatctttccagtgacagcaaaacaaggtccaatgctttatcattttcacctataacttgtgcacctttaacagtgcgggatgtattttccaatttgtccagtgttgggttacctgaaacggggaaaacaacccaagcatgaatgagaatgatatataggtccattatgaaagaaagcaaaagaaactccgaaggcagctaaggttcaatcacggatagcaaaatgtatgtgaatattccgacactaatcttttaagacatgaaaatttacaaaaggagaactgggtttatatatgaaatatacaaaacctgaagttcaaaaaaaaaaaaatccttatgtcataggagttgtgttaatctaaacaaacatcaagcatagcatgacagcgtagtaaaactcaagctctaagagttgtaaacctagaacaatagagcatactaactacacgctttgatgaaggagaaaaatgcatttggtcataaccaacaatgaaaggatgatatccgaatatatgtctgttagattgatatggaaatcatcatcagaaatatatctaaacatgcatttctcaaattactgtatctatctgttggataactcttttgattctcaaagtcccactacctgaactttttatctcctcttgggttgggaatcccacaaaatcctcagtgggtggagaatttactttgacagcactcttcatatctgactgaacgtcagctagaccttttgtagcagacatgtcctcaaccagggtcactgagtcgcacttttctgtgacatttaacactataaatttaataaaggagaaaattaattaagaaatagattctaaccacacactgaagagattcaaaccatttctctgttgccctccatttcctttgagcatccaagctgccttattgtcaactactgcagtatggatttcctgaataggcgttcaaaatgttcttagtgatctattattccaacaacatgttttaatttgagatccgttacattgcatgaaaaagacagttttaacaaaatgctctgtacattggactcaagctgcaaagtataagtcatcaatatcagaccattaccctggcttcaacttcttcttgtgtttctttaacgaaagggtgctcacgaagagcaggccaggttaatcgactgtggggttcctgtttcgcatagtaatagaaaaacagtttaacccagtccagcaatggtctcaaacatatcaataaatggtaaaaaggacaacttaaagaaaaaataaatatatcaccttgttgagcaatcctttcaaaaagctttcgaaataagtactcatttcatcaggatatttgacaggatccttgaagattcactaaaacgttagctcatactttaagcatagactatggaaaaataaaaaaatattgatataccttaacaatgtgacgaatgagagcatacacagaattggtgtagaagggaggctgacctacatataactcgtacctgatgtattacaagagattaattagaaccatatcaagtgcattgaaatgtggataacataaagaatacagaaaacaaaaaactatgaaagaaaagccatcagaatcatcacatttatagatgtaatagctttcataacaataacaattgaagtacgacaactcagatgagtttctccacctacaatataacaccaagagaccacaggtcgacagtgcgatcgtatggctgttctttcacaagctctggtgccatgtacagcggagtgcctgatgtgatattttggattaataacaaggagagacttattgatttattcactcattaatacgtctaaggaaattaaagatctttaacctttaatggatcgcaaaaccacagtgttggtggacatagctcgagcaaaaccaaaatcacatagctgaaaaatcaaaggggagacaagttagttgatggcaaagagaagttaaagaaatcatataatcaagccgcattgaaaatacttatgtttctacttatatttagctaagtgtatgagattcctggctagccgtatcctcttctagtactcacatgattaacttagttttctgaaataatcatagacggaaagatccatggttcataaatcaattttcaagaagttagcacgtaatctggtactcataagaagaggaaaaaagtagaagaatcgtattgtaacgataattctctcctaaattttatctttaagaaacaagaatatgaacaactcatgtgtgtgggaagcatagaaacagcatttcaaacttaattactggaagcagcaaaaggaatgttatattaccttaacgacagagccagcaccaataagaatgttttgtggcttcatgtcacggtgaattatacggttggaatgcaagtaatctaatgcttttacctggattttaaagaagtttcaaaattgtcttaataatcagatatagaaataagagccatgttggcaaaacgtgttaccaattgctttgcgattgcttgaacttgctcttcgggaaggcacttgtcatcttcaagaatctcaaacaattcaccctgtaaaattgggtgttccatggtgattctttatttcatataagtctagctatatgcttcataaatcagtactttagattctacaatctacagtgagaaaagtacttgggcaaactcagtgacgacacagaactctcgtgcgttttcaaaggagtcgagcatttcaatgatattctcatgcttgagcttccgcaatatctgaggcataaaagaaataatgttggtcaaataccataaaattgattgggattaaagttgatggtaagtgcaattaaggactgaaacttgctaacctcgatttcttgccttagactatgtatatccttgtcagtctttccttgtttcatgatgaacttcatcgccaccgtctgataaaaattaccaaattaagaattgattagctgattttaagtagccgatgataacaaagagaacaacccagcaacaatttacctggccggtatacttgcgtcttcctttgtaaaccctcccaaaagatccttcaccgacaagctctatcacatgataatcctcgacacccatatctgaacacgattggctttttttatctgtcaaataaagcaccgttttagcttcaaacggtaaaatgacggtacccagacccaaataagcagaattgagggagagtctactatattcagtctaattcgattaaaagctagtttctaaactagggttccgttccgatttcttgtttagcataagcaaaaagtagcgaatcgaaaaactggaaacatccaaattaagcttgaaatgcagatcctaaacctgattggcgagtaaacggggaaatcgaagatttgagatagtaaagaagaatattgaaccgtggctcacgaaaatgcgtaaaataggcgaagtggtggctgccggagatggtagaactgggaagtcggcgacgagaaacagcggaggaggtcttcggcggtgaaactaggagagatccgttggatcgatggttgaagagagagataaactctgcgtttggatattctcggaaacttttgaaattcaaaaagagggaaaaatctttgagtcagagtagtgtgtactctctctctctctctctcaaaccttataaaaaagtaaaaacaaaccacaagtcgtaatttccggtttattttaaaaacaaaagaactcaaaaatataaattatttatcattttccaaattggttcctaaaatattattttgattataaataaaatattgtttccactgttccacataaatcaccgattattattcataacattaaaaaaaaacttataactaatattataataattaacgtcaatttcaaattatgaaacaaactatatattttctaatcgtttcaaagtgacacctagcaatatctatacaaacgttttaagaaatgatactaacaaaaagaaatgatgttaagtgggtgattggttcgtcggtatgtagttatagatttattactataaaatttttgatgtaggtgtgatgactgtagtcgtagggtttattgttgtaaaaattaggatgtatattttattgatataatataattatttaaataaattagttgtagaaataagattttgatagtatgtattttaaataaaaaaatattattggtaaattatactttatataatattattcccaattatcaatgtgagttatatatgtcataaagtaggtatttacctactatttatatccatataactaaatttaatatatatatatatataaaatatagtaatatttttaaagaaaataaaaaaataaagtgaaaaaaaaaataaaaaaaatatagaccttctaaaaatcttaaagttatgctgtagaaaaacttgcacttacagccaaaataattaaaatatatatataaatatatagtatttggggtgtgagaaaaaaataggaaagttaaaacatgattgtttcaatattgattgtaggttttttagtggctttataaatcttttacatcccaaccaatcatgttctaagattgaattatagtgtcatttgaaaaaatgatactaaatattttttaccttcactagttttagtatctctttttaaaatgactctataattcgagcatcattttaaaaatgatattaagatttttttttaaactgatgttaaactcatcaattttgtagtgatatcattaagaaatcttaagcaaaaggaaatggtttcaaattcacaataaaataagcaaatttatatatctttaaaagatgacgaaacgttaacgtccatcaaccgaacagttaatttatgtttgctactattcgtttatttaatttaatttaaattttaattaaatttattatttatttcttatttacgattaattaaaaatgactaatatgataataatttatggatacggtagtttatacatttacccgtgcatgatatatatcaaacgattgtaaaacttcccaaccgccaaaatcatacttgcttgcacacgaaagcatattgcagacgtcttctctgctatatgcgtccgcgtttgctttaggcttgaagaagaaatgcaaagcacgtgcatgtaaacccccacctccaagtaaaatttttaatttgtttcggttactgtttctctcaaagatgtaacacctaaattgattcaacaagggttttaataggtttgatccgatgtttaatgtttttaaagtctctgttcgagattcttcttttggtgagaaagtggctacactttggattgatataataaagatgagcatatatagcctccaaaattttgtaggcatttcagaaatttttcggatcataggaggaacatgtatgtaccttttaagtctcatcattaataattctgtgtttcatatttttactgtgaaaatgagaatgactaacgattttatttatctgattttggcattaattaacttattcaaattgcttttcagttttcattgtgacattagttctttatgatcttatcatatgttttttttttctttgttcaggaccaaaccattacgtgataatgaagataaagcattgggaccggtggctagcatctttaaaagacgacgattacctcaagaatattgaagctatcaaactttatctagccgtcatgtcaatatatgtaagttcattatatataacttgtcatagaaatggcgtaacaaaagttccggaaatcactgtttatttgtttgtttgcaggagccggatttgttggatgaatatatgattgatgatgatttccatcccatgatctctcgtctcaaaaatgtaactttagatgtaacctcggctaggtttaaggaactatacattactgagaggtaagaaattctcagcttattatattctcgattcgctagaacaattcaggatttaacttagcctcgagtgaatattaggcaatccgtttgattaccatctgatttcaggatttaacttagtctcgagtgaatagcagagaagacttcttcaatcgaacattaggcaatccgtttgacgaacattagattatatgatttttgactttttcgcttgtaatttgatttactagttccttataattaagaaaacacttatggtggcttctaaggaattagtgttatgtgttttagccaattagaactaaaaaccataatttacataaacttttaatgaaactaagagattttgcatggccagtagtacaacttccaaggatctggtggtagttacctcttaaaagaaacttctactctttctgccatatgactgcgagatgtatcaatgtactcaatgttcttctccgaagttaagaagttaatgattcgatggatccgatagatttacccaaatcttttccaaaattattgtaatcttgtttttaccttttttttgtcaagattacatttgttttaggtactccaatatgtaagtccgaactttcatttatatgaatattaacattttagcaaaaaatgttaagaaaatctgagcttcattttgatgccttgaatcaataactttctttccaagttacaatgccctcttgccattttccgtttcgggagtattaaggaaattattaaacaatctccttttttccgataagaaaaatttctattttgttaacggaagaattggagtccttttctcttgtattttcctttcttcttgggttaagcctcctataaatatgtttacatctaagaacacgaaatataaacaaattttctttctacttgcaaaagatctagggttaaaattttagcaagatgaattatgctagagatgaactagacggggctatgatcatatcaaagactctaacaaagagtgacattgttggtaatgtggcattaccaaaagcgcaagtgatgtctgtcctcacgaggatgaatggtgtcacagatgagggtttggacaacggttttgaagtgcaagtccacgacataatggaagacgatctgtacacagttaccctgaaaagaattgacgacatgaagtattatttcgggactggttggagtactatgaagcattcattagatctcgtagaaggcgatgttcagaagctctattgggatcagtttgaaaacaaattcattgttctcaattttcagcataagactatgggaataatgattcctgtgtagcttgcttacatctatcttcctatatttagttgctttaattacttatgttttcgttttcatattttaattaagtgttggttttttgtttgacctaatttttatgttgtagttgttaaatctaatttaattgaaatatcttgaatttcaagagagcaagctgcatagctgtttcttttgttatatttcttgtcatctcttataattacaaaaaaaaaaaagtaacattgaatcgagtaaaatatatcacaatctcaaaaacattgaatcgagtaaaatatacactgaatctcaaaaatatataggattgaaacctttttcttcttagatcacacaatacgagtaatcatgaaagcaccaacgttagtgtgagagggaaataagttttgactgatcgagttgttggttctacacatgtgacttgtgtagggaattacggtaattcaattaccagaattttttcattggtagaaagcttttgatgcgttggtgtgttgaatatggcgttttgatagaaatagaactttatttcctctctttcttctctctcaggtttatacttattggttcagatagaccagaggaaaggttttgcttaacacacaagaaaacctatgtcagagaattccaagcatctttctcccccagatatcatgcacaatgaggcatatattccttttcaagagccgcaactcctctccaagctgtacatgttcgtcccgcaagttgagtattctctgattctcatcattgtagctgagattcagaaaatctcttaccaaacatgtctccgtctacagtcttgagaaacatatcccaagcaaacctatcgaaaatgacaccttactttttggtgatggaaaatctgtttggcgaaaatataaatcattcatcaacttggacgttatcttcacggaacttcctgcttaactcggagcttgaattattcatccattcaaatcgttgcatgttttattgtatcaattgatggtgttttttaaagttctttttaatttgtttgatgagaacataacagattatttgtttagtttatatagaggtgagtatttagaattctttttcttttaggattaataattaattgtaaaattaattctttattgtattttatataataaaatggtatattttttaaatccattattcatattctagtttaagtgttcggttttttctttctattaccctaatttctgttgtagtttttatttaattggaataccttgaatttcaagaaagcatgcatagaatgtttttgtttttttttgcttgtgtcgtctcttactattgcaacatatgcaattagcatgttcttacttccattgctactaactccatttgaaacatatgatttgatgttctcatatactctttgccactcgttccatgtacttatcattgccagaaatcctccaagaactgttatagctagaggtaaacctccacaccttacaattatctgcttcccaatctcctccattttcttaaccaacattggctctgcatatcaggtgaataagtgtgtcaagtatgatagtatatatgctgcagaaagattagagcctaatgattacctatattttctcttccagataatgaaattttctccaacagctcccaactctcttcacatgttagcttcaattgttgctcatgaagcacacccctgggatcagcatataaagcgaccaatgctgcatattgaggttagcttctcttttgttctcaagtttgtcaccattgtaaatgagcagctggaaaagaaacaactcttaagggatatgcggtacgcagttgctgcaactagggagttacttccgtcgttgatgaacgactactagttttctgtgtccaaatacttttctgaatcagttcatccgagatcttttttccttctgtaaaaataataatattttttcttctttttttgcagatttcttcttatatcacaagtattctctatggctagtctcttattatatgcatctattttgtctactgaagacataacttgcaacatttcttggagtttttggtcttgatcaagtatgttttttctgcctctctgtgattgaaactgtgttctttgaaaactggactcagattgattttagatgtgaatgactctaatcgaattagtactggttcttgttgatgtatctgactttcatttttaactttttatttcttacaggttcatccagttatcatctgtagctggatatgtgaagtgtcttcttgcgaacttatgtcttaactttgaaatactttgaataacgatgataatttggagtaatgatggtaatttgatcaaattgtgtttggctttttggtgtgtccatttgcagagatatattgctttttaataacgagaaaaatgttatttaataccctaattttcaaattataaccgttttatacgtcaactttatatatggtcattttaaacatgatgttatcgttgaccaccatttaaaccatgaatatttcgttgaccaggccaaaaaaaatagtcgttaacggattattcaactcccgttaacacctccgttaaccattctaaacgatgtcgttttcgttactataaatcatgttttacccttttataagcttttaaaatcccttgtaaatcattccaatgccacttacttatgcttaaaaaaacattgtaaaccatgctagccctttttaaaaatccttgtaaatcattttatgccacttacttatgctttaaaaacgatgataaatcatgttttacctttttataagcttttaaaatcccttgtaaatcattcaatgccacttacttatgctttaaaaacgattgtaaatcatgttttacccttttataagcttttaaaatcccttgtaaatcattcaatgccacttacttatgctttaaaaacgattgtaaatcatgttttacccttttataagcttttaaaatcccttgtaaatcattcaatgccacttacttatgcttaaaaaacgattgtaaaccatgctaaccttttttaaatcccttgtaaatcattttatgccacttacttatgctttaaaacgattgtaaatcatgttttacccttttataagttttcaaaatcccttgtaaatcattcaatgccacttacttatgcttaaaaaacgattgtaaatcttgtaaaactattgtaaaaagttttaaaatgatttacaaaggtttaaaaaggggttttaaagtatttacctatgtttttaaagactttataaagattttaagaggttttaaaatgatttacaagggtttttagcaattaccaaagattttaaaaaactttacaaggttttttaaaagagtttttaaaaaatttacaaggatttttaaaagcattttttttgctgggaaacaaaatttacgagaaaaaattttggcgggaaatttatttttggcgggatttttttttttttggcgggaaaaaaaggtttggaggtgttcttcaatgaataggggtgcttgatgaggcttgtattaaatggtagaagtccatggagaaatcgaagtgttcaaaatcggaggtgttcttcaatggaagctttactatggaaatgttttgtttcgttaaagatgaagaagaagaactttaagcgtatataagtatctgtgtttgtatagaatgacagagaaatctttgcaggtagagtggtcaaatgacctttgatttttctcaaatgataggggttcgaatcccaggtctgtcatttctttttaaagaaaaacgaaaacgacgtcgtttagaatggttaatggaggtgttaacgggagttgaataatccgttaacgactaatttttttggcctggtcaataaaatattcatggtttaaatggtgatcaacgataacttcatgtttaaaatgaccatatataaagttaacgtataaaactgtcataatttgaaagttgaggtattaaataacatttttcccttttaataactgtaaccaatatgtaacagaaatccatccaacccaatttgatcaatagcgtaaaaactcattattgttataaaattttaggtagtttacatcaaaataatatcattcattttttatactataaaaatagtatttagattaatatttaacaagaataagaataatttttatatatagatcatatcaatccacataataaaaagagaaaaactcaaatatgaaaaaaattcaagtaacaaaaatatattagaattacatttggttgattggaaaaaaaaaaattacgtgtaaaactatagtattatctgagaaacgaatacaaaaatttgcaacagtagcagcaaaacaaattcaaaacttgcggcaacgacaacagcaacaacaacaacgaaacaaacaataacatgcgaggcagtctcacggctagtggcagcaaacccaacagtttatctaaacgagaaccaaaatttactctcgttttttttttaatgttatcctttgatgaacaaaatgtattttccaaattttactttttttattttttaagtattatcccttaaaataatatatcttgcggaaaaggaatcggattaaataaattttaacggtagaaaataggataggaggagagagagaaggtcttttattggtttgaatgagattagtgaaggcagcttctcttctgatttcttcaaccaaacctccgtctagggttttttactcttcccatctccgccgcccttttttctctcacttccgtttttcttcctcttcgtcgacgtcttcctccgtcgcagtcatgccgggttccgaaccatcggagactcagtggccagcaaagagagtccgggatacttatgtcgatttcttcagaggcaaaggccacaagttctggccatcaagccccgttgttcctcataatgatcctactcttctcttcgctaacgctggtacgataacttcgattcctcatatctgtttttgccgataagattgggaatttgtccaagttgatctatggaattcagattctatagagttgacttattctgtcttcttttgtctttgaagctttgggacttattcaaatttctcaatttcagttttggtcgaaattttctgatattgatactgagctatgtaaattaagttctcttgatatgtctggcgaaaaatagaattattaatgacattgaaacttctctgtttttcaaggaatgaaccagtataagccaatatttttgggtacggccgatccaaatactgagcttagcaagctatctcgggcatgtaacacccaaaagtgtattcgtgctggtggaaagcataatgatttggatgatgtcggcaaagatacgtaccatcacaccttctttgaaatgcttggtaactggtcctttggagattatttcaagaaggaagctatcgaatgggcttgggagctcttaaccaaggtaattaaatacctgggaaatttgtctctgtttacttgatttaagaaaaatatacatggtattattcagtaaactattgtctccctcccttgggacggtatgtctcaattttgttaagtgattcttctcttttcatttggttgtacatttcagttttgtaaagtgattcttctcttttcatttggttgtacatttcagttagataccttgtgacagtatttcataattttgtaaagttactattctcttttcgttgaggttgtttatttcattgaggttgatacctccctgttttcatgcctcaggtctatgggctaccgactgatcgaatctacgctacatattttggcggtgatgagaaagctggccttcaacctgataatgaggctagggatatatggttgaaggttcttccatctggacgtgtgctgccatttggttgcaaagtatgtattgattatttaagataataacttttaatctgttacctaatttttttgaatccactactcattgatttcctctctcctgaggttacttcacaagtacttcagctaagttgcctttgtattgtcaccattgtttcttgtatatattgacacatctgtttgtcaatgctaacgacaaccaactgtaagcttgaatgcattttggctaggaatacgctatcatgtttggtagttggcaggctttaaaaaccattgtttatgatttacagtcaaaatcttgtacaaaatgtaaaacttaagggtttttaaatgctgtttttctttcatttaacttttgattaaactgcaggacaatttctgggaaatgggcgacacaggtccgtgtggaccttgtactgaaatacattatgatcgcattggtaaccgtgatgctgcatccttagttaacaatgacgatccaacatgtttagaaatatggaatcttgtctttattcaggtacaaaccctctctgtcccaattgttatttagttccattttactaatctttatctcaatatcacaattgttttaatgattttgtagattgtgttactgaaaactctatattgtgcagttagctagattgttattgctcctttagctgtgctatcatattcccaattgtttcctctgactgggatgttacttatgtcttcaaaatagttcaaccgagaaagtgatggctcgctaaaacctctgcctgctaagcatgttgataccgggatgggcttcgagaggttgacttctgttcttcaaaacaaaatgagcaactatgatacagatgtgttcatgcctatctttgatgacatccaaaaggtaatttgtgaaaacttctgttgatggtttcatgacagctgtttaatgatggtttcattgagttatttttgtttggcctcctcttagggacgcatttgtcaccttaattagtactatcatcattttagttcatcaattttgaagtggatcatgggttctatgctttacgtcgagactccgtcaattgtttttgaatatttctggtttattgaatttggatttcatgataaaggcattctactatgggtatcctggagattattcgttgttagctgtgtcacttttcatgtatttttcttagtgagaggattgaaaaaatcttcaaattgctctgtttaccctagttgttgcgaatcttaagtttaggtgttgatgctttcacttttttaggcaacgggagctaggccatattctggaaaagttggtccggaagatgttgacagagttgacatggcatatagagtggttgctgatcatattagaaccctatcatttgcaattgcggatggctctcgtcctggtatatacttggtttcttgtctcaatcacaattgtggtggttacagaaaatacaatcgtcttagtattcaatcatttatttgagttcatacttatatgttctcagaaaaagtgtttttggttcatttattctaagttgggcatgatgagtttgtcaattttcttcctcagacaatctgttatgttatacaaatagaggtttgttatttcttgtagtctaacaagtaccaattaatatactatctcttgcaggtaatgagggccgtgagtatgttctgcggcgtattcttcgtcgagcggttcgctatggaaaggagatcctaaaagctgaagaaggatttttcaacgggtaggaaattatgtttgattttcgttgcatgttttgtttgaatattgtttcaaatattgtttcgttgtagctggaacgtttatttctgtcttgtatctttataaatgagcatatttttttgacacatgttttatctcgggctttcatattacctgtaggcttgtaagttctgtcattcgggtgatgggcgatgtctttacagagttgaaggaacatgagaaaaagatcacagatataattaaagaagaggaagcaagcttttgcaagaccttggcaaaggtaagggctggatttaatttccgtcaaagctttgaacctcttatcttattttgttttgggttcttctggctcgtcgcactgaagtaaaagagacagttcacagcttcaatcagtggcatgtgatatttctgtatagattgtttccaatttcatcattgttcagttttaatgatggttagacataattatagtattttctatagggaatcttttttctgaaagatgaattggctttacctggtcgttcctcccttttttatgtgaataggtggtgagtataagaacagttagactgattataaattttcacggcagggaattgagaaatttcggaaagctggacaggcggttcaggggaatacactgagtggagatgtacgtatcgaatcatttttgtgatgtatgttaggcgttgcagtattttcatctgggatgtttgaattctatctcaacatgttgtcttctctttgcaggatgcttttatcttatgggatacatatggtttcccgttagatttaactcaggtacgtaagtcatttatacttatttctgaatgttcgtgttattttctaacttttattctcggggttcagttgatggctgaagaaagagggttactggttgatgttgatggtttcaacaaagccatggaagaggcgagggaaagatcgagaagtgcccagaataaggtgtttcaactttcctcttgtttactttcttaaagagcgtttaatgccaaacttacgtgtgactatgaacgaagtttgcaatcacatcatctattaaccaatcttttaatgtcatttttttatagcaagctggtggtgccattgttatggatgctgatgctacatcaacattgcacaaggctggtgtttcagcaacagatgattcttttaaatacatttggttccaggtttgtccttttattccagaaaacttgcatgttgcacctgaaatgttcttatgttggcgtagaaatgaagaagttagggcatataatagtaaatggattttgctttaaagaaacctttattggtactctgccacatatcgctgcaggaccacgagagtgaactaaaggcaatctatactggctctactttcctagaaagttcagctgctagtgataacgtgggactagtattggggtctacaagcttctatgctgagcagggtggtcaggtaatccattttatttgatatgtattttagtttgctaattgtttttcatttctgatcatatgactggtggcatgaaattgcagtcttcagtatgttcatcttggatttgtatatatatacaaatgtagacatggcagtaacaccatgaacacaatcatatcagaactgcattgtttgaatttatgtatcggctggcaaataccatgatatagttattgttggttttgcatactaatttctgaagttgtcgttgacagtcacataaatatttttagatttcatatccatgaacaaggttaagcttttgattcacttccaatcatctatatgtatataaactctgtgcctctaacattttttctctggcaatagatttttgacactggacttatagaaggctcgtttgggacattcaatgtatgcaatgtacaaatatttgggggctttgttcttcacattggttatctctctaaagaaactggagaggtatctgtgggtgataaagtgatttgcaaggtaactctctgcatcaaacagtgtttgtctcattcaccatatttggtactatccaatttgtttccaccttcgttttcatgcgtataggttgactatgagaggcgtaaactcatcgctcctaatcatacttgcacacatatgttgaattatgccctgaaggtatcccttttctataatttaagtaacctaaactgtgattttctaattttttctattggatctgaaaatattcatgtcccatgaattcaggaagtgctcggggatcatattgatcagaagggatcaattgttcttcctgaaaaactgcgatttgatttttctcatggtacatttttgaataaagtcatttttattttgatgtggatggtcatcttaattgtctgatgggttccataatttcgagtaggcaagccggttgatcctgaagatttgagaaggatcgaatccatagtgaataaacagatcaaggatgaattagatgtgttttccaaggaagctgtgctttctgaagccaagcgcatcaaaggtctaagagcagtgtttggagaagtaagctgtccatcagttctgtagctatacctttttagtttggtttctaagaattgttaaagcgttctctcttactctttttaggtctaccccgatcccgtcagagtggtgtcaattgggaggaaggttgaggatctcttggctgatcctgaaaacaatgaatggtcattgctttcttccgagttttgtggaggtctgtttccattggcattagctattgggaccaagatattacgttctgaatagaatgttgagtatagggttattttgacaattccaggaacccacataacaaacacccgcgaagccaaagcatttgctcttctatcggaggagggaattgctaaaggtattcgtagggtaactgctgtgactactgaatgtgcttttgatgcattgaatgcggcgtccttacttgaaagagaagtagaggatgcctccagagcggagggaagtgcattggaaaaggttttctccctctctttgtcaaactattgacaaaatgaagacgatgtcgttacttggattcacgtaaaacttattgtgtttgtatttgcacattcacagaaagtttctgctttgaaaagccgagtagatgcagcaattatcccagcagctaaaaaggcagatattaggactaagattgcttcgcttcaggttataagctctttcagccttacagtcagcagctttgtctagatttccctgtaattttgtaatcaaagcaattctgaagtggcaattattgttttcctaacttcgcagaatgaagtaagaaaagctcagaagaaaatagcggaacaaaacctgaaaaaatctgtcaaattagcaacagaggcagctgagtccgcagcatcagatgggaagactttctgcataatccagctggatgtgggtcttgatgcagcagctgtgcgagaggccgtttcaaaagtcatggaaaagaaggtaatccgtattttcttacatcatcacttgtaccataacctgttcatagatagcaagaaagttaaattaacgtttccgtttgattaaccttgcagggtatgtcgataatggtgttcagcacagatgaaagcacaaacaaggcggttgtgtgtgcaggagtgccagaaaaatcagaccagtttaagccgttagacgtcactgaatggttgacaactgcattgggtcctctaaaaggaaggtgcgggaaagggaaaggtggtcttgcatcagggcaggtatgagtcctattctctttagtctacaatgtgatagtatcatctacaaagagatgttaaatcttcaacatgttgttttggttttagggaacggatgcttctcaagtgcaggcggctttggatatggcttcatcatttgcatcaatgaagctcaactgatttggtcgggaggttacataatctgtgaggtcagaataacctctacttaatttgctttcattgtacaccgttttacacatgttttaagaatctgttaaatttctctgttcttgtgatggaatttgtggtatcacactcttttagtcaaagttaccaatggctgttataatcccttgtgaaatgatcctttcccgtttgcgttgaaatggttatttaaaaaaaaaaaataggatttggtatggactggtcggctttagttaccaaaagcataaaactgaattgatttacctaagttcctttaaatttgttttggattgactgaaaatgaattgcacatttctgaaaacagtgatatatatgttactagtagataaaaaactaaatcctaaaatcctagactaaaatatagagaaataatttcaaaagacaaaaacgtttcaattcaataactcataagaaaataacgaaaaagtgtaattgggacagcaatagtaactcaagttggcagatacgagttagctcctgcctttattatatagctggctgaaaaataatcattacaaagtgggtaaggaagtctatctctatctctaaagcaagagaattcatagttgagagattctacagccatggacggaagcaaaagtaagcccttgtgtcgtatgtctgatctagcaaagcctcacaaacttggccgacgatttgatccaccgctcaccgtttgcatctcctgcaaaggccaacaatacactgggaataggcgtgggtactattactattgtgctacttgtgatttggaattccacaaaggttgttacttgtttcctccagaaatcaaacaccctttccacctcatccaccctctcaccctcaccttcttagatcataatcttgttagctctgcgatccctgaaatttggtttctgttaagcacggaatatccatacaagcatatgtttggagatgaagaagaatgtgcttcagatgggaatcataaaagatgcaactcttgtcggaaaaagatcacataccgcgacccagactatccttcgttttttgatataacatattatcattgttctatctgcaatttcagtctacactcttcttgcgtaaaggattcaccacctcatactattgaaaacctaaaaagccatgaacacactcttaccctctttcctagactactccctttgccctgtgatgcttgtggtttttcacttgacgctcgcaatgattcagtttactcttgtttgctttgtaactacatggtacacagaagatgtatctacttacctcgtgtcattaagatcacccgtcaccagcattgactctctcacacttcctcagttgctgttccttctggtgatgagctctcttgtggtgtttgtcgcaaactcgttgacgtcaactacgggcaatacgcttgcaaaaagggatgccactatgctgtccattcgaaatgtgcaacaaagaatgaagtgtgggatggtaaagatcttgatggagtgcctgaggaagaagaagaagagattgagccattcgtgaggattgacgaagagacaatacaacatttcagtcatgaccatcactatctaaagattcatcatgggaatgacaaccatgaaaacaagttttgccaagcttgcatccttcggataacagtttcggatagcttctatagctgtgtacaatgcgattttgtcatccacgaaacatgtgcaggccttcctcgcataaaacaccatccactacacaaacacccgctcaccctctaccatttacactatcctcatctcaacgaggtccagtctaaatactatgacctaggtttcttcgcgtgtagtggttgtagccgagaatgttgtggtttcatgtacaagtgttgtgaaaaggattgtgactttcaactagatgcaaggtgtgcttcgcttcctgatcctataatccatgactgccatccacatgatcaccctctcttcttcaatttgaccgaaggtgaatgcatggtttgtaagattacatccggattaagaaagtacttagaatgtattgaatgcaggtccttttcgtgtcttacttgtgctactatgcctctggtggctcactacaagtacgataaacatccactcactctttgctgtggagaagaaaagacaaaagatctccagtattggtgcgagatttgtgaatcagaaatagatgcacaaaagtggttctacacatgcagctattgttctgtcactcttcatgttacatgtttactgggagataaggtctacatgaagccaaaccatatgatcaagatgtacgaaggtgcaaaaacaagtattggtattgtacccaacagtggtaactctagaccaatgtgtgatggatgtagaagccgttgtgtggacactttggtagtcaagacgtctgggaaaaactattgtactatcatgtgtttcttcgatatatattatccatggtaggacttctccaatggaaatataggctgaagcagcgatgtagtgttgaatttaaacttcggttttaaattaagaaaacacttatggtggcttctaaggaattagagctaaaaccataatttacatagaactttgaatgaaactaagagattttgcatggccagtagtatagcctccaaggatctgatggtagttacctcttggaaggaacttctactctttttctaccatatgactgcaaaatgtatcaatgttcttttctgaagttaagaaaatctcagcttcattttgatgccttgaatcaataactttcttcccaagttacaatgccctcttcccatttttcgtttcgggagtattaaggaaattacttaacaatctccttttttccgataagaacaatttctgttttgttaatggaagagttggagtccttttctcttgtattttcctttcttcttgggttaagcctcctataaatatgttttgcatctaagaacacaagacataaacaatttttctttctacttgcaaaagatctagggttaaaattttagcaagatgaattatgctagagatgaactagacggggctatgatcatatcaaagactctaacaaagagtgacattgttggtaatgtggcattaccaaaagcgcaagtgatgtctgtcctcacgaggatgaatggtgtcacagatgagggtttggacaacggttttgaagtgtaagtccacgacataatggaagacgatctatacacagttaccctgaaaagaattgacgacatgaagtattatttcgggactggttggagtactatgaaacattcattagatctcgtagaaggcgatgttctgaaactctattgggatcagtttgaaaacaaattcattgttctcaattttcagcataagactatgggaataatgattcctgtgtagcttgcttacatctatctccctttccgctttcctatatttagtcgctttagttacttatgatttcgatttcatattctagtttaagtgttcgttttttcttctttctattgccctaatttttattgtagtgtttattttatctaatttagttggaatgccttgaatttcaagaaagcatgcatacatgtttgttttttcttacttgcgtcgtctcttactattccaataactaaaagtagcagaaccaagtaaaatatatcataatctcaaagacgacgcaaatactcgtcggataagaaaaacagaaagtgtcaattagagaaaaactatcaaaagtcaaaagcttttgtatcatcttctcccaagagtataaaaccgttattaagattgacacctttcttcgttgatcacatgctacgagcaatcatgaaagcactggtattggtctgagaaggaaactaaatgtgactgatcgggtggttctacacatgtgacgactcttgtgtagggaattacaattaccataagtattcattccttgggtgcatttgatgcgtgcgttaggtatgacgtctatacatgaaacataccaataccagtacacttactttatgggaaggaatgttgaattcaatgatttgaggtcttgagacatagaagaaacttgtggttgttcaatggatagtactttttgattcggatagggcagaggaaaggttttgcttataacctaatggtttccattttacttgagagaatttaaaattgaaacaaagaacgtcttatttaggagactacaccgatatcaaacttttatgtttttaacctgaaaggggaaaatctttaacaagatcatatacacctgtaacacccaaattcttaaagttcacagttctcaaaaacaacacaaggcacatgttgaaccttgtagaaatcttcaccaccagagattagcttgtccttaaatgcctttgtcctgttcccaatctctacttcttgtagattttttaggaatctcgttccttcaggaactgacttcagtttgttacaacactttagctccacggtgacaagacgcatcatggcaccgtcttctacagtccactcctctagattctctagattcttggaacaacaaagcttactacctacaaatgatccttcaaacagttggagaatcttcaagtttggaagcttctcgagaaccataaacgggtcatccactaatccgcattgccacaaacgtagagcaccaagatcagaggagaaactctgttctcctgggagtttttctagtttaaggaacagttccagttcacagagattagtaaatgcagagaccaactgtgttacatctactggtggaagcataggttcgcatggaacgtttattgtcaagccacggagacgtttcaagactttacttagtgaagacaccaccacgaagtctgtgttctgcgaagaaagattgatagacaatcttctaagacttgtcattgctaaaagatcccttggattgcactttccaacaggaaaatcccagagttgctgcaagtttcttagagtactcaagtccagctttgttttgggatcaagatctgaaggcatacacaaatgtctcagccgatgcagcttccattacacgtttggaatatacagttgccctttcacgaacaagtctagagtaatcatcaactttaagtttccaatagatgatgtaagttccttcacgtttgtcaatctcacgctcaggttcctcaaatggatgagatctcctacatcgtctggcaacttccctccctcgatttgagctccctcaagatctagaactcgaagaagtttcatctttctgaaggaaaccttacccaaaagtgcccatgaacttccttgattctttataattcacacaagagatctagatcgaggatttatgtagttcacctgcgacagactcttgatatggtgctcctctgctccaccatgtagttggacagaaattctacgagatgtattggtcgaaagagatataaaagcctcagcttcatcttgatcccttgaatcaataacttgcacaaagctttcttgctttgccttctgtaaacacacctccctcatgaggtcatgcatacggcatgtcatgacttccgaagttacaatgtccctcctcccaaccataaccatgcttctctttactaattcctcaagataatcttgcccgacatcttccactgtcgtgccagcctctgtgtgttttacaggcataaccattccctctgcgatgcaataactaactagtgttcccacatgaacctcatagtcttcaggataatgagcaaagtagaggaaacattgctttacatggggaggcaagtactcgtaactcaagcacaaaacatctgcaactagcatgttcttacttccattgctactacctccatttgaaacatatgatttgatgttctcgcatactctttgccactcgttccatgtacttttcgttgccagaagtcctccaagaactgttatagctagaggtaaacctccacaccttacaactatctgcttcccaatctcctccattttcttgaccaacattggctctgcatatcaggtgaataagtgtgtgaagtatgatagtatatatgctgcagaaagaatagagccaaatgattacctatattttctcttccagataatgaaattttctccaacagctcccaactctcttcacatgttagcaattgtggctcatgaagcacacccctgggatcagcatataaagcgacttccttgttccgagtagtgaggattatttcgcttcctacagtagatactactagcctataaaaatgacaaggattatagaacattagttgtatcttaacactactagtttacctgtttcatgtggaaagacgtgtttcagacaatcccaagcatctttgccccagatatcatcaagcacaatgaggcatttattccttttcaagaaccgatgcaactcctctccaagttgttcatccctcaagctgagtattctctgattttcatccttgtagctgagattcagaaaaatgtcttgccaaacatgtctccgtctacagtcttgagaaacatatacccaagcaaatctatcgaaatgacgcctcactttatggtgatggaaaatctgtttggctaaagttgttttccccaaaccacccattccgcagatggacgtgactcttagtttctcacctccggaaactaaatcattcaccaacttctctagactctgctctaacccaacaagattatgctcaacaacatatggaaacgattgcctctgttctcttagactatcagacaaactcaaaccttctctgcccatagattcttttataccaaaatctagcatgcttgctgctatcttagaaagcctggaggtgatctctctaatctctgagccaacactatgaagtgaaaccgcttcgttcaagatgcaagcaagcctcctaagcacccttttcatccctttttgtttccttgattctgctttgaggaaaaatgcctcgaggatatcctctgcatcataagaagcttctctaatgcctgcaacccagttacgcactctctcgctttcatgctgcttctcatctgcatctttcaaaaagcaattcaaacgcttcaattcgtcttgcagctgcttcacttggtcacctataccaaataagaacaacggttcttccaagagcaactgtcctagcttctgcactgtaacagaaacaatagcctctgccatttcgtgttctagtgactctcccaaatctctacctcctacactagaaaagagtcaactacgcactaccttcatgaaacatgactccaagtcaacgcaatcataacactctttgtccctttctgaattattcaactctcagcatcatgtgaacataattagatggtacagctaccaaacgacttcttgaaatgctcttttgtgctggtccatgaaataccacatccacatattcattcatcagaatttggtgggagacattcaaaagtctttgctatctcctacaaccacacgttttccctcttatctttacctgcagaagttacaataaggaaaaatggtctctgccttgtggttcaacaaatgcaatgcacgaaacccaataagaaaagaaaaaggaggccagaaaaagcatcgagagaaacttctattttttttataaccatgaaacattgctgatatacgatacatcaaatttcaatttcttaatttgttgataagagggagagacaacatttaacagacagcttttattatattatcgtagtctttcaaattggtctgcaataagaagaaaagaacataaatctcaaaactcccttgttgaaacataggacgcgtactaaatgatgagtatgaacaatatactatgcctcctttttttcccgcatccgaaggttagagaagatgagcagatatacaaaaacgttcttacatgtacacctaagaactattgtagagcttgcacttatttgttccagcacaaacaagacactcgtcagcatcaccttcaacatggctcaagcaatgttggattctgtcatttacaacgtcctgcagaaagaaatattagtagattactgaaagatcaagagccaaaagaagaacagatctcttgtgaagattaaacagcagaagatccctaatgcatgaggatgctctcattggaagttcaagggaaaaaagtggcattcactaatgcatgaggatgctctcacatcccttaggtttaaagtgctcgctcgttttggggggaaaatatgctttataacttaccaggaggagattatgggggccgagaggtgcagttatgaggtatgagatgccagagaactcctttgcagcatcagccgtcaacgagggaatgtcctgaatcaaataagggtcatgatctcactaggccattaatgtacatcctccaataatcccataaataagaaaagctagaagcttcaagaaaacaaaacaaattgagatgaacaaagccataccgtatgccaatgtcttccaggaaatagaaaaaacgggctcacaactacacgtttcgccccttgttgtacacacaaactgaatgcatcttttatagatggctcagccaattcctgatgtaaagtgtaaaaatcagcaaacagcaagcagagcttgaaagtcatctaatttcctgatatagaacatattaagctaaatgcaaaagatgaccaagaaacggaaatcagactgtatcaaactcatgggtatggttctcactatgcataaaggtgagaacattagaaagagttaccatatgagcaggctctacaattgggtaaccagttttttctttgaacattttcacaaactcctctgaaatacagaaacaacaacacaattacataaactcgcacaaggtaaagccgtaaaggaagtatactatacaataaagtaaggacaacaaagaaaatgaagaaggagaaggaagagaaacaaagctattaccaagcataagattggattcacggcgacgagaaccgtgatcaacaattataatcccatcagcatcaccaatcccatttttgaccaacccttcgctctccccaaaacatggtgatcctcttctcctccttcctcgttggagttgaaatttctcaactttaaaggaaactggtaatgcccatgagcgatttgttcgtgtaatttgacaagaagaaggtgaaacacgattattcgctctgagattactacaaaaacaaatcgacaaaaaaaaaatcattcagaagaaagcaacacaacagaagaaagcgatagaaggggtatagaggaaaggaagatgaacctttgggaggcgaggcctccgtaagagaggttcactaagaactgcgactgagtcgtcatcttcgccgccaattgactgttaatttttttttttttttgccggcattgactgttaaattaatttgtcggaacggactcgatcccgaaaaattgaaatcgggagagtgaagaaaaacattcattaatatctcaccgaaccggtcggtcggaccagtcaacccgggacccgattattatttcaggccggctttgtttgtttttttaaaattaaaaggggctttatcattaatgggccatcccacaattgggcttttgaccgagaacatacaaccaaataacacgtacaaaagaaccactcctttttacatgatggagaacacaataatgtgataaaattatgacagttcactgcatgtgactctagtgtgtgacctcttagatgtttggattaaaaccagagatttttttttttatcgacttttttcaattaatcaagtcaagagtgattacaatgtaaggctgatacaatgaaaggtggaacataatagtgatattgaaacgaacaattatctggtagccgatgttttgcaagaagatccgctggtccattgtttgttcttgacacccatgtgacatctgctgcctcaaatcgttgtcgccatttcatagcgtctcttgtccagttgcagcagccaaagttgatctttttgttgttcattagctctacgactgtaaaaattaaaattaaaaccagagatttctctcaaaatatccattgaaattcaaatagaggatgaagcctgaaaatgtccaattttcttattaaacaactaaatggctcactaatttttctatatgttaatttagttccaaatatttagtaccaaaaatgatgctactgataaaaatagttagaagttttattttaaaatagtactatgtgagaatccgttctagacaataaatttatcactttaattttataaatagtttgatttgtataaatattatatagtggttgtactttgtttcataatatgttttaaacatatcttgggatattataattgatttgttatttgagtggccaatctttcaattgttagtccaatggtgcaaatagttgtctcaaactaagaagttgaaagagttgaaaaatcattcatatcattttttaccattgagatgaataagttggaaaaatcattcaaccaaaatttttggaaaataaactaattacaaaggaaatttgttcaacttaattatctactatttcgtagaggaatgagttgaataatgttcaatttttttattattcaattcaaaattttcctatcgttacaaccctttgcagttgaagtgtgtaattgttactcaaaccagacacaagtatctaccatatatcttgcctgagtagatctttgttgatgactaggttcaattttgaatgtcacattttattatgttatgcccaatccaaatttctcataaagataaaacaaagtttagattctcagattacaagagagagataaaataaaatttgtaagtttaaaccaaaacttaatgaaatctttaaattttctaataccaaaaacacatgtaaactaaccattgagacaaatatatatacccttgtaggtttgacaacaattcttcgcgagttcgagatctctgcgagtgataccgcttggtcgatccataaagttattgagaaccaaatcatcatctagtttgatgaaatcttccacttgttagtgacattcattgtattaggatcaagccaaactaaaccaaattctaaaatttgatgtccctcgaactccaacagaatgaaagtaatctggtttatgctcattgttttagatctaagcacaaatagcaacaaacccaaaagtaatgaaggccagaggtgagtttattaataatgttttgtattattaaaattaaactcttcaatttgcgaaaaaatctataatacaacatgacaaatttaaatattgaaaatcaacttaaaatttgttattatctatatgcatatttcactaaagttaaatctaagataatagatttacggtaattgtgaacgtgatttagcagttatacaacatccaaatagattaggtgaataaaagaagtaagtacaattgtaaattgaagtttcacttttaaataatttgataaattagtgattactatgaattaataaatttttcggtctcaagttgtcgagtgtaatatttaacataaaataataatttgtttgaaaattctatgtaactatatggtccatcagtatcataaattaataattgtataaacttatcaatatatattattaatttatagaagttttacttttatttgacgaaattcatttgattttggtcttttgaaataaaatataggaaatcgtgaaagagacaatccagcttagttgtattgaatttgcgatgagttgatttctcgtcattggtaatcttttactattttagtatttttacggttttagatggattaaaactttaatcactttattattatcgtgagatttcatattttgtaaaacatgataatgattatttttagttttacatttataaaactatgtaatctctataaatattaaatacattacataaattttaatcagttaatctgtagtcgaatccagagttaatgacccaataagtagtccgtttcagtgtccatatcatgtttaaaaccattacagaaactaactgctaagctagcattacatcttgtttcagctagcaacattacatcaagtaaccattacagaaaccatacaatagtagtggtagtaactcttagcaaaaaaagatggtttacataggctgctgacccaaaataagatttggtaggcttaaaggtcgtgcctagatttttaatgggcccatttgaaagtgaaaacaagatgggctaaaaggtaagacgccaaagcctagagttcgaaacctacgacaatcggtctctctctctctctcgcgagtcgcgagtcgcgagtttctctcatcttcttcttcctccaagtctgaacatattaacatggaatgagcaaaactaatattgtccgtatctgttagcttaaattaggtaacgaatcacgagaatacctagaaattctttcttaattttacttgaattaggtgttttcatggagattcattatgcagctaaggttcattttttgtcattgataaacacagatttctgaaattgggactttttgggaaatggtttcctgaaactgtgacagctagttctagaatccatgttgttctagattgttgttgtttcttcttgagtttactctagagcttctagaatccatctaggcattggttttggtatttgtcttatgccgtgtattctttctttttttctagattgtttttaattaaagaatcttttttggtttgcagtgatcttggacgttggaactgaggaaagaaacttgcaatgtatacaaggacaataagaaggaaccagagatggggttttgtattgcagcaagacaaatgcttagttaggccagtgattcgtgaccacaccggttcccaatcttatagatccaccacaagtatactaacagatcatttgagaagaaaccatcattctcatggtgctattgcctctagagattatttaagttattcttggaatagccaattgcgtcggtttagttctgaaggtgatggaaataatgctagtgaggacagccgtttccctctgaataaagacaagatgggaaaagagaagagcacggtcggtgttgagcattttgattctcacgctcaacttggagtacaagaccaaatagaatggctcaacaatgagaagcgtgcaagtgaaagcagaaaggagtcaccttttcttaataaacgagaaagattgaagaatgagttcttgcggagaattcaaccttgggaaactatacagctctcttgggagtctttcccttactacgtccagtaataaccaaagactgttcccttctgttatcgtgttactttcttctagtcatttccattttttgctgatatgttctgatttgctccagcgaacacacaaaagatactctggtggaatgtgttagctcacatattaagcaaaaaagtatgacttccaaatatggtgctcgtttagattcttcaagtgggagaatattgctccagagtgttccaggttttttgttgactagaatatgcattgcattgttttaatgtcgttgtttttttatatcaaactatataagtggtgaggaaatagagtctaataatgatctgattatacaggcactgagctctaccgagagaggttggtgcgagcacttgctcgagatacacaagttcccctgttggttcttgacagcagcgttcttgcaccttacgtgagattttgatgtttatttgctatgacatgctaccatttttctttctgtttcatgaatgttagagtgatatttgttgattctgatcaggattttgctgatgattacaatgaagagtctgaatcagatgacgacattgcagaatcagaccagtgcacgtcacagtcagaagctgaagaagaaaccgatggggacaatgatgatactagtagtagtgaaacaaaaatagaaggaactgacgacgaagaaagatatttggagatttctaaggaagtcctcaagaaacttggggccgacatagaggatatcgagaaggtatgattttcttatgtgaggttcattaattaatctgccatgataatctttttccctttcctatggacaatgtgaattttgtaacctttgttatatatatatatatatatatattttattttttttccattttcttatactatttattttgtatgaactattttttatcaagaaattacacatgatctaaaaaggattcacaatgcatgccattttgatgctatttcttttatctacacgatgactgctgcatcactgttttatttctaattgatagaatatggaaatgctgtatatttgcttatctgctctacattgtggcagagaatgtcagaacaactatatggctctagtgaggtgtcagaagctgcagctgttgatcaagatgataaagcgaagcggcctcttaagaaaggtagccaattcgtaacttgtgcactttgctatttgcatcaaatgatgtctgtttagctggttggatagtattgtatcagtgtcacggctcgatgatatatcttcatcgttatagaagctctagatgttctttttaatgtatcgattttctcaatgggcctggcatgttttaataacttttctttgtatctagttaaaaaaaaatattatgttgtctttcatagacttttaaccttttcctttttcatttctccaatttttaatctgcccacatatttgcaggagaccaagtaaagtatgttgggtctcctaagaaggacgaagcaaaacataggtaattttactgattcacttatgtgggaatctgtttttcctttatgtgtgcttaaagattttaaatgttttcctggagatagctctacgaggatgagatggggttcatcaaaagattttatctaacacatgttggggaattagcataaatatggcagaaaaatagatgtttagcttttgcataatgttggagaaccataactgatatgtcttcattttcatgtgatccctttcgtagcatgatttgttttagtgcttacgcctctttctagcatgttatatcatgaaaatttgttactctggtgatctaggaaccttttgagctataggttaggcttgttgttgttctttcatgtgttaaccattgattttatttgaatccaaggcgagaaaaattggtagttagcttcataagtgcagtatgtaatgtatttacagctttataattcctgactcatccacccctaggactgagcaaggattgtgctctgtactccatttttcatttttcagttaattgtggcttccttgtttcctgcgttaatataatctcttccatgtgcatggtatttaattactaaaaagggttttcaatttaaatcttctgatctagtttagctgtctaaaacacgcattgagagtctacacttgtttatgaacttttatcgtagtctagcaagtcacactggacctaaatatttggaatgagacttcgtattgtaaacctggatattattaccagtagttgggagttggtcactgtccccatttgtatctatgctagagaattc

SEQ ID NO: 84 - DNA, 105733 bp, Arabidopsis thaliana
gaattccaaaaatcagatctcttgcccaacggtgagttcttcttatctaactttccttttcattcacattgggttttggtggatccaattttcatcttcccttttaggttggaattttgagttttatcttcccatttctggattttgtttctctctagtctattccttcaaaaccaagaacccaactttgttttatattcaaaagttgtttgctttcatcgcgtttggtgttcatcttcatctgggtattctcaagaatcaatctttatactttacttttgcaaaaaatttatcctttatagttcttgttgttttgatgatgatgcttttgcttatggatctgatttggttccaatcgattcttagaattagatcggatcaacactcttcatcatctttttaagattgggattaggacaaattcttgattaattgagtttttttttttggaatgcaaatagtttgagattataataacatggaaggaatcattgtgagaagagttataccatctgataacagttgtctcttcaatgcaatcgggtaataataagctttttttttaagtcaagaagaatgtttttgaggcttgtgtttctttatctttgaggtttctcttctacagttatgtcatggacaaggacaaaaacaaagctcctgagctcagacaggtttgttcatatcttttagcattctttgatctgttgaagttacttcagcttcattcaacgtttagcttcttttacttcgtagcttatcagcttcataaggtatttaagcttagaagttactgataccgttctatatagtccattttaatatagcgaatagaaggaatgttactacatgaattgagtatttcacgagtataatagaaacaattctgagacatttagcttggtgctatcttgataaggtgatagcagcagcagttgcaagcaacaaggagaaatataatgaagcatttctagggaagctcaatgaagaatattgtgcttggattctcaatccagacaagtggggaggtatattttcctagattgtaaaacatgattctccataattgattaagttataggtatcaggcgagatatgttggtaaatgtctcttgttcatgatttttcatggctaataatgtttgtacggttcatcattttgaattgatagtgtctttccgttttcttttgctttgtgtaggtgcgattgagctttcgatattagcagattattatggtcgagaaattgcagcttacgacattcaaactagtcgatgtgacttgtatggacaggtaatcatcacatttccaacatacaaattctgaagaaaaaaccttggaatgtattagacaggacttttcccttttgtagacgagaaactacgacgaaagagttatgctgatctatgacggtcttcattacgatgctcttgctgtaagttgatatatcctccattgaaaaaataacttggtaatcaaaggtccaaaactggtggcttaattataatttcattgctgcaatattccagctgtctccatttgaaggggccgaggaagattttgatatgactatatatccagttggtaaagatagatccataggatcaattgaagggcttgctttgaatctagtgaaggaccaacaaaggtaatatatataagtgtcaaccatagttttgttgaatgtggctgaaggaaacaagaataagcctgtgatttggtttatctgtttcaggaaaaggagttacacagatactgcaaacttcactctacgttgcggtgtttgccaaattggagttattggacaaaaggtcattgctttgtctccttaattcttcatttgatattatttcatagatcagacagagcttgaattttgaacttgaaacaggaagctgtggaacatgctcaagcaactggtcatgttaattttcaagaatacaaataagagaatgattgatttgattcttttatacagttccaagaaacaagaaagtaaaccacgaaaatgatgtgcttaattttaattttatgttgtcaacaatacaaattcagtctgttgtgcaattatcttgtgttgtgttctttactctagtgatgacctctttatgaggaggatcattgttgtctcaccaataatgccatgaaaaaaatgaacttctttggattcatttgctctgtgttaaaaccaaaaatttccaatatgtggatagtattgcttttatttattttccacaatttgctatgttgtttcttacatcgttacaagattgtctaaccaaaacaggaactgtaatatcaataatccaaattggagcattacataacaaaacgatttggtgagtttgccggaaactagtaactatattatataaattgatgaacaagtctctaacattagcgtctcttactctactaaaggtttttcttccataatgagataatgatattagagtacacattgcttaattgctaatgaccaatgacataaatctaaaccccgatctaagctgcttgctggtcccgactgctttcccggaacattattacatcatacagcatctgaaaccggtgaaagattagagaaccgcacgcagtgtcccgggtattaagatctggttcagctgtgaccaaaaacggtttggctcctaaatcctctgtttaaggacatgctttaactgaaccttttggctttcgattcgtgcttcaatgagttttgacttcaaactactcttctgtgcacctctaggccattctatgcaacctttcattcctcctcggtttacatgaggatgatttgcagattccggtgaagagttccattgtccaaccaaatccatcatcgggctaaatccgcctttgctcgagactctgtctggtgaaaccattcccgcgcttgactttctcccatttgaaacccttcctccattcataccttccattgatattaccttgtagttgctatctctatctccattgcttgcacctgttgatctccaaagctttgctattgatgaaacctttttggatgaccgtcttggaatggaacacacttcacttatctctgtggttggagtcattgtatcatcccaaactttgcctaaggactctgtaccaccactggaggcgttgctgtgtcggtgattgtgattcttgttgttcacagaaggaatgctcccatctggtgagtaactcgatccttgttcttcgaggtggctcactgtttcccaaccgctatcatcttcttcaatgtctccattctggtgagtataagcatctgagtgtctccctttcttgttcatcatattggcatctagacttaccgtgtgaactttagaatcgtggctgattggactgtaagcgacagatttctccatttctctatcatgggcttcaccgagattcatttcttcaaacaccgcgtagatatcatccgggtttgcaggcacatacgtaaattccttgatttcttggatattaactgatgctgcggtttctcttaataactcagcttctctcacctctttgacatctgtcacgatatctcgtgacctaaggaaagattccaaatctcctacaagcttgttcatttgtgagtacctttcctcgagtgctactttggcatcaataagcttcatctggacacgttcctcacgccagacctcagccatctgtagcattcttctttcatcgtccacttcttctctgaggctcatggattctctcttcaatgcttcaatctcagctttatcttctcctatttcctttgcaagttcgtcgcaaacttcctcaatcaattctcttgctttcctttccttttcgtagtcctgcatgtaacgcttcacggctaactttgaatctgcaagctcgttgactagtttatgatttacgatttctaatctctgacgggttttcttctccctgttcatatcagttttcatatcgtcaataattgctcggaccttctcatgctccctgctccgccaagcagccctctcctcgctaactttcctcaagaactgctcgagcttctttttatgagatcgcttctcgctctcgagatcttctatgcgagcatgtgcttcctccagttctgcttcaagggaagaaaccaatgacacagcattcacttgctgatcaatacgcttcatgttgctatatatttggtgtacttcctccattgtatccaagcagacaggatcccattttgtcgccccctccattgctgagtggggaaatggcattgaaggttcgagctgacaagaaagcaatagaagacttgaggtcaagaaaccataaaaaattgattacaaaacataagatcaacaacaagaaggaccttcaaggactaggacaagaatatctcagtcaagagttatattgagaattacagcttttataaaaccgattacccaaaaaggtaagactgaccgaaaggactcatagaaccaacttgaactcacagattcattatttcaatctcatttaagtttttcctttctgcagccggggatattacgagaaaatttccgtgctcttcaacaataaacttcattcataaaaataatttttaccgggttaaaaatgaaaagaaatcataacacaaaaaagctgcattcagattatggtaactggtaaaagagctctaagtctttgaagagtaaatagacaacgggtgcacgatatccaaaaaaactgcaaaaagtatttcactcatctacttgtttagctaaaatcatatacactacgaagattgaaaagatcaacacaccttacacaagaatccattttttgtcgtagcaatagtactagggttctgccttatcttattgctctgaccaccagagggtttgtcactatggtgataaagatacggaacacccatgtatccaccatttccctgcaaggaaacaacaagatagcttaaaacagaaagcttatgaacataaatttctttctccatatgaacaaaatttagagctgtgatagataatgcaaacaaagaagataaggatttgatagagcagtggtcaaaacttgaacttcaaaattaagcaatgaccaattgggtaataaattgagatcatccataacaactactttattctcacaatgcagatgagagcaattcaatttcaaagtaaatgccccaaaattattggatctcaagaatccggaagattccaaaaaaattaaaattattgtacctgaaaccctaacccctctttgccctttctttctccgccgctggaactcgcgtcaggaacttgcaaccgccatagcccagcggcgagtttcctaacagagacaggccgtgcgattttcctccgatccttgcggcgagtagtctctgacctcgcaacctggtgattatcatcctcgtaatcatcgtcttctacaacgccgcttctctctttattccgatcctccaccttccatttcaataaaggagtctccggccggcttcgtctgccaccagaaggaccggatcttcgctgacgagtcaaactcgggttcctagctcgacgtttagtgacagtagtagctctttgaatagctctgagatctggaccgtgagagaagagattcttatccgactcaaaggccggtaatgtcgccgtcgaatacggctttccggtgactttcatcacgtaatcaccgccataaacaaaacgtgaagaaccgaccaaaaatctcggagaaaccccaaaagagctcgagaatcacagacgaaaatgcgtgcctcagagatagagggagagagatagctttgagttcgtgaagccaaaaaatcgctttgttgtgagagtcttgtgactgaaacgagagagagagagagatgagtatatgaatacgtatatttgtaaaacccatgtgtattggtcaacggtataagaccaagacgacgtcgtatcattagagagtggatgtgtacgcgcgtagtagcgcgtggggagcgtttccctaaactacatggggagggagagagctctctagcttggtggtgcgtgttgtttgcagagagacgttgggaatatatgattaaagaatgtattttaaaaacaaaaatgtttcaataaattattggtgtacgtgttttttttttgttaattaaaagattgtagcatgtaggatatcaaaagagtggaatggatattgtattgtctgatgttaacctatcatttttttaaaaaaattatagaaaagaaaatgttaatcatgaacatgcaatgcataagatttataagtcaatttttagatctcgattctttaatctctattgtattgtatatatagaaaaaggtattgactaggaaacaaacaaagaggcgacgaagacatgaaagggtatcctaagttaagatgtcggctcattggattcatcagcctgcctacacatgatctatatacatttcactctttttctttctaacaagacttatatatttcactcgttttctttctaacaaaacttatatacaaaggtgattttctttataaataagcttatgtctagtaataaacatgcagatgtaacttttcaattaccttacgcagcaatacatattatcaacatttaaaatcatatatgtaaagaacatcgctttaaaatgatttttttacctttaattagaaactgttgataaaaaaaacatttaaaatcaacttcgagattaaatatattacgctccaaaaaagtatgatatttggagtttttagataaatatttgtttttttaaaatttaagatttttcgatccgatctaatatgcttgtagatatagttttttgtaaaaaaaatttgaatttttttagatatattatatatatatgattacaaaaagtgtggtatattttgagaatgcatttaagaaatttattctaatgtatatatggaattagtttggaagcttttgtatattaatttttgtaattgtattatgtgatttaatatcttgtaatttatactattgttttcagctaacacatacatatcattatatcaatcgagttccgattgatctctcttaaaagataaaccgcaaatatcctaaaattttattgcatccaatttcaggtaattaatattaacaatatgctttttagattgttttttttttaattctgaaaacatgtaataaaaattcaatatcctaaaaataacatgtctaatttgtattattaaaattgatatagtatattacatgcttgggccggttcgagtgatgtttgggacgaaactaatattacatgatgtggtttctggcctagagggattacgggcttcagcgcagaacctcttggatttcaaacaaaaaaaagaaaaaaaaaaatattgatatagtatataatttaagttcgatatgtaattgatattcaggatataaaataaaataaatttactataattcgtgtgcctatgttaaaatgatatatacattgaaatggatagactagaataaatatagtaaacccttaatttatataccactatgattttaaaaattgtggtagtgtggtattacacaaatatctactttatattagatcgacaaaattgaatagatcaacaaagctatgcacgttggattgcccatcaaacttttaattgaggattatagtatattattttttatatttgtgtattaatatgataatgaacatgcaaacaatagttgattaatgggtcagcctctttaaatgtgccatctttgggtacttcccatgctattccttgttcttgatgtgtctcattaaattttattgttttcttaattgtttcatttgcttctaaccctaatccatgtatttttttttttttaccctaatccatgatccatgttctatcactcgactagtttccacgtactctagactttcgcactagtatatgttattacttattaccaattatataattaactagataaggacccgtccgatggacgggtttattttcttataactaaaatcaaatttaataaaatataataattatctttcaaaagtaatttttttttcttaatgttgtattgtttccttcaccactaaaattattgaataaaaaattatttgaatgaaaaatatatcatatagcaattgctcaaattatttgaatgaaaagtatatcaaatagcaataacttttgatatacttatatgaaaactaaaattaaaattattttatcataaagttagcgaatgatttcaaaatggttttaaattaggcacgttaaaaatatagagatgattgatcaacgttgactaaattcctttaaatcatgacatatggtaaaatctttgattgataactattcatgataatattaattactaactttgaaaaattaaaatatatcatactaattatataataaggtatatttcccttatactaatttttttctatcaccactttcgtaaccatgaacagtcactatatattgtcacctgcataacaatcacatgttactcctatattttttagtatgacatgctattttattaaatgacattgtttaaataataatttcataattattttgagtcaattgtgagtatttatgaagaaattagtttatgtggtgatccacataaagcccgcctatttatactataattttatggatagaatcatggttttttctgttagtatcatctgaaatttatgataggagatcttgtaattcttatttcaacatattgcacatggaagttacaaatttcaataaggtttccttcacataattgagctccaaacttttcaataagataatgatggatagaaccttgaattgtatttttctgttttaaaaaagattaataaattggagaatatttaggattaaagtattaaaatttaccttttcatcaagtaggagcaattctatttttatgagttcattttttttttttcttggttcccactttcttgaacttgtgtcttcacgttatctttgatgatagctattctggtttttttttcaagaattgaagataagtaaatgtaaacaacaacgcttaataattgtttctaaggtaagcactatataatattctaatagcgtaagaacaatgtcaacttagaaataaatataacagatctatacatattatagtcaacgtataagtaaatattaactaattaacctagaagaaagtttttacgtaccaagaaaatttaaatagcaacgaagaataatattttctgatgcaagcatgatataataatactctaatagcataagaacatgttaaacctagaaaataaatatgataaatgtacatgtattatagtcaaccacccaaaaaaaagtttaaagtttgacttaccaaggaaaaacaaaaaacaaaacattgatgcaaaaatagtgattttgaggggggttttgtgaaaaaataagagattacctctttgtttatatagagatggatgtttacatatttatttttttagaattatgtatataatcctaaacattctttttgatttgtagaattatgtatataatcatttttcttttataattgataaataattgtaaactttcccttttttaatagttggtaaatttaattagaattatatagtaggacagcttttctaatttctatttttatctaataagatacatataatttttttataattatcttatttagttttttctaataattttccataattatcttttaaggagaaattaaagtagtatttttttccatttttcttaagaattggtaacttacatttggcctttttttgtcttcaatttctatttttaactttaataaaatacatatagttttcttatatttccatatagttttttttccatatagtttttttctaatatattttgtttgacacgtgtcaacatctaaaatcgataaaattgtcatgtgtcatgatctcgcgaatttgtacctttcgaaactgtactttatataataatattacaccaatatacgtaattatatttaacagtatcaaccattttttttttgtcaactgaaaactaaaaataccaaattgatatacagagtcctgcacaacagatcttggctttatttgttgatcagcaatctgtatgcgtgcgtcagttatatagtaaacctgtttatttttattttgctgaaatctatagatctgcagtgttttgtaattttgtacgtgtttactatattactttactcaaaactgttgtagacttgtagtcgtgtcgtgtagatctatttgatattttacttatatcaaaattgtttcatctattttaacatctttgaaaattacaatatcttcaatggaaacctctcgtatttcttaccaaaattgtgtaaatattttttcatcatatgttgttaaaaattctaaaaggcaatttagatatataaataaaaaaattcgcttttgcatatctatatatacatttttgcagccattttgtgaaataaatcctggagttggaacttatttacaatggatatcactggcttattcaatgcgaaaattaactaccaaataaaagcaaatcttattcaaaagaatatgctcttatttcatggcctaattattttttgccaaaatggttaaaatatttaaaaattaaataattatttgaaagaaaactttaaattgatttaaattataaatcttttaataaaaatattattagaaaaaataaaattagtttaccgaacatgattaaatagtaggactaaatggtataacgtgtttataatattataatatataaactttataacaattaaataaatatttgaaagaaaacttttaaattgatttgaattaaatattttttaaattaaagtattattaaaacaaaaataacaaaataatgtctaattttactgaacatggttagtggtaagacgggtttggtcgatagtattacgagacggtatagcacaagtgaaatctattagatatgtttaatttcactgtgcaggattagatagtataacgggttttgatcgataataatacgaaacgatatactacaaatgaaatcatagatataacaattaaaatctatatatacattattttaaacactaaacaaagcaaacaataataataaaacaaatatctacatatacaattatataacaaattttattaaaaacttagtcccgcagtataccgcgggtcaaaatctagcgtaattacaattttgcaagaaaaaagaaaagcacgttcaacacaaaggcactgatatgataacgtataaacgtaattaatagcaaacacataaacaccataaacaataaaattacaaaccacaaacatgtatgatatcatcaattgcgacatcgatggactttgttcaatttgttcctcaatttctcacctcatatatcaaaatcatttgtctggttcattcacaaccagtactatatagacgtgtcagctgtcataatccgaccgaataagtatatgttattaaatgtctactaccacctaattatgtatcacattaaatccattgtttggttaaatttgaacagataatatttaaccaaattagttgattatttcttcctctctctaattagtgcatatgttggcaaacacaataaattatagatatattttttttggtaaaaacatttaaaaaaacaaaattatatttcctcgtattagttaattcattgattaatttcttactatttcttttaattaaaaaactttaaaaacatataatttaccaactacttgctacagtttttttgaaaaagtgggacttgtaaattctttcgtacttttccatgagccattcacttgatgaacaaaaaaaatattttcccaagttatttcgtcctgtctcgaaaacaagccttttacattacgggccttgtagcccaattatagcataccatattaatcacacttctggtttgttttgctttctttcttcttaatttcttcttgacctgaaatttcattgcatacatactcttatattcatgagttatcagggactaacttatacttgtttcttttctttaaactgaaagcactaagtgaaaacttttgtggccttttctcatcgattaaatatacaataatttcgaaagaaccaacaaaatttgctatgcgatccgcaacttgctaatgataacatagcaagattaggtcgaactcctctccgtacgcttgtaaggtttgcgcaattgtgctcaatgagatccgattagtccgtccatatcttgattaatatttttgttaactataaaattttaataagaccaagaataactccatacgaatatgtgttcgcatgccatcatttaggacagaccaaagtgaaaagaaaaaaagaaatgtaatcccaatattttcttaacaaccttttgtaacccccaaagaaaataaaacttagcaaaattcatgtgggctttgttaacccacttttgttcttccaactacattgccatgtgatacccttttcttttcttttcttcacactattactataaatgtactcctcgcggtccaaacataaattaattagaagattaataaattttaaagggtcatattaatgaataataagatgaacgtaacatgcattgtataacatcatcatccatgcaagaaaatcatgaacactccctaaatctttctctctcttcaaacttatataaacccttcattaattagacatctcaatcaatgatctaaataactaaactcatcatcacaaagtcatctcaatgatgagcattaagctgacattgtgtgccttaatcttcttcctcttaaattcacttcttcatcatgttctcggtcacgataaccaacttaacacaacctcgtcatggcttaagagccacatcaaagcagctacaacaacaaattggggtagaccaaagccaccgatgtgtaaaccatggatttgcaaacggtccggaccatcagaggctcgaatgagatgttgtcgtaaccaatgcgttgatgtcttgtccgatccaaaccattgtcggttctgtttcaagagttgtaggttcgcattgtcgtgctgcgatggagattgtgtggacacgaacactgatccgtctaattgtggacaatgcgggaacgagtgtgaatccggtgcgccttgtgagtttggtatgtgtggttatgctgctccatcgtcacagcctggaaaacgtcatcgtcgtcacaagtttcatcggccacgtcctcctccttctccggacagtaaacttaattatgatgatcatgatgatgaataataaagcgtgacgtggtgagatactgatgaggtcgagtcttcgagtttaactatcattgttctgtgtgtgttagagttcattttttcgatgaattttattttgtaatgataataattggttatatgagtggtttgtgttaatgcttcgtggtattttgtatggtgtcatttgtaatgttaaatggtcggttcatagttatggtcaatatatgtgtgtttaatccttcactcggttttacgaaaattaaaattaacgtaaaaccgatattattatgtatgattttcgagcaacattacatgatgtaggcggatttatacattttacagttatgttttacgcatcttatagaaaataatgcatgctgtaattaatcttatgttactttacttgttttttttcactatgatgggtaggaataggatttataaatgtcgtaggttcatcgaactttttaaccttcttttcatttatcttccttatccattgcaaacagcaaacacaaaccgacaacataaagatgatatgttagcttttctttcatgtttacgtataagatctaaaacgagtcgaaaccaattagtcatcttcatggctgatcctccgttagagacttagagaatttcgattttaaaaattcgttaggtccaataataaaataactaagcaacattttcatcgtatgtacttgtgtgattggtttctagattggagcaattgttttgaaggtctcttgttcgagcaagatatatttggcctacattctttctttctttttgggttttacttttacattattttggtagacaaaactcgatcaatagcctaatctctaatactaattgtttagcatcggtttaactcaactgttatacttattctttattgaccattcccaaagatgtattttcaaagttacatcaacaatgacagaaacgagccatgcaatatctattcaaccaggacaaaaaattaacaaaaaattaaacggtcctggtttaatttttatttttttccgacccgagtaaagtaacgaatctcggccataagtttttttttgtaatcaggcccatttgtttataaaatatatctcattcaagttagattatatagtaacctatgtgccaaaggcccaaaaccattgagataaatgaactgattttttttttttaaataaacttttttgaccacttaaaacaagagtccctttcgtgaactactaagttcgatgtgtgtataaagtataagcacattattatctttcaatgttattatctttttgttcaacatctttcaatgtttaaatttactggaaattagtttggtggaacccacactctaacatgtaagctattcaatttatttatttgtcatttgtgtttataactttttttataatagactatatatttgaaagtattggatgaaaaatacaaatgaatatacacatacctttacgattcatacaagaagaaaaaaattggattgtatcaacacatgtatatctatggtgccatgtggtcgtggtctcgtggaagataagtttagtttaaagatgtttttggttcttatgcaaaagtgaatgttttcctattaacaattgatcaaagtttaggtcatcgttctagatcaattagtaataacacatgtaacggttctgtgacacgttgtgctgtatccaacattactagaatagtttatttctttctgaatggttaagcagtaactgcattatacataaaagttttgcattaacaatatgtattctatgaattgaatagtctccttgatatatgagttttcttggaagtaatatattaagaaaattgttatataaataaatagaaagatgggaaatataaaaaaaagttgaggaggagatgtcattaggaagacgaaagagaaatgaaaaagcgtggaaggagcaaactgaatcaataaaaactctattgtgtcccacttttcaccactcgttaacgcgtctgtgatgtctcgtctcttaaacatgacttttctttattaacttcaaccacatttatttcatggaaccaaaaaaataagtatatgttaacctcttttgtaaatagaaacaaacaataatgttttaaatagtaatttgtagagtaacaaaataatgatttcacgacaatttgtgttctttcactttgattagtaaaatatgtttgctgacatgggaaaaaaaaatactacacgactactaaaagtgtcgaatattgatttttaaattgtacaataatacagaatgatataaatttgcaaacttcaataatctctatatttaataatggcttttactattttacgcgatatacttatttatagaattcctcaattctacaatattactaattaatttctcaacttaattgcataaaatgtaacaatttggttttgttattttgctatcaaactctgaattagtattgtaatttcgtaaaatacattgaaaggttttaagaaatttagactattatcatattatgaaagtttattattgttagatttagtactactaaaatactctcagtaaataataagatttgtgagtcttttggtgtggcgtataaagaaagaaaaaagaataataaaaaaattagggggaggtggaatgaagaagaagagtgcagcagagaagcaagtgccaatctctttcccttgtctcctcctcttaccacacctatcgagacaccattctttctttttttttctctatatatcaccttttcttttttcgaaaaataataattatttattctctttgtttgttttcttttgttatcgagatgatgcgtttcgaatttgaattgctaatttgttctaactaccttcaaattattcctaaatttaaaaataactaatttgaattataaagtgttacgaaggtgcgcaaagaagataataggactttaatcatctttacaacagtttagtctctcgatcacataaatagataatcattttatcttaggatatatcagtataatatgttagggtttttaaattaaagcttctaacgagaaaagctcgtagtatactcgtaaagtccttagattgtcagttctcatttcaggagttgatagggccaaaaaacaaaaagagacgttgaatagttgataaggatggaacatatgaaatggttttaaaagaaatctattgcaaaccaactacatagcattttacaaacagaatgaatctggttcacattggatgattgtaatcatgttctaaaataagatgcccaatccgttaatcagttgaacttaatccaatgtttaaaaattcaactttacttaataaatttttcaaaatctcattttgaaacttacatttctcgaatggcgataactcaagcaaaaacactgaaataataaaatcgaagaatacgcatgatattatgagttcatatttataaaagtagtgatttgattccctacatcttgccatatcaatttttggaatccactaaaaccatagattatttagtgcaagaatctctttatcaacaattatagaggaaaatagcttccttgctcaaccaaattttaacaaaaatgagatacttatagagcatcgaataaactgcaaactgtctggctcaatatgtttttcttaatttgtttataaaaacgaaataatagcttctaaccaatgaaacatctaacaagctcaacaacttttaaattttcaagtagataacactccgaaaatgtcaatatagtacgtacgagtaatatggacccttaaaatctacaccacacgatatgttatcatgtcacaaatgaaatgcaacataacgtatatgagtttggttctgttagtaaacaaattctttgacattgctacaaaagtttgagtatcaaaaaattatatcgatagaatccttttagccaaattatccacgtaatcattttagacgagcaatctttattattgccttagtcggggacataaactattactcgatgatggacaaaacaactatttttaaaagtcttgattttcagtttatatgtttccgctggccgagattttggtaattctttttagcaacttaatttgagatttaaagcatggttagttgtgactgttgaaccaagttttatttaagttaagtgggcttgataaaattgaattgtgtaaatgagaactttggtcttaatggattggttcaattcgtggtagagctacgagaaattgtaaagtcaaatattgagcgtgagaaaataagtcgctctgttttacatctcagaagactcgctcttattcacttcctcaacaccataaaaataagagttgttgagagatcaagtcattcaccactcctagatttatggttgacatgaaatgatttgttgaaaaaataaattcaaaccagtagtaatctcaaacctctatttgaatacacgtttcaagtatgtcttcttcatcgattaagaacttaatcgtttacagacaatcaaatagttttaacaatatctctttattagaaataagtaattcaaaagtattgtatcgttagagctgtgttttcgaatactgacaaaatcagtttagagaagttgtaacctaagatcaatgaatcacataacattatcacataagatgattcaaagggttaaaaaaaaagagttttatcaactcgactcctttcatgctttccttaacaattatgatcttaatttcaataatttttgtagtgttgagaaatttatgttcaaaatagggaatcaagtgtcgagtaagaatgtgtcaatcagaaaatgtcaaacaaataaatcatagaagcatgacaatcgaatacaacattatagtaaaattttgctttctacggtattttgtgttgatctgcaacaaaacaaaattttttttttttcaaaataaccgattttctaaaatagtttaaatgagtttattttattcttacccttattattattattcttttgctaatcttggaattgcatgactaatattttggctaggagaacagaaaaaaggttattgaccaccaatttagcttgacaataatggtttgttttgtaatctctaaaatcggttgatcaaaacaaataaacagaagaagaaaaaacgaaaagaaaagaaagagcaaaatgataagaaaccgagttggtcggtcttgtggggcgggcgtgaagagcattcgagagcgcacaaaaaaaaaaactattacaaccaaaatattacaaatttaaattcttaaaaaatttcaaaatatcacaacaaaaaaaacaatttatttattaaaaacattttgaaattacaaaaaaaaaagaaaaaaaaagaaaagaagaagaggaagagctttttgtgttgaagagagagtttcctatcttctccattcctcccaccatctccctcatcttcatcttcctctctctttctctctttctcaacaatctctattagatctttctccattaccattacctctggctttctcttaaatccaccatcatgaggagaggaagaggctcttccgccgtcgccggacctaccgtcgttgccgccatcaacggatctgtaaaagaaatcagattcagaggcgtaaggaagagaccttggggacgattcgcagctgagatccgtgatccatggaaaaaagctcgtgtttggttaggtactttcgattccgccgaagaagctgctcgcgcttacgactccgccgctcgtaacctccgtggtcctaaagccaaaactaatttccccatcgattcttcttctcctcctcctcctaatctccgatttaatcagattcgtaatcaaaatcaaaaccaagtcgatccgtttatggaccaccggttattcaccgaccatcaacaacagttcccgattgttaaccggcctactagtagcagcatgagcagcaccgttgaatcgtttagcggacccagacctacgacgatgaaaccggccacgacgaagagatatcctagaactccaccggttgttccggaggattgtcacagcgattgcgattcgtcgtcgtctgtaatcgacgacgacgacgatatcgcatcgtcttcacggcgacggaatccgccgtttcaattcgatcttaattttccaccgttggattgtgttgacttgttcaatggcgctgatgatcttcactgtaccgatctacgtctctaatgaattggtaaaatcaaaatcaaaatcacagatccgtgatcggtttgattttaatcgaaaacacacaacaaaatcctttttttttttttttttaaattttctgtttcgttgatctcatataatttttactatgcgggagaaatagaaagacaaagaaacgaagaagaagaagaagatggtgatgagcttgagagagcttgagctggttctgtgtttcttctgtgatgatattgtaagagtattattattttactattattactaaatcttcaaaaccaagaagaagaagaccgaacacgatgatctgttgtgtctgtttgttttactgtaagaaaaacgcagatctgggtttcgtttttttcttgagatagatcaaacaacccccatctttgtaacatatacatttggaacactcatgattctaaataaaaaatctagaatctttttttcatcttctagagctctgatgagttttgttcaaagatcagttcttgttcacgtgaattaagctagaagaaagacaaatgaagctagttttgtaaactgttcatggattgaatcttaacaagttctgtagcagtgagtgatttggttaattagagattaagatttttggttgtttattttacatcttaaaatttcaaaattaatgcccagatcggaaaaaattgcaagatggtcatcttagattggtaaagcttgttaaagttcttgggttctgatattttctgaattaaatttttgtaattaggttataaggggtatgctatatcttatgttttccaggattatttaccaaactcttagaatttcagaaaacaaattttaagtttaggaaaagctgttagaacttagaagttttcgaaacgtctcttaaacctaaaaattgtggtgttgttggatgtcttttttgtgatatttttctaatttctttattttacgtactaaaagggtatttaatctagcttttgttttttttaaataagttttttttataggtaattgagacaattgttttggttgagtttggtgggcaattgataataaatctttgagaggtgtatggtggcaggcagattcttttcgtgtttgacccattagattagattttgtgttcggcgttaccctaaaattctagtatcttactttactttttctgccacaaacactattaaacgacctttgggtcctaaccaaacccacatatttgtttttactgttgtccaaaactaatttctttgaatcttttgttagatataaaacaaactttattagtgtataaatatataatgatagaacatttacgaaaaaataatgtgatgtaattgcagcgattatactagagataaatcatagaagattttttgttcaaaaaaaagtatgtagaacatttaagaaacaatatattagtaattaattgcagggatattgcaaacctttattattattaaatatttgggaaatttgagatttgattatttcattccacaattacgtggattaaaaatcataactttattttagtataagagactagaatttattctataatataatataccgtagatatataaaatttcacacaactctaactaaatcaaccaattcgacataaataataaatttggtaactgtaacaaagaggcatgagggtcgtgtgatgagatgggcaatgggagaagagtttgttttcatatcggtccatttgtcatctttgttggtgtcttaggattcaagactcatatgccttatatgtggaacttatacaaacacggtgtccccgcctcgacattgaatagcaagaattttatgcttcacaaagaatcaactaatatagtggaagcgacacacacagaagccaaaaaagacgacaaatgcaattaagatcaccattgaagacattaacaacaagcttgatcaattttgcagctgagaaaaatgaaaaaaaattgcaaccgacaagaatgagaagacttcatagaagactagtttcaaatcctaatatatgttttagacaagttgttttgatttgattgacttattttttatttgttaattttattagaattttggacctaaatattattggagcatcaatttgatttttagattaaaaaattaataataaataataaaaatgtattcataatatttacaaagtttaaaatatatcgataataataataacagtttttagaagttaggttttaactttcacccaaggaaacatttataaaaatataagtaacattataaaacactaatgaaaactacatttacgaatttgggaataaagcgagtgatgggtcaggtacaaaaaatagaattaatactgatatttgacacttacttgcagataagaaaattataatactttttatcttcattcgatactaaggtttcaaatatttttttgagacgtgtacgagtcggataacagatcaaatttggataacaaatatgcctaatcttaacttataattatatgtaataatttatctaaagatattgttttataaactgtaattcaaaagtgttaatattgattagaaaaccctttcacaaaaccaaaaaaagtgttaatattgattatcacttcgaatttgagaaagattgaatatttagtaaggaacgagatacagtttgttggctaataatgggcttggagccgtgggctattcacaagctcgggcctggctttttagatgtccagattaattaatatacaaaataatcccaagacaaacactactatggtcgtactcggtgaattcgtcatgtattatgttagacgaaagaaatatgatcatagaaatgatttcgattagcatcataatggaagtccaaaatcgtatatgatgaaaagagaaagatgatcgttgtaataaagcatgcaaaaggataatttaacataaagatcatggaaggagttaaattttgtcaacaattggaacattttcatttatgttctttcactaaaaccaaacgtaggtcatcctcactcatcacgttaaaaactgtggtagacaaatcaattcataaacatgtgagataagtaattgagcaccgttttgttatatggttccatatggtgtctataaaacatagccactaagtaatcaaccagatacaaacaaacgaatttatttcaaataattcacaattattaacaatttcaattaaaaatttgtaaatgataacatggtattcgattcgatcataagcattatttgagttaaacaatcatatgctcttaaatgttaaacttttttcaagtaaacttaagatatcccccgccggtgattcaaataagaaaatcaccgtacattcaaaaagagtgtatagctgttgtaatgactaatttagtgattaaaaagataatatggttatttaggaacagacaaacggcacgcgtggcgatgcttcaacggtggtctgaataaaacacatgggttagtgggtccccactccacagcctgtgttcaccttttgcttaaactatcttctaaatcaagtttgtgtttgtagttttgacacaaacaagttattcatgttttgttaataacattaactagatctagttaattaagactactattttgatttgaaagcaatcatactagtagttaattaagactagatctagttaatttagccatccaatcccgcaaaatttgtccaaatagtctcatttacattcatttttgtatgattgcattaaatgacttagtaaaatggcacacaattaactgtttatttggaaacaaaatataggcaattaacacttttctctgactaattgacattgacccttaattttatactccaaatattatctctcactaactccttcctatttagacaacaccttacacgcaaacaaaaaaattaacacaaacttataaatagcgtttcccatctcacttctattcaaagatcgcatcaccaatcgcagtcaaaagaaacgcaaacgcgatctctctctcttaaaaactctgattcattctctcccgcagcagcttttcctaatcgatggcggacatcgacatcgccgtcgggaaagagccgctgataaaccatgagaacaacaacaacacgaacaagatcttcaatcgctgcgtttcacaccaacaagacgagctacacagcttccgcaaatacctaaggtggatgtgtgtagatcactctagtccatggacagcgattctctcttggaccatgttcatcgtcttcacactcgtcgttccggcgatctctcacttcctcctcgcttgtgctgattgcgacagttaccattcaagaccttacgactccgtcgttcagctttctctaagcagcgtcgccaccgtctctttcctctgtctcaccagattcgttagcaagtatggtcttcgacgcttcctcttctttgataaactctgggacgagagcgaaaccgttcgacgaaattataccaatcaactcaatgtgagtttctctattttcgaatcacaatttttttgatttctttacaaattctgtaatcgcaaaaaaagaaaaaaaaataatcatatctgtcacaaactcatatctgtcatatctgttaatattctattcttttaggattatgtcaaataatttgtccaaagaataaagtcagatttgaaaaaaaataatagaataaagtagaagaatcatgaatattataaagtaaggaaacaactcgacgcatcttaaggattgagcaacaaaaacaattatgttatttttttcactatttgctgtaaacatttttgtgtaaaaagtaaaaacctagattttaccatattacttgtttcacaagcattacaattgttttttattttattttgcagacttcgcttcatattgtgtcctactttgtgattccttgtttctcagcaatgagtgcatacaaaatttggtggtacgcttcaggtggatctcgaataccttttttaggaaatgctgtcttaagcgatacagtggcttgtataatggagctttgttcttggctataccgaacaaccgtaatcttccttgtttgtgttctcttccgtctcatttgccatcttcagatccttcgtcttcaagactttgctaagctctttcagattgattcagatgttggttctatcttgtctgaacatcttcgtatcagacgtcatcttagaatcattagccatagatatcgttctttcattctatgtttattgattctagttactggaagtcagttttcttctctgcttattactaccaaagcctacactgaagtcaatatctacagagctggagaactcgctgtaagtttgtttagtctcgatgttcatttctcgataaacccatttcgaaaaacttacatttgtgtgcttttttttttatctcagctttgttctatgacattagttactgcacttctgatactattacgaagtgcatcaaagatcacacacaaggctcaggctgtgacatgtttagctgcgaaatggcatgtatgcgccacgttagaatcctttgatcagacagtagaatcctttgatcagacagtagagactccaactttggttgctagaaacaacaatgataacaacaatgtccatgatgttgttacgttgacagaatcagacagtgacgagtatggtgatgaagaagatgatctagacaataatgacatcattcctgtttatgctttcagtaccatgtcattccaaaaacggcaagctctaggtaagagaatacaaaatcttctgcaatgctgttttttggtcttaatggtttacttaaaatgatatctggttgggttttttttagtgagttatttcgagaataacagcgcaggaatcacagtgtatgggtttacacttgatagaggtactctccatacaatcttcggacttgaattgtctcttgttctctggcttcttggtaaaaccattggaatttcttgaatctgttttgggatctccaagaaacatccgaatgttttgggccttttggcaatgaaccactttcactttctaatttctttctactgtaaatcaaattatttgtgctttgtatacgccactgtattattaatgttgttatagagtcatgtcattgtaaattagattggaaataaaaagcctatacactctcgtgttttgtgaagtgacaaattcttctaattatagcaaaataagtaaacatattttcggagtcttgtactacaaagtctaaagtacatatcatgttactagatgatgtagaaaattgataaggttacagtgaattcaggatttatttcacaaagtgtcttaaaaaagttcaagctaaactaaatcagtcactacttctgctcagaaaattgaaagcccacacacgcacttcatagaatatagatttagaaattcaacctaccccaaaaggttaaatcaaagacttcatcacttactttatatatacttgaggaccaaatagagtgcgaataccgactgttgtggacagagtgagctgccccctgtaacttttgtctgaaccattaacagcttttgtcgtcctctggattttctgtgacatttttcggtatagtagcctcttcgacatttggtgtcatgttatgctgttgggaaatgatctgtgttggattgcgaaggaggctgggttggtgagttctctgcctgagaagctgatttctcctcttcgacatttggtgtcgtcttctgctgttgggaatgatctgtgtcagattgcgaaggaggctgggttggtgagttctctgtctgagaagctgaaatctcctcttgtaatgaggattccgctatgatctttgagtttttatcttgacaatctgcggaaacagatctctcagtagcatctttcctcataacttcttttttctctagttctggaggattaagagtctctgagtgagatactggttccgaaggatcatcactctcagcatcatcgtttcctgtgggagcttgtgtttgaaagttagcatcaactgcttgattaatagctgcatcttcagcttcaactatttgactcattgctttttcaactattggattcatagctccatcttcagcttcaactattggattaatagctgcaccttcagcttccaccatttcactcatagctttttcaactattggattcatagctacatcttcagcttcaactgtttgttccatagctgaatccttagttggttttgctgtctcgagatgtggcattccctcttgactaaccttttgatccattttaccaacccccttctctgcgggtaattgaacttcggctgtactagaagacatttttgctgtagtggcgcttctcatgacacggccgtatttaggaggaaaagacttgccattgtataattgcacacatcttgagcaatgccattcagatttcggaacaccttttatattgtgagcatgtagacatttcaagtgatatcccttttcacaagcatcacagattagcaccgtttctatttcattgatagttccttgacatatttggcatgtcattgctttactcatgtattctcttgaaggtgggttccacaagagattttgtttagcccgcggttgcagaactttgtggattaacttagcaatttcagcatggttgttgtttccaaaaggtgaagaagtttgaccataagttgctcctttcatgcctgggaatgcacctggtggagtttgagacataaatggtctaaagctcggatctgagattctggaagaactcggaacaggaaccttgctatctgatgcagtaccaaatgatatggtggaggtactggaatgaggttgggcagaccaagttgtagtattcccaaaataatttccggcaggaactgctggtgtataagaaagggtaataacgtgagagatcataataaaaaaactcatggccaagagaagatatgagattcaaactcaaaatgaaaacctcatggccaaaaggaactgatcaaccagatcatataaagaatataataccaagtgtcgaaagaaaataaagaagtcatacagacaacaaaacttataaaaacactctgaaaatcggcactaatactcagaagtggcactatgagattcttcaataagatttaaacttctaaagtataatacaaatccacagcaaatcaacaaaatgaccaaaaacattcactagctaacacaaaacttgagctatttcttctaccagtctgaatatctctagaatataaaatggggacagaacgaggtaagcaaagtggagatacctggtccctgagaagtaccggtatgcaaatctgacttaaactgtggtctctccattctagcttgtgttattcctgacgcttccctaacgtaatggcttccagatgcattaacagaactagcggatgccttcatctcgctattaggccactgatgcgccatagaaacattatttactgctgcaaaaatcatacagtggagaactttatcatgactgactcctgaaagttattagtttacttaaaattactgactgtaagcaaagtcatacctggagatgtagatgtagttgatactactggattctttttcaattcctccatctaccaaaacaacatataaagatatttcggatttgtctataaattgcagtgagattgaagaagaaaggaggagacaaacctttctcttgccaagagatagcttctcagagatggttaatttaggagctcgaaaccctaatctctgatccttaagcttaccattgaaaccgagatcttcaatgacagctccaatagcatcaacaccaataatatccttgggagtaaactcttgacacatgtcaaccaatttcgatttagcttccaccattagatcaatctccaattccgtcgggggtttcccacctcgaatcttccgcaatgccgataacaccaatacaatctccgccactctattcacttcctcatcaaaacgtggcttcttcttcttcaccggcgattcttccacagtttcttcatctctcttttcttcaaccgattcgagattcaccggtacatcatcactaatggccacatccattctcaacacgagaggagagaaagagagccgcgaaagaaacgaatcagtgagtgagtgagagagaaaccctagaagagagaaagagggaagatctgaggtttttttttttgttcttcaaaattttgaaaagaaaattaaaagattaaaacgtcacaaaacctaatttttcgcgggtaaaaatttgggggaatttttagagtgacgattaacgaaatttacaaaagagttttgcagcagctagaagatagagagagagagagagagagagagagagagaggggttgcggagaggcgtggtgcttcggcttagttattttctagagagataaatcaaataaagttgggcctgaatatattaggcctttagtatatacttctactaaacaggatagggaaagtgggtttttaagtttttcttattcccataagcccatattatagaggttcaatttgatatgctgagttcaattatgccaaaatctcatacctaacacaaaagtaaatttaagttttagaggaagataatttgtatttggatatcttattatatacagtactttggttttcttataaggctatagtctttttttttatttttatttttggatatattaacaaaatattttccgctgtcaggcttcgaatctgaaaatccaatgatcaaattgatcaaccgaggttttagaccatgtgctacagcaaatattttgttaaaaatatatatttacaatttaattaggttgatatttatggaaacaatttgtatatttatgaatggttgtgattaggtgatatataaaggtaccccgatgattagatgtacatgtcaataaagtgtagaatttcagatttgtattcgttgtattataatagcttatcggattgagagatatgaatacagatcacattctaataaatgttttatataagtttatttttagggtttagaaaacaaatgctctcatactcttaatataaattttcatcaccacctcaaagattcatcctaaccaaaaaaatattggcctttgatatgtagtcctatttttatgcataatcgagcccaaaaacagacctctctgtctacatgattcaggtttcgtgaaatcgatggtgagatttcaaattatattttgaagagaaatttctttgggtatccaagaatagctttgtaatgtacctgaagtgtcatgagatcttatcaagacatcttcgagattcgaataatttctcttccttcttctcctcttgacttaacatatatctataatgtacatgcaatggtacgacatcatcaatataatctctacaactcatgttttctattcattaccttgggagaggatattaccgatctacagttgaaaaagatggaataaagaagacaaaaaaactcggttaattaaatagattagaaaaataaaaaaaagtacatacaattttttccaatttgttgtaatgtattatgtattcaaccaactaaagcacattctactatattatttgggaagtacattttaaatataaccttattttttgtaagtaattacataggtatgccattagaaataaaatttaaaaagtaaattaattcatctctttaaaaattaaaaagtcaaatactaatttaattaattaaatttaattaaaaaacgaaatacattattaatttccaaaaaagtaaccaattaaaatcaactaattagatttgatatccaaattatcatattaattttttattaattattatagtacacctctcatctttatatgattctatttttgcgaaaaaataatatcatcgttataaaacaataattagagttttttcgcatatgctataatttgaatttttaaaaacgaatataaactgttcaatacatgaaaaaatattataacgggtcaaaaatagatttaagaaaattttatactgagtactgagtcacaatttgaatatttatattcaatttcatacatattattttaaaattttataatcttatatactacaataattaataacatattagattttttgtgttaaaaaaaaaacatattagatttttttatgtgtatgatgtgattcaatttttaatacaagctagaaaatcctagaattgacgggtttaaatcgatattaatacaagatggtatactacaggtgaaactctaaaattaataatcaaaatacaagtgtataattttaaacactaaacaatataaataatatcaacaaaacatatacaactcgcagtttactgtacatttaaaatcaaataaaataatatcatatatttataatcatctttacaataaaagtttttagtttaagtaaaatataagcctacctacggtatactacaagttgaaattataaataagcagattaatatcacgatgtctgtaccttctcacatacacacctatcaaaaagttaaaacctttcaaaacctcttggtatattcaaattaggattattcattcatgaaattattattgcaaaggttttgtgatgtcttataagatgattttggcagaagaggatgtaaattttttttttaaaagtaatcagcaaaatatatgtgtttttgggagtttttagataattaaatcacagaatagagttgggcatatgagtaacccattcgagttcgggtagaacccgttcgggtttgggattaatgggtattgatttactacctaatagaataattctaaatattcggttctggtttgggtcagatccagttgggtttgggtcagtttggaaaaagtttcagaccctaaaaatacccaaaaaaaaagaaacgggaaatttttatgtagatagcgagtgtccaaacaaatttttttttaaatttgttaagttttaataaatttaattatatttgaatatattttactaaattttgacaaacataacaaatattttttgaatagtttagttgttttggatatttaggtccaaaattaattgacatatttatatttataattataatcttagataattagataacattacgattaaatataattaatattttggatattaaattaatgtttgggtttttgaatactccttttgggtaacggataatttccggaccaatcggatatccacgggtttattaaaagtctacccaataaggaaatttcctaaaattttaacccgccctaacccagttttttggttcgggtattaggttggttatcgggtccgttttttcgtcagccctatcaaagataatctaatataggccccaattaggtctacaaatgtaaccaaaatactatacaaagactaattctaagttaggccaaaaattagatcctctaatacaaaagaaaaatgtttcttaccaaaacaattatatacaaattttacacatttacttaaaactacatatgttgtatttattataaaaataacatttttaaacaaagtcaatctaatgaagcattatatgcaaatagtaaaaatattaaaaaatattatgacatcatttttatactataatattttttatgtaattcaaacaaaatatacaatttaatttatacaaaatattaatgctgatctagtgaacgcatatataaagcaaaaatgaaatgttaaggccaaaatacagctgacgatgataatatatatatatatatatatatatatatatatatatatatatatatatataaatgttagaaaaaaataatctacacttataacacgacgagaatggtatataaaattgaaaaggcaaaaaaaaataaaacacaaatcatttgttggattcaagacctaaagctgatgatgatggtaatatacattaatacagatacataatatatttacatgttttagtccattacattctcatacattttttatctgcattaaccttaaaaagaagaaaaaccaagcacatgttcttcattcttccctccggctccggtgaagctacttccgccggaataaccacctttttttgaaactttttcaatattcctaaaagcaaccgaaaatctgaaactcatcgattcatcgagaaaccaaagtcatcatcgtctaacaacatggaagaatacacattattatgagtccctcgatgatccatagaaccaaaatcatcttcagattctccttctctcaacatctcaaccatctccacaacttctctcatatccatcctcctctcttcttcttcttcgcaacatctcaaaccaattttcaacaaattaatcatttccgctttacaattcttcttccctttcatttccttgtcgaacacgtcacctgttttcttctccttaaccatatcgttaacccaagtcacaagactcatgttagaatcataaccttgcgttaagtaattttcagggaatcttcctgtcaaaacttccaagatcaacacaccaaaacaccaaacatctgtcttcttcgttatgatttgtcctttcgaaggtctatactctggcgatttgtaagctgtcatgaagttatgtgcgtgctctgagctcatcataggtcttagagcgtaatctgttaacaatggctcgaatgaatcgtctaaaacaatattcgatgacttcatatgaccatgagggattgttagtgttggaagctcgtcaaacaagtaagataaaccctttgctactccttttatgatctttaaacgtgttatccaatccaatccagcggaattattcgctgcgaacgtataattcaaatagttagtattcacaaaaagttttataaaatgtcaaattattaacaattcttattcaaacataccatgaagatggcttgccaagctactgttgggcataaattcagtgactagaagcttctcctctctacggtaatagtaagcaacgagaggcaatatatttggatggtttaatctccctaaccgtctcatatgctcatgaaactcatctcttccgacattgttcatatgtttatacctcttcacaaccaatgtttgtccactagatatcgctgctttgtatgaagcaccaaatgttccgctaccaagaacttcagctgaagctctcaaaagatcttgaagatcgaatctttgaatatcgtccctcacgaatagaagccttcctcctggatcaggcatcgatcctctccttgtgtgatttacggattctgcgggtttattgttcttgtttgtggattgatgataattatagctctctatcctttcttttcccgcagaagaaggataagctgacaagaaattacgtcttcttgattgaacgaaacagaacacaagcgcgatgatcactagtattatgccaataacaatcaaaatgattgctagagtgtaaaaagatccggcctttttccccgtgggaggagaagtagattttggatcaacgggagataccggaacaacaggaacccccggagaggaagaggaacatggacttaagggagcatcacacaaacctttgttacctacaatttacaaaacatagaatattcatgtcatcaaaaatgcatcaaactcttgaaaggtttatgcaaaatttatatgaaaataatgaattctctagttgcacacctaaaaaggatgtcatgttgacatttgattctaaaagcattatatgacaatattaatatgtagaacatttttattgttacctgcaaaagagcctggatccatgtttcgaagactttcaggtatcggtccatcgagatcattgttttcaaagctagctaatttaagatccttctgttgaaaagatggtatttgcccttgaaattgattaccatttagcctcaactctaaaagcattggcaaagaggctagagaagaaggaattgttcctcggaatgcgttattagccagcaaaattttcttcaaaagtggcatacctagaaatgcatctgcgggtatctcccccgaaaaccggttattagacaaatacaaagatttcagcgaagtaaacctcttaacttgaggcattgggccattgaagttattgttcatgaagcttatggttcgcagattcttcattggaaccaatgggtcgaggtttagtttcccggtcaaacccattccctcaagttgtaatccccaaacgtaattgctacaaagaacaccaaaccaatttgctgtatttccttgacatggtgatgataatggatcccaactacgaaattctgaaccatttgctaatgtatctttgaatcgcaagagacaatctgcatctgaatccggcacaaccacctgagacattgccaccggacataacacgctgataaagatgatgatgaaaatgcaagaaggtagattcttcttcaaggccgtgttacacgcaagcgtaaacgggtcctcccaattgcgcattgcggttacacgcgcaatggaatcgatttgattgatgtgaaatctcttgttttcttctttttcttttttgtctttcgtgatcgccaagaaattgtgtgaacggaagagagaaaaacaaaacctaccaagaatagacaaagcaaagtatttaaatttgcaaaattgtgattatttttttttggatttgtggcatcttaagattattattaggtgagagagttctttggataaccattcaattatcttgttttaactttttaagttatatatacatgtaatcgttgttgtactgatttgtcatttgctttagttccaaccaaatttatttttctctctatatgagaattattttggtataactgattttaagaatcaggcataactggtggattgttctatatgatgatgataatatctgaaccaattaaacaagtaatgtgatataactcggtagagttttagagatttctgttttatcaccagttacccgttaaaaacaaacaaacaacatgttttataaattaatcgacaaatatggtcagtcaaactaggagtaaaacttagtagtctcttaattttcttttcaaaattctagtaatgaaattataaaggatgactttgttattcctaaattatgtgactgcgcacgattaagagttgttattttcggacagtgttactcgaggaaagacataaaaaagacaaaagacataaacaatgataaaattaaactttatggggagaaaatcaaatgtaaaaaaatgaagaaaaagaaaatggaaggtcaaaaagttgaatgctgaaattgttcttctgaaagaacgcggaattgggttaaagagctttaaagtgttggtgggccgacacgattggtcggcatgaaatcttaaggtgtgaacctttcaagtacacatttctgctgcttatgcagtgtccatactccaatttcggttcgtactggaaaacatactaaagtggatgtatatttgataacagtttttgtttttgtttttgaatactagtattatataaaagagatttttcctagtctactaatgtttcaatccaatccattgtagttatcaaactagttatttatgggtattcaaagctgataatatggtactgcggggtagtagtataatactaaataattacttacgaaattaataatgaaatgagtaattatagaatgaatgcatataattaagtgtttttttttcacaaaagaaagacgcctgaatttaataataaagtgtattaaatattaattcacatttgtcgtaaatacgtggattgtaaaagtgtatcaatcgtatgtatgtaccactggttaaacaaatgtatgatgcatcaatagtcaaactaaaaaactcgctgatctttgaacacgaagttgaaaaaaaagtcgaaaaaatctcactgatgtatgtaaaaagaaaatatgttggtaaataaaagaaaaaatgggaggataaaaaggcagggaataatcacaaacttttaggcctaaaaatgataagtgttggaccaacccatggcttgcacgtttggtctcatctcgttacttttgttttcgatctcatcgatgtctgcgtctgtgcggaccattttacccttgccttttattacttcactaaaagatgaacacacgaattatttagacatgcggcacacaattttattacggttaagtttacagttttaaggcgaaaatatatcgttatgctttatgctacattaattatgtatagtagtactccctacccaaaacaaagttacgtatagtactttgattggccatcgaggactcaaggtttactaaatagaaagtaaaacaaagagatgtttattgcattcgtcgtccacacatagaataatcaatcatcatcatgatttgttttacattcttaagttctcgtaattattcgtttcgtacgtttttttaattttattccaaagaatttaacattaatattttgaagaaccatgtgctactagcctactattatactcaattgacaacaacccattttattttgcttttgctcgtgtttcattcatttcgaacgattggatttacataaaatagtctatacacaaagacaaaacaaaatcgctttttttttttttttttttttcattttgtatactattattgtggaaaacgcaacatttatatatcatactattgatcttgcatggttccatgaattttctaggtaaaaaaagtgtgttaatagaacaaacaaaactgttaaaacatgttgaattacttaatgcaatttgactctggtaaaacatggtcagccacgacatttcaactactctcattaactcccaaatgtttcatcatttaatatatgaaaatcattatataatactcgtatgattcaattactcagataatagtgatgtaatgcatgacacttgtttttggaattttattttatttccagttatatattacagttgtttactcgtcagactaatattgactgttattagaaataaaggtacttaattcttattctttacgcgctacaaaataagcaacaatggcaaaaccgtaaaaatgagtagtcaaaggggtatttggttttagaaagagatgaggataaaaatgaggttaagcgtttttattattcccctggtggaaagtaggcaagcaagtggtatcatcaacaaacaaagcacttctcttttgattcgattctctctttaccttgaagcttcaatatcaaccaaatcttttttctcaaaatctcaaagaatctctcaaactcagtctcctatctgtctctctgcaaactattaccaaccaggttagattcttgatctcaaagtttccatctttttattttatgtcggttgctttcgctgagttctggtttctttgattttcttagttacagaacacaacttactttgttttttggtttgggctgtgttgaaaattgagcttagggttttatgtaacagttgtcttagctcatagttacggttaaaaagctctcaactttgtctccctaatgataattgaattcaatcttgtttatgatttttctctattgggtcgatctttaactgaatctatctacataaagatccaaccgttttaagaatcttagggttcttatcatcttgttcaaaactaagattctgttttttggtgtggcagataatttagatatggaagctactcagaaacatatgattcaagaaggatcttcaatgttttaccatcaaccatcttcagtcaaacaaatggacctttctgttcagacatttgattcttactgcacacttgaatcctcttcaggcaccaagtctcatccttgtcttaacaacaaaaacaactcttcttcaaccacaagcttttcctctaatgaaagtcccatttctcaagccaacaacaacaacttatcaaggtttaacaatcattcccctgaagaaaacaataactctcccttgagcggttcttcagcgacaaacaccaacgagacagagcttagtctcatgcttaaagatttggagactgcaatgatggagcctgatgtagacaacagctataacaatcaaggcgggtttggacagcagcatggagttgtttcttcagctatgtatagatctatggagatgatctctaggggagatttaaaaggagtgctctatgaatgcgcaaaagctgttgaaaactatgatttggaaatgactgattggttgatctctcagttacagcaaatggtttctgtttctggtgagcctgttcagcgcttaggagcttatatgcttgaaggtctcgttgctaggttagcttcttcgggtagctccatctataaagcattgagatgcaaagacccaacgggtcctgagcttcttacttatatgcatatcttgtatgaagcctgcccttatttcaaattcggttatgaatctgctaatggagctatagctgaagctgtgaagaacgaaagttttgtgcacattatcgatttccagatttctcaaggtggtcaatgggtgagtttgatccgtgctcttggtgctagacctggtggacctccgaacgttaggataacgggaattgatgatccgagatcatcgtttgctcgtcaaggaggacttgagttagttggacaaagacttgggaagctagctgaaatgtgcggtgttccgtttgagttccatggagctgctttatgctgcacggaagtcgaaatcgagaagctaggagttagaaatggagaagcgctcgcggttaacttcccgcttgttcttcaccacatgcctgatgagagtgtaactgtggagaatcacagagatagattgttgagattggtcaaacacttgtcaccaaacgttgtgactctggttgagcaagaagcgaatacaaacactgcgccgtttcttccccggtttgtcgagacaatgaaccattacttggcagttttcgaatcaatagatgtgaaactcgctagagatcacaaggaaaggatcaatgttgagcagcattgtttggctagagaggttgtgaatcttatagcttgtgaaggtgttgaaagagaagagaggcacgagccactagggaaatggaggtctcggtttcacatggcgggatttaaaccgtatcctttgagctcgtatgtgaacgcaacaatcaaaggattgcttgagagttattcagagaagtatacacttgaagaaagagatggagcattgtatttaggatggaagaatcaacctcttatcacttcttgtgcttggaggtaactaataaaaaccttgttcggtttcagaagagattagaaacttcttttaaagtttgcagaatctgtttgtaaaagtaaaactcatgcatgatccgaaggaacaagttgtcaaatgttgtagtagtaagtgatatgttgatgaccccatatatgtttaaggtttatgtttttttttttcttttctcacaacaaactatgatttgacatcaaacttataactctctgtttatgatgtgataaattaatgatatatggttttttcttgtcgtttgtattacgcacaaggttaggaaaatttgcagatttttttgaagcaatatcattaagttaatgtagcaccagacatctaattgactaatcgaatgtcctaaacagtcaaacgtttaaccaattttaaggtgtttagaatagtactcaatttttcattataatgtattgttttttttaataattttttaattttgtttcattatattaaatgttttacaagtttggatgcaaatataaaatgtatttgatattttgcagccacttttgtaattggttgattttttaaaagttaaataatcgaacgttaatgtacgtttaaatgatgaacatacgaataaatcaaagttataaccaattagttgtttgattaaacaatacttgtaacaaaaacatacatgatcccatttgtaaccatcgttttaatgttttagttaagagataataagagagaaccggaattctttttttgaaaatgtagtttgaaaaagtggttagagataataagagagaactggaattgtttttttgtactttggttaaaactatggtacgtttggaaatgaaacaaagataatcttgaattattatacatttgaattattgcgccttctatgatccgaaagatagctgttcaaaccacagttttaccacatttggaagcagcgaaataatgttcctcacaacaacactatcttgcctcgacaaaggaagcattttggaaacttaatgcaaccttggattagatgatttcacttttgtgtctttacatttatttgttaccttgtttttaattttggcaaggtctcaaaaactttaggttttattttgtgtaattcctaaacttttcatttataatgatatttacagttatatcaaaaatattcattcttattttccctttaactacataataaccagagagcagctttggatatataatgtcggaaggcatgctcttatgctactccatttcacattaagtctatgcttcgaaatttataggaacgaaatgttccaatctttcattgtcttcctctattatttaaacccaaaacctcaagcaataaaagcagattgttttctttgactatacaaaataataaaatttaaatcctacaaaaaaagaagaaaataaaaagctaaaaagaactaatgtttcacatagtttgtaatatattatttcgactatttacgttcaatcgtctgtttcaattcattcgttcgattggtaactaatgatacggttcaactcacaagcatatcaaactagataccaaacaaacctgagttcagttttgctacaactatgaacatatagacgagtgtgtaatcaatcggtcaaacaccactctccatttttgtaaaaggacaacaagccctataagaaaagatgatgaaaggaatgtggaaactccaaattaacaccgtttccccaattttcatgcttaattattcggaatatattcttggtccattaaaagcttgcttcttctctatttgtatatggtcattttttgttacttagatcttgatggatgtcatgattacgtaatcattcgtcagacaaaaaagggagtttctagaaattttgttttaaattatctttgtcgtttttatgggtatagatatatataattttcaattgcataattttcaaattagtatggtaccacgagaaagaaagaggataaatggtcaaaccgtcatccttacgtcatgctgtcgctgataaacgtgtgcgcttatctgaactaatctacctttattcaaatactatatgcaattgaacaatactttattctttattgttttttttttggttttctgttgaacatattattagttacagttttttttttttggtaattgaaacattttatttttgtcaacaactttttattaaacagatcggatgtatattaatagtattattcttttgttacaaattttctatatccaagttgagtccaacatagatatattattacaattcaaaatgatgatcatgaattctgtatagtttgttgtacagtattattatggtcaagaatgctaatttctaacaaacaaaaaaaaaaatgacaagaaaatgagaatgctaatttggtagtaattattttgttatctccactgacgtaacaaaatgagtagagtagacaataaccatttggtcaggattatctacatgattaaaacaccaaatttactctttcatatgtcgtaaaaaatgtattgtttggttgttcctacgtaaccatgattgatatactgtatgatattgataccccaaataaaaacacccataattatatattggtaagaatttcttcattttgtgtaatcaatcagtcaaacgaaatcaacaattcaaacaatacattttaaccgcttaaaatacatagtatatatatactgtcatttttaactttcaaaattcttttaccatgctactaattctcatatcataatattggccatggaactttaaacgctggccttgtttagatggatgcagggttgttagttgttacagcattggtcagactcggaccctaattcgaatttgaccaacatttattttcttcactaaacttttaacatatggacgaccactaaacaaaaacaaaaaaaactgtggattcggatgcaataattgggatatatccacggggtccattaacgagtcaatgtgtgatttgtacacttttgcctttcaaaatgaaacatctttattgcgagttattataaagatagaagatgatgaattgatgacgcaactcaaaccatcgatgtttgaatctaaatccctattttctaaacatatacttctgctaacgtattaatgcattttggagataagtttatcaaagaaagaaagtttttaaactgacaaaaaatggcgtcttattataaaacattgactaataaatcatcttattatttttggggttacatcatcttcttaattttggccaactgtcaatacaacaactctttccttaactataaatacatcttcatcagagattcaacaaataaacatatttttcactaactctctctaagagattcaagatgccaatctcagagaaatcttctgctactaatacgaggttagttgttaagaagcttttcgccagacagctacatgaaggatttggtgctgttgtaagaagaagcatcggaaggtaaccaacatgaaggattttgtgctgtttcattagttccaagtgtagtaatgaaaaagaggtttaatatgtgtgaaattttgcaggtttgagttcagatacttcgacccatttcttgtcctggatgaattctcaggtgggtcttgtctcttttcttcctctgtttttgctctgttcttttcaatccaacttgtcagattttaatgatctttaaaaactgcagtttcagctcctgcaggattcccagatcatccacacagaggttggttttgttatcgttattttaaacgcagtttacacgttaagtttgcgtttacacgagaaaaaacaaatattttgaataataaatttcaactttcataaagatgttagtatatacctttcatttgacgtttatgtttataattacttaaattaacatatgtataatttttctttaagatattttaagtcatggtttcatttggaagcacatttaatttatacacaaacctaagttgcaatgctaattaaaaatcaaggcattaatcttcaccttctgataaaagcagaatacatatgaccacactaaccaaagctatcactatatcatggttcttcttgtttactatttgttttttcttttccaaaatcaggatttgagacagtcacttacatgttagaggtattgatctcttctcatcttcttattcgatttctcaagaatcgccacgcgtaactcttgatgaatatgtatacatagggagagattttgcatgaagactgtgaaggacacaaaggagtaataagagaaggaggattacaatggatgactgcaggaaaaggcattgttcattctgaaatgccttcttctaattccaatggcattactcacaacaagggcttgcagctttggatcaatctctcctcaagacaaaaactgtaagcttcttcgataagaaacatttgcggattaaccaattgacaatgagtggagtgatccatgttattttatatactagattaggtttcttcttacttgaaagtccgtgaattctcagagtggagccgagttatcaagagatagagagtaaagacatagcagaaacagagaaagatggtgtgagagttagagtcatagcaggagaatggaatggagttaagtcaaagatctgcacaagaacgccaacaatgtatttagacttcactctctcgccgggttctcgaatctctcaacccattccacttcactggaacgcgtttgtctatgttcttcaaggccatggtcactttggggattccaagttacaacattcagccgctgctgcgcaccacttgctggttctaggcctaggtggtgacatgttagaggcttggaacggttctgattccggtttgcctcttcggtttatccttgtggctggtgagcctataggtgaaccaatggttcagtttggtccttttgttatgaacacacaagaagagattgatgagaccattgacgactttgagaattttagaaatgggtttgaaaaagctagacattggaagtctcaagctgcttctgccttgggactgttctgaaatctttttgcctctagttataattttttgaatacttctttacctgttattgtaatgatctttccaaaattattagagaaaaattggagtgtgagatctctaatcatttcttagtaagactttatatcaaaatgtaagacgatactctttattcataaaattgaagtaaacattattttggaacattcaaagtattcagttcaagaaaatttggtgttgttgacttcaatctccaatgcttctacaaacttatcagcataaccacttaacaatccaggactaactaaagtctctttcaatttcttatgattcctcttcactaagttcccaatctcactatctatatccatcacagatttaacagtatctctcaagtcctctttcgagaaccatccggaatcttctctctgcactttcacagagacttcgagttcttcagtcaacaatcttgtgatgagaacttgatctgccaattgtggaataaacacaatctgacaatcactaaccaaagactcccacattgaaccaaagccacaatggttcacaaagcaacctactgatggatgagacaatatcaaaggttgttccaaccatccttcccaaacgattccatgctttttaacccgttcttcgaatccttttggtaacgcttcttgaaccgttggtgagccttttggcggcataaccgatattaaaaacggtagacccattagctccattcctaaacagaattcttgaaattgatccttctcgaaaaagaattgagtgccaaacgcacaaaacactaccgaccctggttcaaatccgtttaaccagtgattccatcggtcttctagaaatttaccactcttattttgcggttcagggagcattggaccggttaagagaagtttcttttgacattctttttcgatgaaaccgcatagcttaccttcaagttccacgcaggtccttatggaaacgacgtcacagttcttaaggcctttggtgatcagaccgaaaagctcatgggaattcgcaaagagagaacagacgttagcttcatgtccacgtaacgccactttggataaaggataatccggcggaggaaaccctaattcagccctaggtgcaagaaccatagctacacaagctgccgatatgatctggtaattgacactctttattccaaactcttctgccatttctggaacccaatgaacaaaatcgaaaaagattagatctggtttcaaagcacggacctttgcttcgatctgatcgcgtaagagatccatggcaacgaatatgggtttcttagttgagtttgggagatccgaggctgtctcggcgccaaaagggagaccatcgacaggagggagagtaagaggctcaaagacaatgctgtctgggaacagattgagaggttggagctgcttatgagctttcttggggaggaagaaagtgaccctatgacctttctcagctagtttgttggctaaatgaagatatggaatcatatgaccaaaaccaaaccatggatacataaaagcatgaaattttgatcccatttcttcaagagagccaaattgttgaccctttttttttctttactcaagttatagaagaatggttgcttttctttgtgtagttgatattaaaagaatgtgtcttaaatattaagtgggattatttaagctgtgtttaggtgctaattgcttgattgcatgtgccaccatgtgttgaatgtataaagcttgcaagttgcaacaacaaatctttaaaatatagatcagtgttttactgttaacttgcattataaattttactgttaacttgcattataaattttactgaaataatcaaatctcaatgctcaaaatccaattttaacagttggaataggaaatccacgtgtaatgattctattagttaatgataaaagccctatgctttggagtggggcatagtcatggagctaccggtgaagttgaacggagataaaaatataatctttttgtctgtcaagatcttaaattgacaatttgagagagcctgagagtagttttgttgggtacccagttgaaggaagtgagaatcagaaaatgggggtttcgatgttggattcctcatggagtttccgattatcctcgaagatgtctccttcaccaacacaaaaactcgctagctctttgacagaaagagatccaatttctctgaatttgaggtttgatcattccattagggcatattcagctcgagctctaaagtgcaggtctgttaagtctgaggattttgttgagagaagtagcccatttgaggtaacatactaaaatctctgcttcgaatctgagttagaatttcattaaattggttctcatttctagtctttgcaatagaatttcatgaacaagttcatcacagcagaaagagtttgactttgcttagatagccaagtccttagagaattagaaacacaagaacaagcgtaaattctgatatctcctgttaaagtcttggccttttttcttgttcaattgaatgaagaagtaaacttcactttatctttaatcttctttggagatttcggtttttaagtactgatagtttccccttgaaagaccatttcgatagaggttattctcaacttattctgttgaattctcattgtttgaaaggttaagaaagagcttgagatttgcttcgacctcgtacataggctcgggagaggcattgtgtacttaggttccgccagaatcccaccaaaccattcacattatctgcaagcacaagagttgagcagagaagtaagtaagacccttaacactccacaagagcttagtttagatatagatttctcagagttgtgtattttatcaggcagcaactctgttggactgtactacatggtctggtgctggaccagggcttatggatgctgtgactgaaggtgctttggaagctgagaaaccggtcggtggcatcaaaatagaaaaagaagccggtgaatggaccgcatcgaagtttcatccatatctccctcctcagaattaccatacttgcaggtaaacatagccacacaccattggttattacttactgtgcttgcacaagaatgagtgatccctaaaatgcaaaatccatgttaggtttttctcggcgagaaagcatggattagtagatgctgtgattagaaacaatgtatctgagaagacggcgataattgcacttccaggtggcattggcacgctcgatgagatgtttgagattttggcattgattcagctcgaaaggattggatctgcattgccggttccattcattgtgatgaattatgatgctttctattcaaagctgcttgaattcattgagacttgtgaaaacttgggaactgtttctaaaggagaagtttctgcactgtggaaggtatgcaacaacaactttgaagctttgacatacttagctgaattctatgacttgcctgacggttctgcaaagctggaaactgaacttagaaaaaccactcccactcgtggatgatgagtttcgtaatttttaactgtaagagatcatatttttgaccatgagcaaccaatttgaagctactcatgtggcacatgtagcatatagattcgtgtgtttgatacatacaccaatcagatttgttgttatcactttcaatcttatgtttcttctcttagcttctcgtgttatccttctacttcactgaacttatggtaatgggaatgttaaagctagtgaagacaacaatgacatcgaagtatgattatcatattcatgtgaatggggttttaaaccagtttataaccaagcaagaccaaacaactttctgatacaagaaccaaaccaaaccaatcagaattgtggtccatcttcctcctctagtgccaaaaacaaaaaagttaaaaaaaaaagatgcaagattaagatctttttaaagtaagtttctttagaacctttagagccgttgtggtatagaaactgaatacaaacaaaaataaaaacttgagtaaaagagagaggcgtctgtaatccgtagatcgtgcctacttagaaaagtctatttcacactgaatattaaacaataacgcaataattgttcctctttcactttctacatcctttcttcttcttcctcttctcttccttctccgttgcaaagctcaagaaaaactaaaggaatccaagtggtaaacctcagcgcaaatttcaagaagaagaaaagcagagaaaagttttcttctttttgacctttcttcccctaaattaaaggttaacagagcctcaatttcgtctttttcttataacgagaaccctttaccataaaaatctcaactttatcccttattcttatctgcaaaattcgttctcgtcccttggattatgggtttttttgttcctcgagaaagttgattgctttcttggaatccatgcgtgccctttctctttgttgttttaaaggatgcgtctgcgttagattgttttagtaactttgtgaattgattaagcacttcttcaccataatcaagtttatagcttttgcttctgatcaggtaaaaataccaaaattttaggagttcttgagctttgtttttaatggcaatatttgattgcagcatcttaaagttctataatttgccagagatctgatttgattcgcttagtaatttctgtttcttgagttagagttagtgtctctttgtttgttatctgtagaatttgaaccaaactctaaaaggtttgtctttattttatttgtattatggatgattccaagtaagagctgctgtctttttttgtttgcagatcctgttatggaatctccacattctgaggcatcaatcgtgaatggtagtatccatttgaatggcagtggtgaaaccaaaacaaagaatatagtcatgtcgtctgattcagacagtttcatcggtgtgcttgaggtttttgttcaccaagctagggacatccacaacatctgtatctatcataagcaagatgtgtatgctaagctttgtctcacaaatgatcccgaaaactccttgtccacaaagatcatcaatggtggagggcaaaaccctgtcttcgacgatacccttcagttcgacgttaagaacctggattgttcgcttaagtgtgagatatttatgatgagccgcgtgaagaattatcttgaggatcagttacttggattctctcttgtacctttgtctgaagtgattgtgaggaatgggaaattggagaaagagttctccctttcttcaaccgatttgtatcactctcctgcaggttttgtcgagttgtctctctcgtacgcaggagattcgcctgacgtgatgcatattcctgcggttccaactgcggatgagaccgagttggctcctatcgagtttgatgagagtgagtttttggatccaaagattgtctgtgaaaacaatcaaatggtgtctaagtacttctccactacgtgttctgattctgatgattttgcaagctctgaaactggctttgtggaagtaaacagcatcctgtctgcagttgttgaaactgctgttgacgaagcagcaccggccaattctgtctcaacaaatggaatctcatctccatcaactgcagttagctctggctcctcgggaactcatgatgtttcaaagcaatctagtgaaggaaacaactcagattcagaacaagaagcgaagaagccaacagatatcatcaagagtggtgatttagataagactgatgaagaagcagttgtgaaaccggttctgacagtgaacattgaaccagagcaaaaggtagtgcaacaagatattgttgacatgtacacaaaaagcttgcagcaattcactgagtcactggctaagatgaaacttcctttggacatcgatagcccaacccaatcagagaactcaagctcctcccagcagacgccaaagagtgctagctcccgtgttttctacgggagtagagccttcttctgaagctcagaaatcatctcaagtttggcatcagaagtagcgagcatgtagtgaaagtgtaataagttaaaagtagacactatctaaaatgtgtaactatcttcctttgaagcctttagcttttcttgttatctgcaacttttccaatttagtactaaagtttcataatctcttcccttctcatataacagatagacataaagacaagaagtttgtgtttgaagaagaaaacaatacaaagacataaagacaacaagtttgtgtttgaagaagaaaacaatacaaagacagcaagttccattaccagttgcagagatatatgtcttcaacatcaacaggatatatcaaattcaaccatcatgtaaggatctctagattgacggtagctagatggttaattcgaaaatacccaaatctagttccattatcagtttgagacatatgtctgcaacttcaacaagacatatcatactcctccatcatcaactaaggatcaaagctagctgggttgattcgagcaacaggaatgcatttaagtggatgagccatggtcagcgtcatttctccagtctcttccatgttaaccttatctccattgattctccaatcaaaaccctgcaccattgttccaatggctactcccatgaagatataacccaagttttttccgagacatcctcttcttccactcccgaaaggaatgaagttcaaggctagctgtgctttctcatcttctttcccttttaaaggagaagtcatgaacctctcgggctgaaattcttctggatattcccatgaatccggatctctcagcaccgcataagcgtttaccatcattgttgtgttctgccctatgtaataccctccgatcttgcatccttctgttgcattcctcaccaagattggcgtatgcgggtgtagtcttagcccttctttcatcacagcctgtaaatacggcaggttggggagatctgtttcttgaatcagtctcctaaccccaacaacagattctatctcttttctcaacttttcaagaatctcgggatggttaatgagttctgccaatatccactgtattgtttgtgctgaagtatcagtgcctgcaaggaaaatctcctacaaccacatgcacaatataaagactttgatgtgacagacattaaagatatatatcactggaagaaactcaagacattaccacaaaaagtgctttgatttggttcctggaaatcttaaactcggcgttgtcatctgcacaaacttccaatagaacatccatcatgtctctatcctctccattgttgggattttcttcgtgttccttaataattttctccagcaattcatcgtacctctgcgagacctccatgatttccttcccaaacaaagagatcccgaccagcttggaaaattgaccaacaatgctagctatgaggaacttcttcgtcaaactaagtgatttggtcaccaaacccctgacttgctctgcttcaccgttctcctctgaacagctcctccccattgtcatcctgcaaatgctgttgttcgttagcttcatcatctctttaccaacgtcaacagtctcattctttgccgccttatcaaacaacatagcacggaaagtttggagttctttcccacggaggagccgtgtctgctcgagggaatgagacccgagaagttttttgactaagagcttcttcatgaatctccagtaatctccataaggaactgagacaaagccaaaagatccaaaaagtaatgatttttccattataggagtctgcccgctatcacggctagcaaagttcaggtcttggatcctcaaaacttcgttggccatggagcccgacgagactagaactatagggatattgaaagcgcggaggtgaaggaagggaccatacttggaggagagtttctgaaaggatttgtaacatggaacagagaggagaaagtgaagatgaccaatgatcggtagagacggtgggctcggaggtagaccgcagccttgaagttgtgggtcttttggtttcttgaagaagaaagcagagaaacagaagagtgagaagattgctaggaggatgaagatgaagcagagctgaaagtcaacgctgattgctgccattgttgtctaaaaactgcagagagggttagatgaagcagactggttttattatatgtactctttagatcaaatatttccttcagatcattagtgatataaactagggaataattcaatagtttaatctttaagggacgttatacaaggagacaagtcaagtaccacatgatataaacatatctaatactaaataaaacatcccacgctatgcatgggcttgaaaactcatatttaaatatgtagcaattctcatatatttgatattgaacttccagtaatctgttattatcacatgatataaaaatatctaacatataacatgtgaaaataggtttaagggtttcttgagctaaaagaaaaaatctttgataaccaacagaaaaataattgataacaacaaaatccccaaaacaactttgatctgacttgaatcacgaacctgaatctaaacttgagcttgagactgagattgataaggaagctcacatcatctgagaaagggatactgcaatcttagaactgataagggcattgtgttttacaagcgcaagtaagaatggagtttctgcatttccagtaactttttgttccctggccaaaaccaaatttaaacttcaaacgctgacataagaaaaagaagcaaagcctgaagtattctgatgcaagcatgaatgaaagatattagcatatcttctttgataacctttcttctgtaagagcacgctgtgttgctgattcgataagatttccggcggctgaatgctgtttcggaattggaacagcaaataaaattcacgcctgacggttttttcgtttcatgtttgcatatggaaaaagcgggtctgtctcaaggtggtaagggatcaaagtgcaaaaatactttttaaaaagaggaaattttgggagaaagactagcacggtcttcagggctattttacacgggaaggtgcctaaagaagtcaatatatcatccacagcagaagtaaagtgattgagttcagtgctaatgaacaattttgcaccttacagggagttcctctgtgtcgttacgaggaccatatgttccagtatccagagcaacattggagggaatctcctagttcattgtttggtaactcataagccatttcaacatcagtttctcgaagatgctcactcacatgtactgtgattaggctgcttaattgataaccataaaatatgtaaccacattaaaaaaaaaaaacatacttggggagaaatcttgaccagactcctgagctgcttcaaaccagttgtaagagaaagtaaaaaaagattggaaaaagactagataaattggaaattcaaaaaagctgggatcccgatcttttatatatcaaccttgttgtgaatttgcttcaagaggtgaaagatgattctggagattcgagattctagattgagcagaagaaactcaagacattaccacaaaaagtgctttgatttggttcctggaaatcttaaactcggcgttgtcatctgcacaaacttccagtagaacatccatcatgtctctatcctctccattgttcggatccttttcgtgttccttaataatcttctccagcaattcatcaaacctctgcgagtgctccttgatttccttcccaaaaagagagatcccgaccagcttggaaaagtgaccaacaatgctagctatgaggaacttcttcgtcaaactaagtgatttggtcaccaaacccctgacttgctctgcttcatcgttctcctctgaacagctcctccccattgtcatcctgcaaatgctgttattcgttagcttcatcatctctttaccaacgtcaacagtctcattctttgtcgccttatcaaacaacatagcacggaaagtttggagttctttcccacggaggagccgtgtctgctcgagggaatgagacccgagaagttttttgactaagagcttcttcatgaatctccagtaatctccataaggaactgagacaaagccaaaagatccaaaaagtaatgatttttccattataggagtctgcccgctatcacggctagcaaagttcaggtcttggatcctcaaaacttcgttggccatggagcccgactagactagaactattgggatattgaaagcgcggaggtgaaggaggggaccatacttggaggagagtttctgaaaggatttgtgacatggaacagagaggagaaggtgaagatgacctatgaccggtatagatggtgggctcggtggtagaccacagtcttggagtagtggctcttttggtttcttgaagaaaaaagcagagagacagaagagtgagaagatacctaggaggatgaagatgaagcagagctgaaagtaaatggtgattgctgccattgctgtccaagaattgaaaagagagttagatgaagcagaacagttttactatatacatatccttgagatcagatctttccttgagattatataaattagtaattcaatagtttaatcttcaaggaaccacatgatatataaaatgtttttggatccaaagacaatcaaatggtgtttaaatacttttccactacttgttttgattctgatgagtttgcaagctctgaaaccggctttgtggaagtaaacagcatccagtctgcagttattgaaagtacagagccagacattgcgctttggagaggtaaggacggaagtttccttctgagtgtggttggaaatgcacaatcgtcttacaacgggggataggatgagcttatggaatgggaatgtcgacacttcgtgtgttttttgcagagtgctagagaccatttatttttcgagtgttcttatttgtctcagatcaaaccttttggaaatatggcacaaggtttgttacagggtcagtttactactacctcatacaatggtattgtttctcagctgcttgattctagattaacccccacggtgaggtctatactacggtatgtgttccatgttagtgtgcattgtgctaacgaaattagcgtagacatgggcaacaaagacaacaagttctgttgtgaaacagcagaaatacataaagacaagttctgttgtgaaacagcagaaatacataaagacaacaagttctgttatgaaacaacaatattagtgatcaaactccatatgaaaaaacaaagacagcatgttccattattagtttcagacatatgtctgcaacttcaacaatacatatcaaactcctccatcaaccacttaggatcttcagattcaaagctagctaatgggttaactcgagtcacaggagtgcatttaagtggatgagccatggtcagcgtcatttctccagcctcttccacgttaaccttatctccatcgattatccagtcaaaacactgtaccattgttccaatggctactccagtgaagagatagcccaatttttctcctggacatgctcttcttccgctcccgaaaggaatgaagttcaaagctagctgttctctctcatcgtctttcccttttgaaggagacaccatgaacctctcgggctgaaacttgtctggattttcccatgaatctggatctatcatcatcgcataggtgtttattagcatcgttgtgttctgcggtatgtagtaccctccaatcttgcatcctttggttgcattcctcaccaacattggcgaatgtgggtgtagtctttgtccttctttcatcacagcctgcaaatacggcaggtttgagagatctgtttcttgaataaacctcgttgttccgacaacagattctatctcttctcttaatattttaagaatctcgggatggttaatgagttcggccattatccactgtattgtttgtgctgaagtatcagtgcctccaaggaaaagctcctacaaccacatgcacgatataaagacattgcatgatccttatgcgacagtcattgaagaaaaccaagaaagaaactcaagacattaccacaataagcgctttgatttggttcctggtaatcttaacctcagccttgtcgtctgcacaaacttccaacagaacatccatcatgtctctatcctctttcttgttcggatcctcttcgtgttctttaataattttttccagcaattcatcgtacctctgcgagacctccatgatttccttctcaaacagagagatcccaaacttcttgagaagtcgaccaaccgtgttagctataaggaccttcttcaccaaactaaatgatttgatcaccaagtcttcgactttctctgcttcactgttctcctctgaacacctcctccccattatcatcctgcaaatgctgttattcgttagcttcatcatctctttaccaacatcaactgtccccttctttgccgccttatcgaacaacatagtacggaaagtcttgagttctttctcacgaatgagccgtgtctgctcgagggaatgagacccgaaaaggtttgtgactaagagcttcttcatgaatctccagtaatctccataaggagctgagacaaagccaaaagatccaaaaagtaatgatttttccattatagaaacctcacgttgacgggtagcaaagttcaggtcttgggtcctcaaaacttcgttggccatggagccggaagagactataactattgggatattgaatgcacgaaggtgaaggaggggaccatacttggaggagagtttctgaaaggatttgtgacatggaacagagaggagaaggtgaagatgacctatgaccggtagagagggtgggctcggaggtagaccacagccttgaagttgtgggtcttttggtttcttgaagaagaaagcagagagacagaagagtgagaagattcctaggaggatgaagatgaagcagagctgaaagtcaacggtgattgctgccattgttgtccaaaactgaagagagggttaaatgaagcagaacaattttattattacatccttgagatcagatctttccttgagatcctttgtgatataaattaaaatttcaatagtttaatctttaagggtaccacatgatataaatctaatgactaatatataacatgtgataataagttaacgagtttctttagctaaagaaaaatctttgataaccaatataaattgataactaccaatccaaaacatctttgatctgtcctgaatcatgaacctgaataacttgcgcttgagcttgagtctgggattgataaggaagctcacatcagctgagaaagggctactgcaatctgagaaccgataagggcattgtttttcacaagcgcaatgtctggaaatgtgtaaaggaactcaaggttttacaatgctgagacattgctacgctactgttaagccacggaaaggattcggattttggatacagataagaaaaaatctgaactatttaaagtaatttggtggaatattaatgattaagggaacctctaaagaaggatacttgctgcaagtgatgtgcctccggttaactcatttacccgtgcaagtaagaatggagtttctgcatttccagtaacgttttgttccctggccaaaaccaaatttaaatttcaaaccctgaaataagaaaaagaagcaaagcccttgcagtattctgatgcaagcatgtatgaaagatattagacatcttcttataaccttgcttctgtaagagcacgctgtgttgctgattcgataagatttccagcggctgaatggtgtttcggaattggaatggcaaatagaatccccgcctgacggtttagcttcatgtttgcatctggcaaaagtggttttatctcaaggtggtaagggatcaaagtgcataaatacgttttaaaagaggaaattttgagagaaagactacacttgcctattactctagcacagtcttcagggctatttacacgggaaggtgcctaaagaagtcaatatatccacatcagaactaaatatctatgcagaagcacctgattgagttcagtgataatgaacaattttgcaccttacagccacttttttctgtgaaaaatgctggaaactcatcgctcttgtatgcagcaacatacacttcttgagtttcctgcattgtcaacaaatagctgttgtgaaaacttaaactcttgattgttgactattaaatatgcctcggcaacagactatataccaaatattcaagagtctttggaatatcaagtattgatttaacgcctgctgatatcactgctattggagtcctcccaagtgcagtaagatcagatgatatgtccatcgctgcatcacaaacacaaattagcagcgcatgcagggtgaatattggcatcaacaccatcatctaaacagagtttctaatcatgtaactaatttttttttgtaagaaaggaataaaacggacatgaaacatacaatggttggcatgtctatggacaccacctatcccgcccgtcacaaaaacttggatgccaacctacaataaccaaaaatcctctgaaatgcaataaatgataccaaaactactaaagaaagatcctcctaggaacaaagccaattaccattgaagcgaaaaacaacgttgcagagactgtagttgcaccgtttcctcttgtagccacctgaaggaaaacatttaggcatatggaggagcaaaaagtccatgcattgattgatagaggtgtggaaatgtaaataacgtggttgtctctatataagaagctagttcagggtaggttgcttagattgatgcaatttgattttgtgaactaatgtaagagactgttcctacatgactgagtgtgtaaacaaatcttaaactggagaataaacaagtttgatgtttttcgattcactgatgaacataatgatggtgcaataagtagaaaaacaaccagaagtgactcacaacatttgctatgtcccttcccgctgtcttttggacactttttccgagagatgcaagacgttctagttcttcctcgctcagacctgtttactatatattagcatctacattctataggacgtagaagaagtctagtgcagttgatccttggcgaaaaaaatttataactctgatctaagatcttgaaaccaagttggttttaggatatgtaaacggccaaagttgactaggagattagtgttaacaggttcgataagtccaaatccaagaatctaaaacattatgatccaccagaaataactgacctatgcaaggtactccattaaggatagcaattgttgcagggattgctccattttctctcacaattgactccacctcttttgctgtttgcagattttgagggtaaggcatccctaaaaatagccagttaaagagaaacaagtgaaatcagaccaagatccaagaatataggcttatttaaaaaaataaaacaatgttcaataaaaaagtctacagaatgcaattcaaacaaatccgaataggacaaggaagaacaaaccatgggagataatggttgactcaagagcgacaacagcacgtccattagacaaggcttcagatacttggggagaaatcttgaccagactcctgagctgcttcaaaactagttgttaagagaaagtaaatcaagattggaaaaagtcttaaaacattggaaagtacagaaaccttgttgtttgcttcaagaggtgaaagatgattctggagattcgagattctagattgagctaaagaagaagccattctccctgaaagatagagttttttgaagtcatcagaaaagccaataaactactcaaaaaaatccagcttccaaattctcgatgacgaatcaaaacacgaccctaatgatcagaaatgacaaaattttcgagtcaaatacataagaagcatgaaaatttctgaatttacggtaacctaaaactaaaaacactacacagatgaattgtcttctggagcatcataaattcatgaatttagaacactgaaacctctaagaggatccgaaaagaacgccctttctgtgttctagtctaatcttactgccaaaacagtggaaaagtaaccaacaaagaactcgtttggtagagaattacccaaatccagttccgctcactaagtttatatgaagtttggcaacagaatctgaaagagatcggaaaactgaagtactgtatacaaggacaccgagaggcgagagggatctttgagaaagaaaaaaaaagattgttatgcatataaaccgggtttgaggaagcggttttttaaaaccagtacggttcatttttagggatcggttcggatgatttcggtattgtaacaaacgttggaagtgcgagatctaattgagcctcctatagtgtttgcgagcacatatccgtacacgaaggaccgatccgatctccgtcgccggcgatcatcgccgccatttgctcttgttcttcctcatttacgcgttctctctttcatactcgtgagcttcttcgattttgcttttagaccatttataattcttattgttcccgactgattgtagaacttttttgacacccaattaaatcggaactagggatctaatggttgcgtcgacttgatctctgtgacgtagaagctcttatatatggggctatgttctcattagtatgaagaaagtgtccctgatctttgttttgcagatttttcatttcgagtgatttttggttttatcatacaaattacaagccatggataagtcgagtgctttagagtatatcaaccagatgttcccaacaggtaatgagacacttgttgaacaatcatactctttgtacttcgattatggtttagagttgatttttgttgctgctgttattaggacctgtagttcagctgctgattagctgatagtttctgcatatgtgactgcgtttaccatgattttcaaatgtgtgttttcctttacagaggcatcgctaactggcgttgagccacttatgcaaaagattcagggtgaaattcggcgggtcgatgctagcatactctctgctgttcgtcaacaggtgggcttttttagtctacattaacgctagaatatattgtgtacgtgtaatctgtgcttctgaatcatattcatgggctggcaatcatactccagagtaattcgggaactaaagctaaagaagatcttgctgatgctacgcgtgctgtggaggttagtttctcataggttgatatgttctcttttccttcagtcaatatatcatatccttttttcgtttctcctatcagttcccttttaattcattcgcaagagattttgatcttctttttgatttatcacaggaactctctcataagattcaagagataaaatccaaagctgagcaaagtgaagcaatggttcaagaaatatgccgtgacattaagaagttagattttgcaaagaagaacataaccacgacaatcactgcccttcaccgcctcacaatgttaggtcagttagcaatagtttactctgtttaattacttcattattttaatcatggttacctgaaatcagaataatagctcaagtgtaacgaagccatgtataaatagtgatacgatgcttgtggcccaagtacatcataaacacaataatgaatttcgctacctcgctatggcagtctctgctgttgaacagcttcaggtgatggcgtcaaaaagacaatacaaggaggcagctgcacagctcgaggtaactttttcttaattcaacaatatgttgtgattgcttctgttacattggttgcagttcacttgctttagctttatgttcactattggaacccaaaccagctcattgtcattttgaaaatcaaatttaacgctaggctacctagaaaacgactctactcattttctgattatgttcttaggattctaattctataatatatatttcaggctgtaaaccaattgtgtaaccactttgaagcatacagggatgttcctaaaatcacggagctcagagagaagcttaataatataaagcaaatccttaagtcccatgtattttctgatttttccaggtaatgccttcaatgattcttcttctctttctcgattcctttacttcaatctcaagaacattacagctggaacggatttttatttctggtagagtttaagtgtgtcatgtgatgaattttgcacttttggtgtcataaattgagttgaatgcttgttgacatctttcttgctataatagtgcctgcatagtgactaaggttatttgttgcttggtttacgtaggaaaccaaagtttgttttaagatgtttttcaaatatttattttcacttttgcatcctctacagaccactcccctccctcccttctatttattcgattcctgaaatcaacatttaccaaaattgtatgatgttgttatctcagtttaggtactgggaaagagacagaggaaacaaatttgctacagaagttatctgattcttgcttggttgttgatgctctggaaccatctgtgagggaagagttggtaaataacttttgcagcagggagctcacctcatatgaacaaatttttgaaggagctggtacattggacttaatgccctaagtataactggcaatagtttatgtcttttttggattgaatttctaagaggttagctgttggcagaattggcaaagttggataagacagagcggagatatgcttggataaagcgtcgaatccgaacaaatgaagaaatttggaagatttttcctgcttcttggcatgtgccgtataggctatgcattcagttctgcaagcaaacaaggtattgcctctagagttttcaatgaacatatattcttcctccccttaattattgtagttcatcatatttctctaagagattctttatcctttctccttggagttctcaagaactttgggacacggctacataacacccctactcttctgaactagataaatagatatttgacctgcgcttttattgtgctatatgataccccctacttggcacgggaataattttaaatttgagaaggaagaaatattttgatacgcgaaatacattttttgttattagtgaaaatgttaaaagcttttataaactgtaattttttgggattcgttcataattatagagatcttataaatgcatggtatataatatctacttattaatgcatggtttgtgttttatcaaacaagaaagttaaatgaaatttgtttcattttgacataatgactaaatcttatacgagtatatattttagtaagtaaaggttagttttattagtaccaaatttttttgttcaattttaacttctgtttcaatgtatagaggaatacctttttttggtttgtatcttttgttggtatgtagttttgctgtgaaagactaagtcgcagtgggtaactgtgtcaatcttaatttaacaaaaatatgcagccttcttaactaactatcctgttttcccatcaatttttcaggaagcaagtagaatctattctggtcaacatgaaagagaagccagttgtagcgatattgcttctggtcaggaatactctctttgatcaataattgcatatgcatgcttttcctaacagaaaatttcattagcctctgaaggaaatatctaatgattttaaattatcttatcctgttccttcttttcactatcatcaaatcatgttacgttgaatatattgtggaatgtttcaggcctctgttaaagtttgatgtcattgaattgttaggcactacaaagtacagtggagtttgaaaaagaacttgaaaagaaatttggtggtggtgttcctactaaagatattgaagatgacattgaagaaattggtacatgggaagataatagtcagaatatatccaaaatccgcaagaaatatgaaaagaagtttgctgctagtcaagaaaccgaggagaatgtatattctatgttcttattctatattatggaaaaaacactctacaaaatttatattaacgcttacactttattgtgatagggttttcaacaggaaaagaccggaaacaaagatttatctgttactggagctggggtatattccctacctctagtctcgttctctccctgattttgttggctgatgtcatatctattgtaattctgaaataccttagagagcaagtgaaaggttctttactcttaatagattgtaggcacaattttgcatttatagaagacgggaataatatcttgcatgtcatcttcattttcgggtctacttgaccttactacatacctggaaaactgaaatgacatgtgatccacttgtgccattctatctttacaagatttatttactcactagatactcgaattcgcagtttaacttccgtggaatgatctcttcctgctttgaacctcatttaactccatatattgagttggaagagaaaacacttatggatgacctggagaaaattgttcaggtaatataatatttttcgcttcacgagattattttgttccaaggtttgtcaagttatcctagttttcgtttcgttctgtcaggaggaatcatgggatgttgaggatggaagccaaaataatgttttatctagtagcacacaggtgagtacctaggcaagtttcttgaagaagggttaataatagttataactttttacagatatttacattcttattcaatgtattaaatgattgacgacgtccactaggtattaattggcaggggtaattagattctttatatagatgtgtagaatctctacttgttacattgaacctacaacttgatcatacccactgagctggatagaaattttggattatgtccagggtgatgtttgttgtcgtagtagaaaaagtattcgtgtgaatctggatattatactgaagatgaatttcgaaatgtatcgctcgtgcatagtgaactatcaatgtcactagattagccagcaagaacttactaacattcacatacaaactatatccgtcacgttatagcttaacgtctgttaccatttgaaataccttgtttgcagctattttccaatataaagaagagcttgaaacgctgtaatactctcagtaagaaccagactttattcaatttgttcaaggtacatttttcttacgctcaatatctatcatagacttgtactgtgaagtcgagcaatgtcttagttagtctaagaaccagctttgtttgtggagttttagaatttttggagtaaccttgttagttgaatcagcttttctagccacctatgcttctacaagggaagggcatatacatgtgctctttaatgatgtttgcaagctaatttaaatgttctacttcacggtcttagataaggtggttgggaattttcagtttattcttttgaaatggtctcctttgtacaggtctttcaacgagttttaaaggcctatgctacaaagctattttttaagctcccaaaaggaggcactggtatcgttgccgcagccacaggcatggatggacagataaaggtgtgcctgcttcctgtttcccatgtgtgctttatgacttagttttaccttttcacttcctctgtgcaggtctcggagagagatgaaagggtgatatgctacatagttaattctgctgagtattgccacaaaacagtaagcttgttcttgtctattattctgttttcttgcctttttcacatttggcaccctcagcatatacgttgatacctgtgtatcctgttgcgacggatcaatggggttgtatcatatggtccaatcttcttttaggccagtcatgtagaaaaagccagtttaaatattgataatcttcgcatcaagttccaagaaactttcatgggtctagttactttctcgatgtgtttgtgatgtgatcttcctccactgcactgaacttcatatcttacacctccaagttatcaattttaccaattcaagcgtagttgtgaaaggtttatttgcaacttttcttatatatttgtgtcactcatgtggtacattttcaaaatattatttgctgcctctatactaaacaatgtaatgcaagctgttatgttgttctgggatacaagatgtgtgcttatgttagtaggattctatctaaaagttttgattaagtgaacaacaatgcggcacttcacaaggactatttgctgtttgtatcgcagtctggtgaactggcagaaaacgtctcagaaattattgacccacattatgctgatggtgtagacatgtcagaggtccaggtacggattacatgaaagactttatagttttcctttatataggatagttcttaagctgtgctgctgtgtaggatgaattttcagccgtcataacgaaagcattggtaacgctggtccttggacttgagactaaatttgacacagaaatggcagtgatgacacgtgttccatggagcacacttgagagtgttggtgaccagtctgggtaagatctaactggggtgttaaaagcttatattgtttttgtgcccttatgaccaagcgtaaccagcatgcatttgcatcttcttataggtacgtgaatggaataaatacagtccttagcggcagcatacctgtcctcgggaaacttctaacaccagtttacttccagtttttccttgacaaggtaattatatagagtgtatgatttgaataccttcatgatctgatggttgcggccttgtgcaaatttaggacccgcatgaaatggggtcatctccttggttatgacttttacaagaatataaaagagattttcatgctaccttgtataactctgtgcagctggcatcatccctaggaccacggttctatgctaatattttcagatgcaagcaactatccgaaactggagctcaacaggttagcctgcatgctctatgttcctccatttggatgcctctgattctctctgttgtgatttctctaatagtcaactagtgaattgcctagaatgatgttccatgtgaaaaattctgtttatcaggtgtatccatagactagagccaaactcagtctggttatatcgccttatcgcttacactttcttcttttgtcgatgttaaagtgactatgtttgataatttcctaattgtctagtatgattggagtgttcatgagatgttatgtttctgagcccttgttttttagttgtctagagttctaatatgaattatatgtcttttggtttcacagatgttactagatacgcaagctgtgaagtcgattctactagaaattccttcccttgccagacaggttactcatcacaaccaatttatgtcatttctgttatctcggtatgacgtattactgggtatcttctttgcccaaaagtagaatacctgatgcctaaaccctttggatattcttgtttcggtcatagagccgatattagggataacgtatatagagcattagtcagtaaatccatgacgatttacttttttttagttttgatatatcatttagtaataacattgcagacctcaactgctgccagctattccaaatttgtgagccgtgaaatgagcagagctgaagcactccttaaggtcatactatccccaatcgactcagtggcagacacttatcgtgcactgtttccggagggaacgcccatggagtttcaacgcatcttagaacttaaggtaattttggcatgtcttaacccatttcctcgctctcaatcgaacaggctcgaggctcgagtctggttcacaacagtattctagagcgacagtctgctgaaactttttctggtgtttggtgcagggtcttaagaaagctgatcagcagagtatactagatgatttcaacaagcatggtccaggattcacacagcagtcggttgcagcagcaatgccacaaccaatgccaaccccacctgcaccaccattggcaatcactaatccggctacagctgcagggttcatagcaaacagcgaggatgttttaaccagagcagctgctcttggcagaggagctgcaagcactggcttcaagaagttcattgctcttaccgaagctgccaaagaccgcaaagatgggcctttaaggagactcttcaacgcatgatttgttcctttactacctcatctcaacttttgatttatgcaattcccacctttgtttccttctgtatttaaatgcacttgtttctttgttttcctggttatgtgtatatcagaaattcgtagtgaataacgagttttcttacggtgcggatgtatcttagttgtttactgcattctttcttgagtaacgttacgaacactttcttgaactaaagtcagttgaaattacctcaatcttgtatgtaactcataatgtagtttacggaggtagtcaactttctagctggcatgtttactaatgttttagtcaactaaagtcagttgattcattttttagctggcatgtttacggaggtagtcaactttggtgaaagttggagacttgtgaattaaaaacattagtctgtgggctacagatctatcaaggaaaaggaagttgtggagtatcaacggcttctcatggaagaagaagaaaaagagttaaaggggcagctacttccactatagccttacatccataaagggttagagttaaacagcctttacatgaagttcgatctcaaaaaaaacaggacactggtgtatatgaccttttgaccataacaggtctatcatccagcataactttagtaagaaattggttgttgaagaagaatctgagcttctctacaaagttgtattgttggggacatttgaaagagtagaaccagaatggatgagagaagttgtgatgtttttagcacaagcatgtgtcctgtcttcttcgaaagagttttacgagtcattaaagtatgaatatttctccttctcaatgtatcctatcatctcctctttgattgttttactctgaattgtaatttggtaagtgttttacaaataaaacatgttttaaaagttcaatgatgcttaatttttccggtttagaacctggttcgggtaatttcattgtagttgactgtaaccaggttcttcaaatttattctgctattcctagtaattttttttttggtaagatgctattcctagtaattttatttcttgatcaaatgcaatattgcaatgtatcacaagattagttttcaacataacaaatacttaaaagtccaaaaaccatagagataaaaaaaattgtaaataagttggataatttattaggtgtgcttttattcatttttattaaataatataatatttttatcgaactattttaagatattctcacgctatttgtacaaatcaccaccaacggaattaattatactagatagataaataggaagatggaatgttggttttacaataataatatttactgtataaaaaacaatattcaatatccttttttgtcaccgaatatctttcttattactagtatgataacaattttgaattgtttccaaaaactatattagaatacaatgttcttttgttaataatatattaaaatacaatgtatcaaaatgattatgtttttttcctctttatgtctatatgcattacatttgtcaacaaaaattaattgtttcttctttcagatttagaattaaagaaagaagcaaactagccgttagttaaacgaaattcaaaagcttccaagcggcgcttgtttgctctccaacgttcactaacaaatccgctttaaattttcccttttcttttttattccatttaaagtcaaagcgacgtcgttttctctcactcatacgccgttttataaccaacctcagagactctcatcgatcgatctctctgtctctcgcatcggaagtacgaagaaggatctttgttttcttcctcttctccttcttctactttcgaacactcgtgaatctgattctactctagtctaattgggtgctttcgatttctgaataaaaattcgattttggtctgacgattaagaaagcgaaagtgatggccgccgtaaatggatatcagggaaatactccggcagatcctccggcgtctaatggatcaaaacaacctgcggctccgaccaagactgttgacagccaatctgttctcaaaaggtacttttcttttcctcgatcttgtcccaacatttcgataccaattcaaatgtaatcgccttagtcttttgcctcgtttttggatatatcgtcgctccaatgtatcttctttaaatccatttcatggtttgttattatttggctattacgcatatccagttctcgtggttaatgtactgttatggatccgttaaatgaagtgggagacttctcatatatgtttgcatataaactgtttgttagaatgtctctgagagaattaaatctttaagatgttctttgtattcatcttgaatcagatctacattttattgctcaaagtttcggttttttaatcatgagttcagtaaatcccagattcctaatctaggcttttctttgattaaacgcagactgcaatctgaattgatgggcttgatggtaagttatcatctttcttcctttttagtgaacaagtttctatagtaaagatttgctcatagggttcttgacttggttgttttcagatgggcggtggtccaggaatatcggctttccctgaggaagacaacatattctgctggaaagggacaataacaggaagcaaagatactgtgtttgaaggaactgagtacagactctcactctctttctccaatgactatcctttcaagcctccaaaggttaagtttgagacatgttgcttccaccccaatgttgatgtctatggcaatatctgcttagacattcttcaggtaaaaatataccttcctcttgtgtctttgttctacactgaatcagagaagacgtgccaaagttaatccgtttacaacattttcatatttgcaggataagtggtcatctgcttacgatgtgaggacgatactactatcgattcagagcctcctgggaggtattctatggtgcataacttttgatttcttgttagccctttttgttggttaatccaatatctgatacatgttttcgttgatcagaaccgaacatcagttcaccattgaacactcaagcagctcagctttggagtaaccaagaaggtaaacagacaggggatttaacagtcgttatgaaatcaaacttctttagagtaccacagttatgagtttcttatgtctcttttgtttctccatacgcagagtacaggaagatggttgagaagctttacaagcctccaagtgcatgatttctgcaagctgttctgattcataaatctccaatgcctctgatgatttcacataaaacgatttttcagaagaaaacactgtcattcatttgctttattctttgtttttgaacatcagaagttctatctgtaacgttaccttgagttcaaataatgagtagtatttcagagattaatcaaaaggaaaagatactttattattattcatcttaaaatggaaaaacactcagtatcaaagtacaatcgccaaatttttattgtggaagtgagaaacgacgatgaaggaaagccttgaagctttgacagatctaccaaacttaagaaaggccacgaacttttccagtttcagtgtcaatatcaatctcgtagaaacaaggtcttgtaggaagtccaggcattgtactcattgtaccaaccagtggatatatgaaaccagctccaatgcttcctcttacatccctaattggcaatacaaaccctgaaggtgctcctttctttgatgcatcatgtgagaatgagtactgtgttttcgacatgcatatgggaagattcgagaagccttgttgtgtgtacatctcaatctgtttctctgcctgtattttacatatcacaggataatagataagttacataaacaggtttcttttgacaacaatgcaaagaaattgaagaagtcggtctaggaatcaatcacctggtctgaatattcaacaccactggctccatatgacttagctattgcctcaattttgtctttgataccaatgtccaatgggtagagaaacctgaggggctgtgtaatgttttgacaagctttttcaaccgcgataccaagatccacctataacatttacaagaacaattcatctatcaataagatgagattgcaaacaaaattgcatataatcacatagtgttggtctcgaatagagaagattaccgctcctttaccactatgagcatggtgggagcagaccacagcatcaaaagcaccggcatccattgaaaatttcctaactgcatttagttctgcttcggtatctgttgcgaacatattcacagcaacaattacattcacaccgtaggcctttgtgtttgagatgtgctttgccagattcacacagccagcttcaactaaggaaacattctcgcttacataagcacgatcaagaggtctcccggcaacaacatcaggcccacctccatgcattttcaaagccctaacagtcgccacaacaattgcacactgaggcgttagcccactgtaacggcacttaatattcatgaacttctctgttccaatatcagaaccaaaacccgcttcagttaccacaaatccaccaggtcccaccagcttcaaagcgattttatcagcaacaatcgatgaatttccatgagctatatttgcaaaaggaccagcatgcactagaacaggggtcccttccagtgtctgcatgagtgtcgggttaatagcgtctttcatcagaacagtcaaggctcctccaacaccgagatcatctgctgttatcggatcccctgccttgctgttaccaatcaccattttaccaagcctctctctcatatcacctagtgaggttgtcaaagccaaaacagccataatctcactagcaacagaaatgtcaaaaccagtttctctagtcatccccttttcctcaggtccctgaccaatagtaatcttcctcaagaaccgatcattaacatccatcactcttctccaagtgatagaagcaggatcaatatcaagcctcgcaaacttctttatctcctcgggagtaagctcctcaggactggtcttggatatcccaagctttgtcaatctcctgaacataatgtcactgaaactacgcttcccttctttattcggagggcacagcctattaaaaagagccttgtcggattgagacgtctcatggaaaatccgagtgtcgattgcagcagctaagaggttgttggaagcggtaatcgcgtgaatatctccagtgagatgaagattgaactcatccataggaatcacctgactatacccaccaccagctgcacctcctttgattccaaaggtgggtccttgtgacggttggcgaagacaagtaacaacctaagcaacaacacttcacaaatcaatacaaagagagaagtttgtccaaaagcaagcataaggcataagctaataaatgaaagcaagagagaaccttcttatcgaggtaagcgcctaaggcttggcaaagtccaacagtggtagtactcttgccttctccaagaggagtaggagtaatccctccaacaacaacatagtatccatcttcttgtccttgaagctcatcaaacgcagacaacaaaacctacaagaacaaatcatcagttgattagctcagaacactgaaccattggtttaaccagcttctgatgtttttggtgaaactaaagtatcaatcttgcccaccgacaaaaaagaagtaacagcaaattaacaagaaaagagagctacttggtaggaaaatggtaatatgaatccaaaatcaatcgaaagttataaactttgagcttacgtaactgcctactcaagctccaaaaactcaatcattaacaatctcttgaaaatttatttaagtttgatcgaaaccaattcgaacataatagtatcttataaccaaaaacggagttcttttggatccttgtaccgacaacaacatagagacagaggaagattcagatgaataatttaattttcaaagggaaatgaacaaaagggaaaaatgatgattaccttagctttatacttgccatagagatcgtagtgaagagggttgatattaagatctttggcaatctcagagatgtgtaaaggctcgacggaattagctatgtcgatatcggcgggaactggtgaaacaacctcaagctttcttgttgatgaactcatcgcactctctgtcgaagtctgatctcgcgttggaggatgagaagatggatgagggactctgatgaattgatgatgttttataaaactttaaagcacatcctaatatattacagtaagtagcaaatacatgtttagatcattatccatattaaccaatgagaacgatgacgtttttgtttttttccctctttttcacctcttaataaatatattttcaacacacataattattgaaggccagaaaatgacggtttcgccctcgatctataagcgcagccactatagtttagtttggcccactgttgtcgtcaatttaaactagtactatactagaaaagagaatggaactcggatttgttaggctaccaattttctttaatctttacataatacttcttaagactgtactattaaatttgttatttttaataaaatactgttgtttttgaactattccaatacagtttctatagatttacaggaagccacatttcttttcatttaaaccatcattttcattgcaccaatactattttattatacaacgatgatagtttttgtcaacatgtataatgtattggggtgaacggattccgaggtgtcttgataaatggtgccaatttttcctctcgacagatatggtgtatagagttttagacttagaattgaagaggcacgagagggtcaactattgatgaatcagtaaccttgaagcaatatatattttaagcaatctatataaaagccctatggaatatgtctaggactaagccttctttgcgtatcttacatagtgaaatcgatgtcatattagtccattaacataaaatgggcttacagctttagcattttctgacccaaaatgaggcaaagaaacgacgtcatttaatataaagttatccatccatttcctaaagaagataaaatggatgcaaccaaagagaatcagaattttgatttaggatgggtttgacattcttattgtgtgatagataacgtagtttaaaagcaatacaaatgtagtagatcaagttgaaacagaaaagaaagaagaacataaagagaagaaaatcccaaataacaatgatatgatgatgctgctgagaataataaacagaaaagggctattccaaaggaggagctcgatgctatcaatgatgctgaaaccttttttgcagaaatctttttccgggaaagtgtgtcaaacacaaatttagggaaagtggtaggtttagtgaaaagtgatattgagaagaagaagagaagcagcatgcaagagacaagtttaatgaaagtgatagataccaaaacttgtatgagtttggttgtatgaatacttgtatttgtattgaaagatattgtcttgcaaaaatttgattttttttttcttgagaacctaccattggaggacatttttgttaagatagtttctttgaacctaccattgtggtttgggacccattctagaagaaaaccatatggatccaaccgataaatcgtcatgacaagatattcgaggtctatgctctcggttacaataacaaggacttgtgccataactacaaaatcttgaggtttatagatatatgcttggaagtctatgattttagctctaatttatggaggagtttcttgatgtcgtctctcccgaagacgacttagtatccactggcaagtcgttgaagggaaatggttactcattgctcagttttgtttttttcaacagagaggtttcaactactatgtgtgccctttcatcaagaagctgcagaagtaaatgatattaaggctctctcagttgttagagaagaacatctctccttattatatcagagtgcaaagaaactaaagatggatataagggtgaccaatgagattgagacagtggatttaaaaccccatggttgtttgttttcgagttccctaagtttccacattgacgaagagaagaaagttgctgtttgcggtgagaaagtcatatacaacaagatatacattgttggagaagataaatacacaaggtatatcgatcttctggtttcggtagctttgatggtcggttaagtgtgtttacgtatgttcaaagattgatttaaatccaacaatatgtaatatcctgttggacattgatcattttgtatatattatcatcttaaatgttttattcacatcttctggatctaataaaaaaaaacataacaagatttaatttgactagtccagagagacaagcaaagtacctttaaaaataatgagaaagtctcatagtcaattagtcatagattccttgtaaagaggtagagatttgcatgattcagcgtcaagccgtcaatcataatattactataccgatcgagctccttcttttaacgttgatttattatattaactaggtgaacttccttgcattgtattatgcatatctatgagattttttcggtgtttaagaaagtgataagcgcggtcggtgacccttcgccataacgtttaaaacatttagtcgtagtctgaacgatttaaatcgttttagaataatttatatatttatattactatatgaaactatatttaaatttcatatagtaatataaaaataaatttcataaagtattagttttttttcaattatttgttacttgacttgtacttgcaagtatctaaattatactacttgttagagcatccccattgaggagtcctaattaaggactccttacaattttttaatagtaaattttgagtaaatgagagtttagagtttttggttgaaactttataatttttactgtccaatagtggaattcttaagtgaaatccttaagtgagaaatttttattagtttgtgaaaaagagtatttattgggtaaaatgaagagtgtgtattaggttaaagaagagtgtttatttggtgaaagaagaatgtttattgggtttgttgtagagaacaagaagaatggatacttaaaacaataagagtggataaaagaagagtgttttggtatgcatacacagagacttcaaaatttagaacaatgaaaacaaaattattgtttagcatacaagtgaggtcatagaatacacaataagaactagtgttcggaatattatttgtggtgtacaagcattcaaaccaaagtacaaacttatggtgacttaaaacatgtggtctctttttaatactagtaatgtcagcactggagtgatttagagaaggtggaacttcttacgaacactattgaaacacaacacactcacactgaagactgaacattcacaaataagaaaacatagaatacttaaactaaagattaagacaacagacatacaagtcatattgaacttaaagtaaagacaacagacatacaagttatctcagctaaaaccacttagagatacacgagagagagaaagaaaaaagtagtttgggaatgggcaaagaaaaaaaatacgggaaaagaaagaaaacttgttttattgtcatccaatatacccaaaaataccttaaacaaggttcgcaccttggtttatttcactattctgatttaattttttgcttttattcataaggattttctttaaaaacttgcaaagtccctgcaatggacatgctcttacttgtcttgttaacaacgcgtaccaaatagctagtataggacgagtaatagtacttgtgcccagccctactaattcataatccaaaaaaggggacataggttgaggaaggagagagactgagaaagccagagcctcactcatgcaagaaaagactaatcaaactctctagcttataagcaaactacattataatatcttgatagaggaaaacgatccattggtcaatagactgaaataacttcttccaccttgtcgatttattgcattcagtcccaaccttctaaagagatgttactaatccatgccaggaaatgctttctctcctctaactctcaccaaataaaagattataccctgtgtcatctttaggctgaccttcttaaccgtatttttgggttaggaaggccccgataccatgagttggtggaaagattaacgagcaagagcctcgttttgttagctccctagtgaccaaatcggctactctacggtctccgatgatcaagcacaactgtaattcccttatgcaaacaaatttaacggctcggaaatcctgagaacttgaaatgaaaagtaaataatttatttgaacaccattttttggaaagatgctagtaggctagtactacaaagcaaagatagaaaagaaaagatttgcttctttctttaaatcagataaacaatgattttcttttgttgttttaggcacactaaaaagcaacaaaaagaagaaggaagaaaagagaacagaaattgacattccatttatcatcatcacctttacatagtgacagtgtaaatcattttcttaaaaacccagtacctattttccagtacacatcatacgaatagaagaaacaaagaatacataaaaccttcctaagcatttacacaaaagctatatagaataataataattataattaacaacaaacaaatattgaataatctatatacacacacaaggacgaacataaccaattatatcaccatttaatacgaacgacgacgatgatgattcatgactgtaaagaggcaacgaggagagcagagccaatgctagaaccatcttccatggctttaaccaccacgtattgactcacttcttctcctagtatctctacgagagcttcttccatgtattccctaaacatggtgtaattcatgtacaaacctccttctaccgcaacaactgttcttttctgcatttggatttcacttctgcttctcccgctcgtgattcccccgcttccatctcggcctatcttcttcaagattcctgctattcctgctgctgcaagcctccctgctcttcgtgtaaccacatcgcatattttcaccactagttttctcaccttcagtggtacatctgatacctgtatcgtgcagcattcgttacaagtttcataacattttcaacctttaagttcaataatagtgggcttttaaacttacccctatgtctttcaagattcttgctacttcttgtaactcaggtgtgtcatcttcatgtatggctgagactgaatttgttctgagaggttgaagtagaaacagttgttgttttgataacaaaataaatacacaatgctaactagatagttgatacaaaagataaaagagtgtccatgttcagtaagaagttgatgcagaaaatacatgatgtcagaccaagcatccaataagaaaataatcaaatttctagcaagagataaaaagaggataagcaccttagaacgtaaggctcagataacacgggcgagatgggtccaaagatatcagaatcttctgacatgcggagaattactctacgaacaatgtcacccagatacattcctgatatcatcttctcaaatccctatgtaagaaaccccaaatgatgttgatgttaattggttaaaaactaataacgcaataccaaatcggaaaaacagggaagtatggcaaagattaccatatcatttgcatttgaactctctgcatccaagtcaatgtcatacgaagttctaggcaaatgagaggaccaaaaatttccccactccatatttaccacctgaaacataagagggaatcaatcttaaacatgtttcttttgggtctaaagctggtttctaaaaatagaccatgcaatgattcttagtaccatgcttccagaagttgtaagcagaccctgacacttgattatggcatcggttctttccaagtaacatgcattactacctgttccaaatacaaccgcaacaaccgtatctggatcgtgataatatccaagcgacaaggctccaacagtatcattcacctgctcatagagaaaactgaaacatttcatgatattttcataaagaaaaaggtaaggaaaacaaaaagaaagattgaaattttttggtggtagtgccagaattttgccaaggaaatgatgctgttgcagagtgacaaagcacttacaagagccgcaacatgcatatctaggcctcttctgttcagagctccttgtagacattcagctatatcttgcccaacctaaaataataaggatttgcttgttatacgattaaataacttgaaatttgaatatgtttgactcacaccaaacaggaaaacaccaagagatggattccattttcacaaaattacaactcaagtaataatttaaagctcaagggcatcaactcctgtcaaccgaagagtgcgtcaggatatcaagttaatagatttggaaggatatttcaaagacaagtcacagtttgcagagaatataagaagcaatgtaagcatccctgtactaaccatttcactaatctcaaaacctttggtccatttaattagaactcctgaagaaatagaagtatgcttgacagggaatgagaacgtaaatgcaagttcccttctaacaccttgtgaatcggacccgttttcctccttttcaataaacctttccaaggaaaaggcgagaaagttgaaaagaacctgcaaccatgtaaaaaaaaaaagaacaacacagactcaattaagcagcttgcatattacataacaagcaaagactggtacgaaataaacagcaaaatagtcacctcgctggtgctattcatcaaatgtgaaggtattgggtgtcgttcaacatcttgaacatctagataagacctttgatcacccagaagaacccttaaaatcctaaaataagtgcctccaaggtgaagtgcataataagtacctttctccctcctgaaataaaagcaagtcagtcagtgcaatccaacacataacagcaatgattggatgtaaacatttgaacaaacagacttgttgtgacaatgatgagtctacacgaaagttaaaacctgcaaatattatgaaaaatacatctcctcaaataaagagagagaatccaatggctacaatatgaagaaaccagtgcatattcattgagcagtagcaatctagtggataggaacaagataccaaagtaaaggtaagagataacagcaatgattggatgtaaacatttgaacaaacagacttgttgtgacaatgatgagtctacacgaaagttaaaacctgcaaatattatgaaaaatacatctcctcaaataaagagagagaatccaatggctacaatatgaagaaaccagtgcatattcattgagcagtagcaatctagtggataggaacaagataccaaagtaaaggtaagagataagagagaaaaaaaaaagaaggagaagtccttaaagctttaaccggatatgtaagtttcacataaacaaaaagagagaaagaacagaatcaaaggatctgtccctgcaaaatggtacccactgacacttctttaattccctggctccaactaaagctcaaagtcacagccactacgaccaggatagagctcgttactcgcattttagagctaaagattgtaattcatgaatcaagcaacgaaacgatacttgatggttacaaagagtaaaaataaggactttggatcatgcaatgtagagaaacataaagaacctgagatcactaaatcttgttaaatcaaaaagcaaacaaaataaaggactcatctttcacacattactcaatcaatgttcactaatctaagaagaataaaaaaaaacagaaatccctactggggaaagaaatcattacccagtgggcaaatcatcgacgaaagtgaggagcattttaagcttagagccaccttcagaagccaaaccagcgtgcatctccacggccatagcatcaaccacttgcctcaacctcccaaccggagtatcacaatcatcctccaactctttcaaaatctcaacaacagtcctccatttcctccgactcttcatcctcctcccaaccatcaccgcggcaacagaacaagccgcaacaacagcaaccgccgcaaacgcaaccgccactttccccatcccaaaacagaaccaaaaagacaaatacacaatatctctctctctggcgctttttacttactccaataaagagttcacgaacagcgaacaccgccgattagaaaaccctatacgaatctgtttcaccatcttcatcatcatcaactactactacttttttttccgccgcctttttttttgctcagctgtcactgctctacctgtaaactaactgcttcgattcgtttggtgttttccagtcaataatcaccggcgagggttaaaaaacgattcaaactctcgagtttcttaccggcggtcaagtgacgattaaataagaaagagagagaggaagagatttatggatttcggcagagacaaaagcggaaggagagagaaggggctggaaagcgaaccagtgtatatatatactactatatatataagtgtgtatatatgtaattacaatattaccctctcgtcttttttagatgtcgacggtttcgtttttttgttttttttttccttttctccctcgttaattttcagtttattaaattgttttcgatattgaaattatcttttgattactcaaattttagaacatattctttatattattttgacaaaagaattggctcaaaaaataattatgaaagaaaaatatttttaccacccattcagctaatttttggttaatttatttattttaaaattaataataagaaaacagaagagatttttttttcattttttctgatcaaaatacacaaaataatttgtttggttgttaatttttttgttgtcataatgttaggcctgggatttcggcattaaccgtttaaaccgaaccggacaaaccgaggatttcggttttcggttccgaaccgatttactgttataacccgatcggtggaattttaaattgatttcggttttcggatttttcggttcggttcatcaaaaccgatcggtttattcggttaaaaggggataccttataaaaaatagaaaccctagatctaccacttcatattttttgtttcctcctcacgaacctttctttgtcctcttctctaaccttttttatagtttttatcttcttcaatcttcttcttcttcattcttcttccttcttctccttgtgttccttcttcttctccaccattttctttcgtaggataccttctatcaagccgccacgacattaattctctccggcatcgactttagcggcagcaatttatttcatggatttctacatttcttctcgacaccgcgtcgcacagatccatcttctctgttacgttgttgttcttctttacacatcttctctgttacgttgttgttcttcttcacacatcaccgttgttttccttcacttcacagatccatcttcactttactccatccgtattaccgtcaccttaaaaaagtgaacaccgaaaacctagatctgggtggtggacttgagttgatctcaggggaaaaaaacatttgggcttttaaaatctaaaaacatatttaggatttgaataacttaagcccattatgcacaaaagttaagcccagaatgcataaattgacccacaacgatttggttaaccgattaaaaccgagaaaaaaaatattcggtgcaatttcggtgaataataaatcttattaaccgaaccgaaaaacccgagtaccgaaccgaaccgaaccgaacttttattctgttcaattcggcagaattttgtgtagccgaacaaaccggaaaaccgattaaaccgaaccgtttaacccgatttaaccgatctcccaggcctacataatgtagttaacttacgcttctttatcaacctaattatcttgaacatggccaataatagaaacaaaatgattaaacatatgacaaaaataaaattcataaaagagagaatttaaagttttgtcaataattggttccactctaaatattaacgatgtttttttttgtatggttaccaaacaatattgttttgcatttctaccctctatttgtataatattaccgtcgtgaccggtcgtctatatcttttactttaatcgcactttatttcaaggtcagttacaaataggagatcaccaaacgtaactaaatttaaattccaatcatttttaagaataaaataaagtagaaaagagtaatacaactagtttgacctttgaccgttcgatttattaagactctgctttgaattaaatttcaacggcgtgctctttttgccgttgggaatctctctctcatcacccaaacattaaataattagaagaattcttttaaccatcggaataatttaattagcaataataaaaccagtccatgatctaattattgataatgactcgtggctaaatctagtccaataaaccctactgtataggggttcaattgtaatattcacctttgttttgctcctttttgtaccatgccctacatttttagccaacttggcaatattatgtgcatttttttcacattggcattattattttctgccagccattattgcaatttttattatgtaacttaaattaatttatttcacataaaaacatcttaagtttaaccgttttatgaacagtatataaagaataaatgcaaacggtaaaaatctgaagtatataaattataaaccgttggaacatatatacttagacaaaaaaaatatacaagattactataaacgaaaaaaatttctataaattttttatttttagaaaatttaaatggaagattctatagttgttaaaaagtttgtaaatatatgagattattaaatactaaatagtattcgaatgtcctttggtgtatgaatgtggcgaacagcagcataaaagctggcaattttaattttacattatagttttttttttttaatatcaattttgtttgtttttaaaggaaaagaaatgtttaaattgttgggaaattaaaatatctacaaatggtgagggacaaatagcgtcagagcccatgaaaacgcacgttgcaatttaagaagaagaagcaataaccaaaaaaaaaaagttgaagaagaaaaaaaaatgaaaatgaaaaaattcgttcttccccagtttgacagctcgctgccactcaacagtaggacccataggtttcataatatttacaagtttgaccctagtaggggtctacttcgtcctccacctctataaccctagaggttctccgcgttttggtctctctctcagattgtggtcacgtgacttgacacgtcacctgcttacccttcgctgacgcaacgcctctctctttgcctttccagtttccaccattacaacgttttttctttttctcatcttatttaatttcgcatttaagtttatgattgattgcatttaattttaatcaaatttttatccacggtgttgaatagttacagatttgagctacatttatatttaaacacccgacttgtattgtctgatgtatataaaactcaagataagaataacaaacaatttacaaatgaatgaaaaacttgacgggccttatattatatttcctcttttggaaccacgatttataaggcccagatatttatttattaggcccagatataaagcccaactaagttatcccgttcaaattcttacacgtcatcatcgtctacgataaaactgcaaaaggagatgaggtgagtgaggggagggagagagaatgactcgagctctgctgctgcaaccgtacagagcgacggtgcgagcagcttcatctagggaaacgcaatacgacggcgttccggaggttaagttctcggatcctagccggaactatcgggtcttggtgttgggtggaacgggtcgggtcggtgggtctactgctactgctctttctaagctatgtcctgagctaaaaatcgtcgtcggtggacgcaacaggtttgtgagaaatttcttattcaatttccatggaaatgtcgaaaaatttgaaattcattgaatatgaatcattctctgtgcgcagagagaaaggtgaagcaatggtggctaagctgggagagaattctgaattttctcaagtagatatcaatgatgctaagatgcttgagacaagtttaagaggtttgtttcactttcccaaagagcttatcattgtcaattgtcaaatatgtttgaatttctatatgaatttggacaattgttagggactaaattgacatctctaatgaatttattattttgagtactcaccgtgaaatgtgtgaatccagacgttgatcttgtagtccatgccgctggaccattccaacaagcacctcgatgcactgttcttgaagctgccataaagaccaaggtgaggataaggtaataacagtttctaatgtcaccagtcttccacacacaagctcctcgatgcattgttctcgagtcttacagagatttttatgtgtttatatctgaaacagactgcatatctcgatgtttgtgatgacacaagctatgctttccgtgcaaaatctcttgaagctgaggcaattgctgcgaatattccggcgttaacaacagctggaatatatccaggagttagcaatggtgttcaaacctgaatgctagtccctctatcttttatgcttgatattgtttgttccaatagatttaacaacatgtttgtctttcttatagtgatggcggctgaaatggtcgctgcagcaagaagcgaagataaaggaaaaccagagaaattgaggtaacgcaaagaacgtttgttgatgtttattatcgttagtgaaactgttgttttattattgcaacataatatgtttattgtagctgatcttgcaatgtcatgtcaggttctcctattacacagcaggcactggcggtgcaggtcctacaatattagcaacgagttttctacttcttggagaggaagttactgcatataaacaaggtaagtgttataggactttaaactcttaaagaaatctaaacatatatatcaatctttcagaaaatttctcagccttgtattgtgggaatgatcaggagagaaggtaaaactaagaccctacagtggaatgataaccgtggatttcggaaaaggcatccggaaaagagatgtttatcttttgtaagttacccttccatatcaaaagctacattgacatactgaaaaggatttgcttagatcagtgatttttttcaggaatttgccagaggtgagatcaactcatgaagttctaggagtgccaactgtcgttgctcgattcggcacagctcctttcttctggaactggggaatggagataatgacaaaactcttaccatcggtatcatgctcagaccttacctgaatcaatggtcctgtgatcagttatatctacctgtagtcatattgcaatgcttgtcttgcacgctgtaggaggtccttagagacagaaccaaagtccaacaaatggtagagctttttgaccctgtcgttagagccatggatggctttgctggagagcgtgtctcaatgagggtaagtgaaaaaacagataattgcaaaataattttgcagtagttatttcggtgactcattgttacttatgttaaactctttgggaaggttgatttggagtgctcggatggacggaccacagttgggttatttagtcataaaaaactatcagtgtgagtctccttaacatcccctatatacaacattaatacatatataaagctatgtatgagaaccgatacatgttgtgtttacagatccgttggagtttcgaccgcagcttttgttgcagcaatgcttgaaggaagcacacaaccaggggtttggtttccagaagaggtatttctctctagattccctaagagaccttcatttttaaaaatatttgatttatgatgaaatataatgtttaaattttgttctacagcctcaagggatcgcagtggaagcaagggaagttcttctcaaacgtgcatcacaaggaacattcaatttcatactgaacaagtgagccatttttgttcctcttattgcagatatcgattctttatttcctctattttagtttaataatgtatttgctttggtttcttctgatatataggccaccctggatggttgagaccgagccgaaggaggtggttttagggatatacgtatgagttcgactgaggaagaagaaacatagatgatcatcgatactttactttgtaaaccaatttacttctgatatgtatactcgaacagataaacatgttcatcagaagatatacaacttaaaaaaaaaaaaaaatcaaaaaaccacttggagatgacacaatcgttcgttgaagcaaccatataaatcaatgaagaatataatttacaggtgacatgaagagtaaagatccaacaagctcttttcttgtagtatatgttcaataaagtcccaacatttttagttccatcacatgactctgatcaagctcaggaacattcttgcagtcgcggtcttccactatatattcctgttgtgagtgacacgaaaacagtgatgtataccagaaaagtgattaccgtaaatcaagaacagaaaagctgcaagatatcagacctttgtgagttcttgtttggcgagaacatggtaatgccgctcgttgatcttttggccacatattatggcgatgaagaatccatatagcagtcctaccaagacaatggccaaaactgcaacaaaaaatagaccatcatgttcattatacgctcaagtggttcagcacaaagatgattctgattgactctaatcctggtgactgggctaatgtccatgagcctatagaaaacaaaaatagttgtaccagccaatgtgtagaacccataaggatgttcctcataaccaaacatttctcgtagttcttcaccgtagaacttgtaaactagtaaccccaagaatgctacaatctgttgatacgagaagcctttgttcattagtatataaatgcattcactaagagcatcaaatgtatcatccaatccgaattcatacaagggatctcctgtttcggtgttcaaatgcgataagaaaccaatagtttggtcataaactgctatgtggcaattatagctaaggatttgcattctcatgattgaattctagtatatagtaacattatagaagaaagtctataaacactaaactcaatcatgagaatgcaaatccttagctatatgaccaattttatagctaggaaacaacgaatttggtcataaaatgggagattgggagtcaagaagctagtaacatcatagaagaagaaagtgtattaaacactaaaatcaaaaaaaggaaacaagtcatgtaccatctggacagaaatgaagatgaaggcatgatctctagcaaccagcagctgaaatctcaatctcaaccaccatctatcagcaggcacattggctcggagtttgaaaaaggctctacactctgtacaatgcgaaaatgcaaaaccttcctgaaacatatattgcatagaaacaaaatacacttcataagctaagtaaaccattcattcaaaagaagaagaaactttctggaaacggtgacgataatataccttggtggagcgccaattatcgagacaagatctgtgaacgtgcttttgagtacctttacaattgcacggagcaatcagatcttcccctgcaatcaaagaacaaaccaagtcgtctcattgtatcctcactcaattgagttaaggaattgcttttattatacctccaacatcaaggcaaattcgacattgtggttgatctccagaaacaagaagtgtggtttcgtcatcatcagtctcagctatttctgaaacttgtccttcctccacaacacgatctcctctttccgctgctacgatttcgtttgaggatgttgattcgtcgaataaaatctgttcctttctatcatcatcatcatcactaggcactaattgcatctcttaaacatactaaaatttctggaaatgaaaaaaaactgagaaacgcaaaagaattcaacacagcatcagaaaactagatctaggtttcgccgggagttaccaaaaacattagaaaaaatcgatacttacacgaattcaaccaattctggagaattttcttccaaggcaagccattgcttgcgagttagaagaaattggtaaactatgactgcgaatcagagtgaagagaatttgattttgttagtctcgattcatcactatgtgttgaatacagagatgacgaagatcttttgagggttgagagagaagaagctaagaagattgggatcaatcaaaaacgatggcgaagaaaagtctcaagggtaaaattggaattagaaaaaacatgtggagagcacgtgacacgtgggatttatctgagtttcacagtagacctgtgaagttcatcgtcttcatcgttaacttcgcagactctgttgattagtcaacacagatcagaatctgaggctttggccgagacgagagaagcagaagaagaaaatggcggagactgtacattctccgatcgttacttacgcatcgatgttatcgcttctcgccttctgtccacctttcgtcattctcctgtaagctcatcaatttctgattcgcaagtctttattctagttctcagatcagactcgcacacttttctggctccttaattcatagcgagaagtgcatagccgatatctttaaatcctttcccattaagtaggacttgataagagtctttaattgaaaaagcgattcaatgattctttctctggccaatgtgagtttccagatttttaggaaacaagggtagatttaaagctacaaaatcatatttagtgagttttaagtaatgctcacaagtttcatttctttatgatgcagatggtacacaatggttcatcaggatggttctgttactcagacctttggcttcttttgggagaatggagttcaaggacttatcaacatatggccaagacccactttgattgcttggaaaattatattttgctatggagcatttgaagctattcttcagctgcttctgcctggtaaaagagttgagggtccaatatctccagccggaaaccgaccagtttacaaggtatgttcatttagtcttgtgtggtggaagttgatgcagatgacaactgtacggttcttttcttgcaggccaatggtctggctgcttactttgtgacactagcaacctatcttggtctttggtggtaagaaatgtttccgatgactttggtttggtttaagttattgtttacgtatcttaagcttggattaagtgttgcacctatgtgagttcatttctgtgcgttattcaggtttggaatcttcaaccctgcaattgtctatgatcacttgggtgaaatattttcggcactaatattcggaagcttcatattttgtgttttgttgtacataaaagtaagtgtctattgcatgaatggtgtgttctttgttttcttagtctctatttttgtagaatttgaccttttgtgttgctaaaacttatttttttttcttgtacagggccatgttgcaccttcatcaagtgactctggttcatgtggtaacctaataattgacttctattgggtgagttatttctgctgatcagattctcattctttttgaaattgcttgttgggatttatttgaggaactctggtcttactagccatctcctcataatatttttgcctcttttctcgacatttggaggtcaagtttcactaaagtttccaattttagtagacctgtaaacggaaatgttcttagcagtatttatctttttattgatttaagtacaagagaactagtttggtgtgaatgtctgtcggtgaaggaaaagaacaaagtatccagtagttattataacaatatcaagttgagatcttctctcaccatgtactcttttgctccaacttatcattaacacaatccaatttgtggcaatctttttctcactgtgtttttcgcgtcgtgctttgcagggcatggagttgtaccctcgaattggtaagagctttgacatcaaggtgtttactaattgcagattcggaatgatgtcttgggcagttcttgcagtcacgtactgcataaaacaggtattttctggataattcttatgtaaatactacactctgacgacatagtctggtggtttctttaagtccttatttcattagagagcttcacctctttctgatttgtgattcctgtactttctttaaccagtatgaaataaatggcaaagtatctgattcaatgctggtgaacaccatcctgatgctggtgtatgtcacaaaattcttctggtgggaagctggttattggaacaccatggacattgcacatgaccgaggtatgcttctggtacatatataaaatttatatcatcacatcctcatatagggtacaaggaaagaaagccagtagtaataacaaaagtttctctactgtttggctataatttccttgccagttctgtttatatggctaaggcagcagcatattattcagattattgttactggctttaacacatgaacttaagcttacttttcaatgctttataatttatgattcttcagctggattctatatatgctggggttgtctagtgtgggtgccttctgtctacacttctccaggcatgtaccttgtgaaccaccccgtcgaactcggaactcaggtgcataattttgaatttgtctagaagagagaaatcgtctttgtgtgttaatccaatgagaaacttttaggataccacttttttatacgaaaaaaaacaagtaaggttgagctaaatgtgaaaatcccaatttctaggaattgcacttaactcttgttattgaattacttggtatcttccattacaaaacagacgggagagagtaaagtgtagattgttgatcaaatgctcgttgcatattatgctcatgattgtagttgccagatatcagtttttctagtagtagaagaaagctgttcatgaaaacaccactgatgctacgatcatcgggacatatatgcctatctccgtacctaagacttcactatatccgtctttggttgcagttggcaatatacattctcgttgcaggaattctgtgcatttacataaactatgactgtgatagacaaaggcaagagttcaggaggacaaacgggaaatgtttggtttggggaagggccccgtcaaaggtgtgatcataataagccccaactagcttagtgaacttagctatattccttttcagacctaaacattttgatgtgtatgaatctctcttggtctctcggtttgttgcagattgtggcgtcgtatactacaacatctggtgaaactaaaactagtcttctcttaacgtctggatggtgagactattctacattatacagttacaaccataaaagtagacgttgttcatcatcaatggctttgaatgtgcaggtggggattggctcgtcatttccattatgttcctgagatcttaagtgctttcttctggaccgtaccggctctcttcgataacgtaaaatactatccatctatttgctatattcgaagctcttcttgcaagttaaacgcacttaacatataaatcatctttgtttaaaccagttcttggcatacttctacgtcatatttctcacccttcttctctttgatcgagccaagagagacgatgaccgatgccgatcaaagtaagcaccaaatctaaatgatttattttacacatcctctttgatcttactctgatttgctgacaatattcgggttttgttttggtaaaaaggtatgggaaatattggaagctgtattgtgagaaagtcaaatacaggatcattccgggaatttattgattgtaacgaagtctgttgttctcattttctacttattacgttaattcgaacgttggaatcatcaaaagaccgtgccaaaacaaaaatgcaaattgatgcgatagacattcttttgctgatttgtatgctataggttttcaaatctctagctacacttatgtatttccctagattatcaaagttagcctgccgttttctaattttattatttgatattttgattatactgcttcttaatgcatcaaataagttgattcatccatctaatattttaactacatcaaatgaagtcttttataagtacaggcactaattgaacttgaaccctataaaatacatgaataatcacaaagaattgatagtgttctttcagtttttcaatcacaaagaactcaccgacattatcaagttgacttcacttttagacttaattggtgttctggaggatccacaaaactactattacacagttttcacaaaattgtgattctttattttttattttctttggtcaaactaacatttcattcaactttaaacgagagttgcctccacgtggagagtatacacaaaaagctacgaggacaaatgctcaaacaaaaagacataagaaggggagctcagaagctcaacccgagtagcagcatccaaagttgctaaaacagaaccatcatttacttctgaggcggtcttcgtaccaagctccttcagcaaaattgtgattctatgtttggatatcatgagatctaactacaaagtttttaataacaaaaacttaccattctctaatttgtagtcaaagctaaacaaatttcatactaaaacaattttactgtgttgttatggatgcatatttttctcactttatagtactattttactattgataagatgaaaaaaaagttgaggtacaatagtagtaaaatagcatcattctttttctgtagaatctctctggtcaatggtctttttagtttaaaaactgaataatgttctctctcacacagtaaaaaacaaagagagagagaaagaagagaagaagacaaaaatgtaggcattaaaaagaagaaaaagacaaagagaaaagtaatgaaaagacaatgaacatttaaagaagacagacaaatcccacacccaagcctcagcctcatctcttttattgttatttgtttttctaacaaaacaacaaaaacaaaagagatggtttttgggttttgttttgtctttgttagggcgtgtttggacgtttccttcttctcagaatcaatattttaccaaaacagctttctttttttctctttaacaatttttttgatgtagaaatatatagtcatgattccaaatccacctcatgccatgacaaaaacccataaaagtggaggttccaatctcgaatacagacatatatgttgtattcgtgtatgtatctattataagataattccaatttgtataatgccaaatgggttcattgaacttcttcttccttcataattaagtgttgctttttcttcttagttcctctaaatcaagaaaattctaggtgaaacttctcttatcttgactttatataaaataataactataaaaataatcaataagactaattcctacaagtcttacaaatttaaaagaaaatgaaaatgcaacattagctaatacacataatagtataagattgatggatgtattcttattcagttttatttataaatgcaacataagctaatacactctcattcagttttatttattaatgttacaccactttaagagcactcaaaatcaaaatacgtattcttatatgatattcattcatgtagtactagtacacataatagtataagatagatggatgggattggaaaatttgacaaccttttgtttaataattccttaaaaccaaggaaagaagaaagaggaaacgaaaaaaacaaaaaggaagaagacaaaaccgactatcacgcattgtctggtacgtagagccaaaaggaacaatgcctctgttttagtgttttctttcttaaagttttttcccaaaacacaaacaacatttcacacacacgctattactcacaagataaccaccagagacgtggatagagagataaagattgagagaaccctctcactcccaaaaaaaaagctttagacattttctctaaatccatgtaagtttttttctttggttattgttgtttgttatcttctttgatcatttgctattattttgttttgtttctttcttagtttatcaaattaggaaagttttaattcagctctctgtttgtgtttcttcgtctatatctatttcaaatagtttaactagattcaaaggtttttaaaattcagtactttctctgcaaaccctagttcctctgttctttaacccccttttttgttaaactgcagattctctgcatctttcaagaaattccgaatcgtgggtttggttcttctcgttacgagtctctcaaagtttaaatctttctttacaaaaaaggttacttttggttctgagtaaatcaaaatcaagcttttggccttcaatggtggctatgtttcaagaagataatggaacatcttctgtagcttcatcaccacttcaagtcttctcaactatgtcactcaacagaccgactctcctcgcttcttcatctccgtttcattgtctcaaagatctcaaaccagaggagcgtggtctctacttaatccacctcttgctaacttgtgccaaccacgtggcttcaggtagcctccaaaacgctaacgcagcgctcgagcagctctctcacctcgcttctcctgacggcgacacgatgcagcgaatcgctgcttacttcaccgaagcgcttgctaacagaatccttaagtcctggcctggtctttacaaggctcttaacgcaactcagacaagaactaacaatgtctctgaggagattcatgttagaagactcttctttgagatgttcccgatactcaaagtctcttacttgctcactaatcgagctatactcgaggctatggaaggagagaagatggttcatgtgattgatctcgatgcttctgagccagctcaatggcttgctttgcttcaagcttttaactctaggcctgaaggtccacctcatttgagaatcactggtgttcatcaccagaaggaagtgcttgaacaaatggctcatagactcattgaggaagcagagaaactcgatatcccgtttcagtttaatcccgttgtgagtaggttagactgtttaaatgtagaacagttgcgggttaaaacaggagaggccttagccgttagctcggttcttcaattgcataccttcttggcctctgatgatgatctcatgagaaagaactgcgctttacggtttcagaacaaccctagtggagttgacttgcagagagttctaatgatgagccatggctctgcagctgaggcacgtgagaatgatatgagtaacaacaatgggtatagccctagcggtgactcggcctcatctttgcctttaccaagttcaggaaggactgatagcttcctcaatgctatttggggtttgtctccaaaggtcatggtggtcactgagcaagactcagaccacaacggctccacactaatggagaggctattagaatcactttacacctacgcagcattgtttgattgcttggaaacaaaagttccaagaacgtctcaagataggatcaaagtggagaagatgctcttcggggaggagatcaagaacatcatatcctgcgagggatttgagagaagagaaagacacgagaagcttgagaaatggagccagaggatcgatttggctggttttgggaatgttcctcttagctattatgcgatgttgcaggctaggagattgcttcaagggtgcggttttgatgggtatagaatcaaggaagagagcgggtgcgcagtaatttgctggcaagatcgacctctatactcggtatcagcttggagatgcaggaagtgaatgatatattacagtttgtcttctattttggttatgagcagagtccctttcttttttgtatacatggggacacaatcttagttgttttgtgatggtgactttctgtctctttatgctattttggcttaaatgcttctactgcctctgcatgtaaagcctttgtgtgttggttcaatttggtctggtgtgggtgtaataccaaaccaaatccaatttgagctgaagataactaatttgatgatcggttcaagttcagaactccaaattctttcagagaccagccaaactttgcctatctttaagcaggtgatcttgtcatttgtgtattgtaaataacttaaactcggtatatatatttaggttactaaaggacatgttcactatccaaagagtatacgacttatctgctgtccaaatactttgtaacctaaagttcacgtgcttcatttacattgaatctagtttaacctaatcttcttgcttcatttatatttgaattttgtttaagcaatctagtctttatcttgtcttagcaaattcacagagtgtttctcatgcaaaagtgttgcatgatcaaaacaccttgataataagattgaaagagtaatgtgatcccaaaaggaaagaagatctcggatgaactgattcagaaaaagtatatactctgatgttatatatactatgagacaacagctaagttatttacatatttcctcatttcaaatctgtgaacctgaagaacacaagaatgcagctcatgatcaaaattctgaaagaagcgaaacttcgccaacccaagatttaagaacagctacaccatgaatagatatttgagatcatcaactgttaatcgagttgcagagcttccaccatgatcttcaccaaaggcagacgcaaccatttttcttttctcttcctataataataaccaaaaatcacacaaccacaaatgagagaaactgaggggggaaacaagtatcagctataagggatctttacctggagagccaaaattctatcctccacagtattttttatcgtaatacgagttacagtaacaggtcgagtttgtccaatacgatgtgctcgatcaatagcctgatcttcagtagttggattccaccatagatcaagaagaatgacatgacatgcagcaatcatattcagcccaagatttccagcttttaaagacattatcatcacttttacctgtttaagacaaaaaaacaaaaaaaggagggaacacatacaccaccactaagaaaattgtttaggaaaaaatgatttcagatatgcatacgacttacatctggatcgttgctgaattctttcacagctctgtctctggcaattagactcattgtaccatctaatcttctgaattctatactattttcaattagagatagctccaccaagtcaagcataccagtccactgagaaaatataatcgtttttattggtcctccattagaaggagttgacttcagactcgttttctcgacaatggtgacatcatcatcatcatcatcatcatcatcattcggctgctgcgaggaagaagccatttgaccattctgtgttgagtttgaagtgccttggttagaaagcgactgcagaatatctaagacagctttgatctttgatgaactaaactcgccattctgaaaaactgatttatcatgactattatcctctgaggaactacaacccaaatcatcagcaacgcaacttctaagcgtggatttagagaaaacaacatcatgcgcaagctgttctctgcatctaggcgcagggcacgtgtcctcatcccctgtgatataatctgatacacactgatagcagaatatatggccacacaaagtaacaacagggtcttctggtggatcctgcaaagagaaaataaaacggaatttatgggtaaagaaaatcagaacaagcagctagggacttagattatggcgaacctgaagatacgctacttatatttgctaaattattatgcacttacatggcagacacaacagatgggagacgattctaagcgactgagcaggctaactagatcctctttagggagttttttaacagcttcttctgatacttttccaacagaatctgagttatatcttttaacaagttgggggtggtcacaagcttggcgtagtcgcaaaagcatgagaagaatgtttgcatagttttgattcaaagttcctgcagcagcatatgcctgcagagaaaaaaatatcatctcacatacttgacaggaaatcaggaatcactgcaaaacatttttttcaacgaaaatgcctccataacctatgtttataccatatcaagttgctagttactacgtaagtatcatatttttcaaaaacgtgcagatcacagctataaaccaaggataaactgatagtttggaggagcacagaaagagcaccttgaactgagaacgggaatcggattcaagcttcacgtagaaagaccgctcctctaccgaaaagtccacctggctcaaattaattgtctttggtggtagattaattataggctggccatcaagcaatgttcctagatcgcagatcagaagaagagtatcaacttatcagaaaccctcaaaaacaacacagttacttgagggataagaggagtaacatgaaaaatatatcatctaaaagcagaagatcagagtaaaatgaaatggaaaaatgcacaaaccgaagaatagtattggacttaactttaggactatcattaggtaatggctcaggtaagatcacagctaatctcattataaagtatctaagatataagcagatataataagaaaatgcatgacatatgatataccacttttgtcaagtcctgtccctcaccaatccaaccactaaaaggaatagtgagatagttaaaatacctttcgtacggcgtagcattatagcccttagaacagcctgaagcttcttgtacccttgaagggaatttctggaaattggacccttaatttggtggcagaatgacttgtacacagcatatggatcatattttagaaacctgaaatagctgtataaatcatctattgtattttgtattggtgttccagacaaacaccacctccttttggctcgaagaccgcaacatgctcttgccacctgggttctatgattcttaattgtttgagcttcatctagtacaactctgaaccacccaacttttgctagagtaccagagtcagggtcagatgaatcgccagcattattgttaccttttttcttcttactcttcttagtagtacccactacatttttccgtttcttattgatggagaagccagaagcgagaccatatttttcagaatttttttcatcattctcatcgtcatcaaccaggggttgctttggaacttcatttgaaacaatggcgtaagttgtcataaccacatcatattttgctagttcaataggatctttggtcctgttaccgccgtggtatattaaaacagaaagtttggcttcatcagtaaccttctcatcaagttctcttgcccactgccgcacaacacttgctggacaaacaattaaagtaccagcagctggtctctttctgttgaatttgcgtgttgaagtactcgcttcttctcccttggctttctttatgcctgaatcaccattcacaccactaccatttgaagccttagactctggtttctcaaatgcattttctgactcatcatcagcatccagatccaatgcttcagcctcttgattgcctgaattcttggactttaattttgcctcgtgcatttgctttaggataagcgcaatagtcgagactgtcttaccaaggccctgtgcagtagaccaaatggaatttgagggaaacctagtaagatcatagatagttaagcggaaaataactacgattaaaagtaacctgatcatcagctaatatccctcccatacagtgcaaactattagtttccttctgaaacatccatgccaatgcaattttctgagaaacaacagtgttaagtacacaagaccattctgacagatactgaaagatgatgtaaacctgaatacctgatgcttcataaggggaaccgaaagaagaccagcaggtaaatcgacctcggacttgggttgattcagttcctgcagaaaacatgtacttaattatcagaagtttaagcacttatcacaccaattcatattgtgggcaaaagtctttatttttaaatcacaccatttcataccaggggaattatgcaaaaacaccaaactcttcaaatggaaatcataaccttgatgcaacagtgcgaaataagagacgaatgcaacaatagtgaatgttcctattccttctcgtttgtcaaaaaggaagaacaacaatgcttccatacacatggtctaaaacagagaaattcagcatgttacccggtctcaagcatcattgagaaattgagacatccgaacctttaaaaacctattactcatttctgacataaaacaaacaggaagaaacgagcctattccaatcattcaatggccaagttcaacaaccccacagctggcgaaaaagagaagtgcattgcacaaaagaaaaactaagatgagaatcgcaaaagtcaaaagttgggataaggatgaacacctgtagtgcagcctgatagatcagcctctcgtcattttccgaattcctttcttcgcctatgccattcctatgcattggatcacttaatccattaaaatgtgaaggagacgcagatgttccgtgcgccacagatggaggtaggatccgagtgccgttagtcacacgccccatgcctagatcatcatgtgctccaccacgaaagtgactcgcattcccgttacttgtaccaatatcaggtctaggaggaaaaggaggtcgactaaaggttggtggatgtgtccttttaaaagcttgttgagatgaaaatttctcataatcaccaacagagatattgggaattctggaagttacgatactcccatttcccggaatatgtgtatggtgttctgcccgaggcagtggcttggattcaaaaccattacgtgagtcgagatttgtaagtcctgttttagtgtggccatttgcaccggaagaactcccactaagaaagtgcggtctcagcgtagagagatctcttctatgagatcctgcaccaagatcaacaactccataaagctaacctcacagcaaaacaaataaaacaattgataggtcagaaatgcaaccttcagctatccgtgggggatgttgaggcctggttctagtttcttgtatctcgacatcactatcagaactgatatcaatagcggaatccatcgcaagacctcctttaagagaatcaagcggtcaagtttctaatcagcctgaaatacgcaagaaaggaatgttaatcatctaaaacgcaaaactttacaaagcgctctgttattgcgagaaaggcaaatccgaaactaagattaccaaaagagtaggatcaaacaaagtaaagctacatactttatgaagagaatcacttgcttattgtaaagtaatgctaaatcgatataaacaatcataatcaccaaaagaatgtttcaagtgggcggtggctttggaaactttgtaatgtttgaaaaaattagcatcaatctctagaggacgatcaccgaaactcttcagcttgaacaaaaaaaaaactccaattgaagattattcagaaacccaaataagcaattaggacagaacaaaacagaacaacgtcatgcaatggcgggacaacataatcaaaaaccaaactttcgatgtaagaaaccctaagggcacgacgaaataaggaaaattggggagaatcagtgagtaccggggaaagaagtaagaagcaaaattgagaaaagagagagtgtgaagccaattgttgttcttcataggaagggttttttcctcagttgacccaaaggaagaatcagagacgcaacggcggcgttttgatcggagagaaaaatgaaaaaagaaatatagatacgctctcatcggttttttaaaaaacgaggaaaaatctcaacaaataaattaaattaatagtaggaacaaaaaaacagaaccaggcccaaacctctcggcccatattatttcaacttcacatatatatatatatatatatattaaggatgattgttgaccaaaaaaaagaaaaaaatcattgagaacataattaaacaaattagactgtgaattctcactccataaaatgggtatgaaatcaaaaaaaaaaattgttataaaatttactagtactgtttcttattggttttgaatgtaatatatcactaaaaatttcttatataaaagtaaattataatttcaaaaatactaattgacataaaaaaaattgagcttccgagatatcatttacattaatcaaggtggacactactaatatttcctggaattttaagatacatggatcttgaatccacatccaccatatatgagaaacgacatatccagatccaaatccgttaatatcggattcaaatccaccataaataactcacaattaaaataatagtataaaacaaataaaaagtttgtatccaaattaatcataaaacaaatttaattatcaactatttttcaaatggattaaatttaaaatattgcacaacaaatttaaaatattttttttggtgattttttgagcaatttatataaaataaggatatcctaatttttaaatcaaaatatctaaatccaaagattttggataacctatttttagatcgaatttcagaatgaatcttggatcccgaatattttgtctagcaaaaattcagaacccattagaaacaaaaaaaagccattgaaagaattc

SEQ ID NO: 85 - DNA, 105807 bp, Arabidopsis thaliana
gaattcaggaagctgctatatagtatttttaaaatcctaaatcagcaatgaatttagcaacttttatatttttagatctgggttgttaacatagaatagaaactgcagagcaaaagctaaatataaattctaatcgttttctatattttgtttgtaaggaaacattttggtgtcaagaaagtactcgttactttggaacaaagaaaacaatacccataaatataagataaggtttgagaatgtgagaatcgaggtggaatacaacagaagaagcacaatctcacgtggaacttaggcgtgaagatcctcttcctagaaatagtaagccaccaatttagaatctttctcactttcttattgtttataaaaaaaatgtcttcaaaaagtctttttggttttagcttttttcagcacatttagtccctttttcttgaaatcttagtatgcattgattaatctatatatggttttaaaataacagtttcagtttcattgaactatattcaggtcaatatctagtgtagttacaattgattagaaaagtgcatgcataattttgttttaaaaacttataattcaatgaacacatataatgtacattcatttcgaccaaagtaataaactcactaaaccaactgaaatgttaatgagcttaggcttactactttgttcttaacttaaatatcgaaacccattagcattatgggccttaataagattcatggcccaatgatctttttgcttcatcttctgctttcttctacgacaacctaactcatccacttcttctcctttcacaactcttcttctcttctttacccctataaattttacatattagtttatttttaatgtaaatttgattgaatttgaaaaaatacttggttaaaattagggtttgacccctataaatttgttctaacttccaaatgacccctttagttgatataactttttaatttatcgtccatcataaatttttttgtttatttgaccgctataaaacttgtttgtagatccgccactggtatatacatacattttaatggagctgtgagaatacttttgaggttcaactctcgttacaataccttttgtgaccgatatggtatcaccacctgtatttgcgcataacataactataataactcattttctttaagtgaatcatggttgctattcttttctcaataccacatatgtcaaagcttttttcttgccagctaatttgtactcagtgcgaaaaaaatttagcattgttcaagacgtaccacgaggataacctaaagcgtagacagtttcaccgataaaaggtatgcctccgagctccaaaggatttatatcctcccaaaactcttcactatcaatacctaagatagctaagtcacatccatacctaaacgctttaacttcagctttgtatttagtgggtgaaccatgttttctcacttgcaggtataagtgatcacccacaacatgagcgtttgtaagaatcctcctcccggagattgcaaatcctaacatagatattccaaagccgaacaataccatacgattttttaaaatttggaagtctaataaagaaatcacacgagagagagagaaagagagatgtttatgaataccagagcttgagtattctttctcagttgtttgccaaggttgaacaacatttggctctctagaaaaggagaagatcttcaccaccgcgtctcgagccacatcaacatcgctcacagaagaacaacaacgagatatcaaagaagcattaaaagacgaacgacgacgaagaagggaaggagaatagaaaaatcgatgaatcggagtgctcgtggagttgctgaacctagccacaatatgatgaacagaccggaacaacatgttcttgttaagtactatgtttactcgtattaacgatacataaatatatcatttacttgatactcatattttcgatccataataattacactacaaatctttttaaagattttaatggaaattgttaacattttaatataaggcttttatataatcaaatgaaactatagattctggtagcacataattaatctgttaagctctctcttttttttttactatgggaaaaaggtccaatgggcttaggcccaattatttaaacagaaaagattctaactttctaatggaaaataaaatttgcgatcaagcaactactctctctctctctctttcttctgccatcgccaaaaacttgtcttttgcttcttatttggtaagcttgcatttttctctcacccaatttctaatttcatgcttattagatcgttaattgaatctgcatcccgcagtgatcattctttgatttacgaatttgtttttttgttgtgattgataatcttgttgtcgatttttgtcaattttatggtttaatttacaaagtgtatattgtgattgaatcgactgggagggtattgagagttgtttgtttgaatctaacaaattcaagtgcaaatctattttatagccacttatcttctgctagtagatctacttgagttttaagagatgtgacttctttaataccattgtgaatttcatggctaactgataaaaaggtctcagctctgatcttttgattcaacggctcccggagacgacggaagcaatgcagttcttcggtggatctgagattagtccgtcgccgccagttccgacggcgagtggaaacaacgcgcacatgatgtacgttttcaatcgtaacggtgtatgtcttctctacaaagaatggaatcggcctcttcatacacttaatcctcagcaagatcacaagctcatgtttggtcttctcttctctctcaaatctctcaccgctaagatggatccagtcaagttagttttctccctttgatctgacatttccatttcgatttgatccgtttcgctcgattttgatggctgtgttttgtgtgtatagtttgatgatttcgatttgtgatttggtagatcttatgatttgtgattttgattttggttttgtagtgcggataaaggaaatcttggggttccacagttgccaggacaaggttgctctttccatagtttccgtacgaatacttacaagctaagtttcatggagactccctctggtattaaggttagctttcattgctcttagatgtcccaagttttagtttcattagggtgaatgaagtataagataatctggaacctggctgattgtttaaggatgttgaatgattggaagaactggctcttttcattatcttagtgtatagttaagggacattgagagtttaggagaatctatatagaagaaaatgagaaccagggagatgagtaagaaggagtaggctgagtgcttacattcaaacaaatattaagcatgttgtcgtgtatgagagatggcaattggcaaataggaagttgatgtcccaagtagctgagttatgtctcaacagatattgatatgtttgaacaagcatgaggagatggttcattgatggtcatcgtttttcgtattagatgttgaatcatatgtaagttaaggtcagctgaaaaagataaaaatttagggtctagtcacaaatgtaatcaaagggacaggaagcttgttgttgccctgtatgtataattcttcccctggcgcacgataattgttgatacagaacctagaatttagaggatttggtaagattttggtcggctaaccattataatattaagaaccagaggaaactggtattggctgccttgatccattttattagctcgaacctaactttacttgtatacatgagcttagattccagagttgttttgaccacagtactaaacagacatctagatactttaaccacagcatgtttttgcagattatcttagtaactcatccaaagaccggagatttacgcgaatccttgaagtacatctacagtttatacgttgaatatgtcgtaaaaaatcctatatacagcccaggatctccaatcaagtaagcttcacacatatcttccactgttgcatcttgaccatatttctgattataatatcttattgcatcgatcaaaccatgactatcttccatttggtcttaaaggtcggagttgttcaacactgcacttgaccagtacgtaaggagcatctcttagtgtgtgcattacagatttgtccattggaacttctctccttcaacagaactatcgtctgaacaatctctgaaaagaagagagaattgtagtagagagatttatcttgagttcgactgttttctctgcaaatctatgtttcgtttaccctttttattaactccactgtattggcttgctatcaatgatgttcatggtttactcaaatcttgaaatgcgacatgaagcaccaacccgtaattatgtaatttatgttatctgtaacttgcagcaaaaaacaaaccaaaaaaatgcatggtcgttatgaaatcgttttcaagttggatatcaaaacacacaaactattgaattttaatattttttatagacagaaaatattatatgtttagttccttaatagctgcatttgggggttgggctgctgatgggttttggcaggacacaacacgtgagatgattttctaagcattaaacacttttgtctttcttttgcttcctctaactattttatttcttctgttttttctataaggtttttttcttcgaaatcaaatattagttttgtcatttttcgtaaatgtcaatagtctttgtcccctttttatctccttcctttttgtcttctctcactacataaccaagtcaatggtggaagttctttctaaaatcttattaaaagtgagccctgaaaaaaaggataaagtattctaatcaattcttgtcgatcaattattcctgactaatatccgaattaatatagtaatcgcaagcttttttaaatggtcaaatgatatattatgttttctcaattcgttttgatgtttcacattaagagaatctaactctagctcgtacatgtgtgcgagtgtatctcactgttgctcaaatttggccgaacaacttataaaaggacaaccttatttgcaacaaaaaccttagaaaagttataagcttgtaggtgtgttcttaatattgccaaggttcattcatcttacccgtgacttgctcatatgcacctaaacctttttcgcccatatttcaacatgctataaaagtaggggaaatagttgatccattgtagccacacatcgacatattagattttcctccgatgccattttagcatcttagatgatttgatatgatggaaaaaaacgatgcctataatttaagtgattaacaataggggattagaatagtcatcaagcaagaattattcatatacgacgtatctagaaaagtaaagaaataattgtatcgaaatccgttgtttgaaaaatttcgttatgaaacatttttcaatcaattacaccaattatatagtatcatccatcatctcctaattacataaatcaagataaacttcaactcgtgaacaacttttactattcacattgtctcatatctaatgtttatatatattttctctttcataaaaaaaatcaattatattgctaagattattgatatgcatgtcaccaactttatatttgattgaaaatatattcccatcaatgttattgatgacttagaaaccaatttcttcattgtggcttttattacacttctttgatcttcttcttttttatccttctattagcatactacaaagagatactccactgtccctttgcaataacacaaatgacattcgttgtgtcgtttaaacatcgtagtaaactcgtaatcatcaagtaccatgctttacggaacaattagaccgtgtgggttatatgaatcaacagtccttttactattttcctcttagttatcaggatcaattatttcccctagtaacgttgtttaaacttttgttgatactggtgacgtatatatatctatcacaacgtatttttcttcagctaatttgttggcttccgtcagttatctataacaataatttgtaacaatactagtttaaagtttattatattttcggtttcttgatttttgttctaacaattatttgtttatacacatcaaaatcagaaaagctaacagaacaagcaaaaaaaaaagagaatctaaaaaactattatacgtgtgatagattctcccacgcgtggatcagaaatcaacaaacggattgttttcagaacactcgtgcggtaacggtaacggcggcgttttcagtttctcgaaatattcctttataccaaacccactttcctccgttactttccccgtcaagtctccgtcatctctcaacggaataaacggaggtctcaacacttccgttaacaactcccacctcactcctttgaaaaaagcatgctcctttatctccgccgcgcctcgccagaaaccaaaccgcttcgtcggatctttaaccaataaccgacggatcaaatcggttaaatccgacggtttcccggcgaattcaggttccttcaccagcacgttacgaaaagtttcttttttgtttcttcctttgaacggtgtctctccgtacatcatctcgtacgttaaaactccgagagcccaccaatcgacggcaaaatcgtgtccgtcgccgcgaattacctccggcgatatatactcatcagtcccaacaaacgaatttgaccgttcaccgccggaaaaactcagtctccgtcgtgtaatcgggttaacacgagctgacttcgtcttcttcttcttctgccggaaaattctcagacttttcttattatgactgagattcgattccgggttcggatccggttccgggtcggatagatgatagaattcgggtcgggtgggtttattgagactacaagagagatcaaaatcggttaaagtcacgtgacccgattcttgaagaagtatattctcaggtttcaagtctctgtaagcgatccccatggtatgaaggtggtcaagcgcacagacgatttcagctaagtagaatttaataacggaggagctaaaaacgccgtcgttttgacgttgtcggaggacgtttaaatctccaccggagcagtaaggtaaagcccatgcgatgaattcagaggattctgatgaagctaagagttttgggagaaatgggtttgggtttgtgtcatcggagagacgtcggaggatctgaatttcccaccttgcacggcggagagaagatgcggaggatttgtcgacgagttttaaagcaaagggagaagaaacagaggagtcggaaacagagtcgtggacgaggaagactgttccggtggcgccttttccgaggagtttgagaactttgagtctgtcgaggttaagattcgtcgccggtgaaagagaagatgatgatgatggtcttgtctccattgtgagagaaagagagagatgagaaggaaggagacgagtgggtctgaaacgttgcgtttatgtctcctcgtgtcccttttatatacaattgtgattttcgagtgtaacgctttttaagaacttcttctttattgttttcaactattcaatggttctgtaatttatttttatatataacgatcgattaatactgtctctcattaattcgcattaagggaaactacaaaaaaaaaaaaaagagtttgaatcttatatgatatacttttcttctcttgagatttgaacatcagattttttaaagttaaggttctcttgcaactttgtaatcagtttatttctgtataataacgacgatatatagattgaagtatggaactatctaaattcctcctacagattggtacggtagtattggttttatggtcaattacgtaattaaactcgcctcaaattcagttctataatttgcatctcgaataactccaaatttatgatgttataattctagataaaaaaaacaatatagattatgaattgaggaatataataagataaattttttaattcttttccgtagatattatttttcactctagggtagctagctagggttagtcattaacggcacctatatatccatacgatggttttggaagctactgaaatttggagagaagatctatatagcaccatccacactagagttggcagcagtagaaagagaaatttttggacagatctctggaccgcatgtatcattttgttggatctaagagcatccccattggaacacctaattaaggactccttaacattttatatgattaaattttgaataaatgaaaatttagatttttttgttgaatccttatattttttagtccaatggtggagtctttaaattggtttcttaaaacacaaaacataatcattattaaaaatattaaaattctaaacatacataacataaaaacaaaacaaaaatatagaaataaaaaacttgaatgacgataagagttcttcttcgatatttagaaatgaattgaaacaacctactttgaaggttgtactcgtgctgcttctttctcttcgctaaattgttcttcttcgacattttttccgttccaaaagtgacaaaagtgccaattccacaaaaccaaaagtgactgatccatcatcataacttgtgaaattttggagacaaaactaatagctaaaagcagagaacagtccagagaaatagaaccagggggatataataggtaacatataacaccatcaaatatcaggttagtactcaatgagataaacagaggtatacaattatgtgaacacactacaccatcccaattaacaaaatgataaaaaaaacttgagagaagagcttcatttttaaatgtaatacaacacagcttagtttttatatgtttattaatcatttgcctacaaaataatttttctgatattagagattaaacgtatacatatgattagtattcaatatctacgtatgatttgatgttaagaaaaagatacttgtataatttcagaaacaaaaaagcaatataataaaaatagagcaactaaaatgaaacagaagagcaaccaaatttcaacagaaactgaataaaaagtagtaagtgggtgtgccacgtacacggaccttacacgttacaaaacacctaagctaaggttcgcaccttaggatttcacacaattctgatttatttttttacttgttttcattagaatttcattaagaaactctctaggtccctccaatggaggtggtctaatggacctagtacttttggaatcccagaaatttgtatacactgagatatgactcaaggtaaatacagtaaagtttatccccttatcgcaatgtgaggatcaagcaacttgctgaccatattactcatattatattgacggacaccaataattcgataatgttgagtacagtactatatatgatggaaaaaaattcacacttctttcaaagtatcaatattgtgaaattttagtgtatatgccagggtaaactaaagtgcttggtttgggttaaacaagtcattccaaagcatatatatctcatgaactttaatactgatatatcatcatttcgaagagtatttttataaactttatttttaattttcattttatgtatttgtttataatatagtaatattttatttcctcccaatacattctaaagatttaaatgaatggaacacgtgcgatatcataatgatcaatgcaatagagggcaattgtgtcgacaagccaaactggatagtcgcaaccaccacatttatatgtaaagctgtatcatttctctgtaaatctgcaaagtgttaatctcttgctgcaattattaacctactttcattattttgtgtgaattatttcaattattattattctttacttatataatgaatgtttttattgggatatggagaaccgaaaatcggtattgggatatggagaaccgaagatcgatcgagatcgacagtcgagatgaaaagatcaagatatggcaaaaagatattattctagaaaatatattgaagtttaggaaatttagcattatctctaactatattatttacatttttgtttatcctaatctctatataagagaatgtaaattattctattattttcatgagagtctaatataattcttccctaaacacttttgtgttcttactctcatcaaacttatcagttttctaactcaccttcatagagtgagttgtttttgtattttattattggtaataaaagtgttttataaatgttgatggatgtaaccttttcttacatgtgaatcctagagatgatttattagtggaaaaactaattactagttagatagacctaacctaaagaagctaaccaataattgaacatatttagaaaagcttttatgatcgttgatggtgtaggtagatccggcacttacttatttaacatgacagcatttaaaggaaattttgtcttcttgaactataatttcaagtttataagagaagaaggaaaatttgtttagttaaaggattttatgcattaatttttaaacgaacgagaaacaaagagtgtttaccagccatacacaaaatttgactatatgtttaatctagagctcacaaaccgaatcagttggaaccggaagctaatacgaagttaccaaccaaccaataattgggaaacaagtttcaagtgtgtgcacataaatttattgaaataacaaatcgagaaactagtgtttgttacatgatgagaaatatggcgcccacaaatttaatgctaatatttttgtcatttaaaaagagaattattttgctaagagttcattttcttagatttctcttagttttaaacttttgttggcaaataaaatacatgttaaatgtgtttatgacctagatttttaaaaatttgcaaaatttctgattcgccttacgaaattgtaatgtttagcaaaactagaattcaaatttacatagatgttctgtatgtcgaatgcgatgttaaattagcattaatcgttaaaaacaacaaatctaattttagtttactaactacatttagttgaaatatttaccctacgaacttaaggaatccaccatgcataaatgtatgcaagctaaagttatacaacaggttacatttaagcttttgattgtaacaagagcaaactagatcttttacacgtagagacatctagttctcatttggttattttggatacatacatatctacttaaaaatcttaaaatatagaaaagaaaaatggttaattagagccaaagagatctaaagaaaaagaacttagaaggtggaaacttcgtagtatgcaagattgactccttccgtacatcagattaatcaaccaattaagtccacgagacagcaaaattctcttgttcttatcccaccacctaattaacatctcttcttcttattattttctcaagctgattaattagtctctatatatgtatgtatatggtttagtaattgctttcgttttattataaagataaagatgttagcgaaagggagcgtcggggcacgtgggatgtcaccgtacgtaccatacaaagactaatgatgtgtttttggaataattgagagaggttaatataaattgataaagagttataactttagggcacattcttgtgcctttgccactattattctcacttatgatgaagcatatattatcacccccacaaactttttctcttcgattagatctgttgaactttatattagtctacggttcatggattggcaatgtcattattagatatatgaatttgtagaaagtattttgatcaaatctcaatcaaagtcttgtagtatgtatagagtttttcttatatatatgcatttatatacttttttattttaattacctcattgcaaattcatgtaaagcaagctatattactcttcaccatgaaaaagttttagtgagttgagactataattgaagaaaaaaatattctaaaaatttcagtggtgttttccaaattccaaaaagagagtgcaaagtttccacctaaaagtcataaaaataaagagaatttatatgacaagaaaagctttttggtcacggtttttggtcacggaatgatagttaaaatcataaaagaaagatagaaaagagataatggaattacatgaatcacattcttcttatgattccactcacattatcaaagtaagaaaagaatatacttttataaattttattggcaagataaacagaacaaaaaatatgaaaaaatagagaattcgataccatgatgacgcttgtcggccatgatttcttctacaacgatttaccaaaaacatatgagaaaaaatgaaggatagcttaaactttaatgctaagatgaaaatattttatgttaatggcacaatttaatcccgacaacaaagtgaagaaacactaaggttgtaatgtgaacgtatgcataatcaaccccacataatgtgtgtgtaatagtaatatgttttagtgtgtctgattagtcactagtaaccaaaattttttttaaagaaataacactagttgataatatttcaaccgaaataccgaatctacatacacaccctcccgtttatttgttagtaatattagaagaaaaattcgtatcacaaagaaatttctcttagtttctatttaaaatttgtgttacatattcgcattatatacttattacttttttggtaaaaaattaatttttgtgattgaggattacagaggataggaaaagcagaaaagactaacaaactagaaaatgaaaggaaaaaaaacataacaacaaacaagtatacaaatgcgaacaaaacgctaaaaacgacgagatataataaaactaccacaaaaaaaaagataaaagcaaaacttacgtaaagcaacatgaactcaaaattcctgcgagttgctgcaagcaaaacaagtcctcaaaacttcacaccatcaatgccaacaatattcctactactttagaaaaatatataccaaagaatagatgagttagaaaaaatatataccaaagaatagatgagttacttgtactcattcatcaaaattatatcaattttccatatttgcgtataacggttatattggaatatttttgtattttgtaaacactttttgatatcaatatatttgattttgatttgatggaataaaatttatcatgtgttgggaaaactttttgatattcatgataaaatattaataagatactaaacttttaacacttcaaaataagtatcatccagaacaaatcaaaatataaaaattctaaaataactttaattaaataagttgactcttggaatataatttttaatttttattgttacgaatttcacatcggaattgaaatatgacttatagtgggaaccatgcaaaaagcacttaaaaaatcatcatataaataattacttatttaattggccaaaaataacctaacattttgatattaagttttttttgtcattaaaaagaaaaagttgtgtgtgctcaaaagtcttaaacttttgcattacgtgtttgggctaaaagaattatgtaaaataagcccatatgaaaaacctacgtgacctcattacttagtgaacttgatgggcttggagaaagctagattgagtctggaaaattgggtccaaagcctgcagaagtttgaaattattatgttgttatgggattgggagttacttagcagttaccacttcgtacatacaaaaattcatatgtgaaacgaaattggtggaatccaaaaaaattctcactcaaccaaaaagttcattaattctcattctgaaaattttcttattcgaatttataacatttttgtattcaagtgtttgtaatgtgaaattgtttttttgtactatgtactacaatttcgcatattgtaacatccttagtaatgttttctacaatctaccagaattgatatttgactgtaaaaccttgttttttttaaataacacaatcccaccaatacgtacacattagaaccttaaaattaaaaaccttaaaaacaaacacaaacgtcaagtcgccaacattggtcatttttttggggatcattcaaaaatagtagagaggcaaaatagatatctaagactctatagcaactatgatgcgacatcatgtttcatacaaagacaaaccctataaactctattaagtgttctcaacattgcaagaacaaaaccaaaaataaaaaatattaaagctgatataatttggtattattaattgtaaagaattgacaaacgagggtcatctcgaggcgacacgagcacttttccggcgattcctcccaccacacactacgcaccattgaaactctccatagctttctttggattcccgtgaacctctctctttatcttttgcctcccaagaaatttccaccggttttcgtgttattcacttacattgatcttttaagaaattcatatattttaactaatactataaaactgttggagtcgtaaaataatactttgtgataaattgttcgagcatgatactttcatggcatcccacttaattttaataactgtttgattaattacttattcaaaatttaatctttatattagtttgaaaatatttaaatttaagtaatcagttctcttagcaaattgatataattcacattgccttaagatcactctctcaaataagagattgtcgttagtgtggatgtcggaatgcgcaattaaaatcttatggttgtttttacgaggatctttagtcttgttaaacgaacaatgatcgaatcgagaagagaagaatgtgtttgtgaattttgtgtatagtattagtatttcatgaatcgtccccattacaattgtcatcaactcgtatttatactcaatacatcggatcaaacgtattaaactatttgctgatttcacgccgcggatctcgccttatttacgtcgtacgttacgaatcttcaactcgggactttaatgcgcagtttaagtcgcgatccttccgtttctgtattaatgtcggatcaccctttaagcggccaggctcatgctgggctatgaattgggcccaattcatcttgaagcccatagaatgcggattgggccgaagtgggccgaatccgacatccacaatttgccccccaagtcctcgaagtgatccagatcggggacttaagaaattccgaatcgtacagttccaagaatcacggaacgtcaactcgagagcgaatatcctcgacgtgagaaaaggaaactgaatcgcgcgattaccgagactttcctcaaatagagtgtgacgcttcgggatcctagggttttagttttcccgctcatccgttccattatataaactgacgatctcttcgccttctgcccaacgattataagtaaacggactcccctctcgcttcaggtaaccgtctctaatcctcctttgatcttcgttctcgctttcaatttttgataggatttagagaacctctgaattctgttaggactagagaacgcttttagggtttagccagcggtttttaggacggaaatccttactaatttctcagattttcaattcagaaaaacgaggattttcagttctcgccaccgcccgttcaccgttctccggtaaaattccgccgcgacctgaactcgccgtcgctatttgtcgcagatcgccggattctggcgaaaaaatcttcaaagtgttcttcgtttctgaggaagatcttcagcagaccttcaaagtgttcttcaacagagaactctcctcagatcttcttttattcgttttggtgacgtcgcgctgtttgtcatgcctccgagacagatctcacgggaagtgttctcgattgacggtcagtttggaaaatacatgacttcgctgtcaactccgagcagacttacgctgttaagaggagctcaccagatccctcaccaaataaagttgatttctcctggtacaaagacttcccctgaatctccacctccgggacacacttgcgccttcgaaattttcttttcagaatgtgggcttttctttccacttcccgacatcctgatcgatcttatgcacgagttcgggatcgccctccctcaactatgtccgaacgtaattcggacagtgttatgtcttcttactctggcggaagaagatggtttccgactcgcgctgtccgacttccttcagttatatgcagtgaagaaaagtcggactaacaacacttttttcctatcacctcggaaaggttttcgagtcttcgaagacttcccagaaaaagatgaacactggagaaagtcttacttcttctttcctgtgaatgaactcacttacgaggagaagtctgatttatttgtatctgactggacaactcgggcgggtagttagcttggcttaggataccattttgaactaactctttcatcaataaccccgacttcagcgatttaaccctttccttgctttcgtttttgcagtgaaggttaccattcctcccgtttctcgcacatttgcatctcacttctcgaacttttgccgtcatgaccttggttgggaagctcttacttcggatcgaatccgagcatctggcaaacgacttcggacccgtcctgaccttgctatctcttcacctcccttttctcctcgtatattttgcaaagctgagatgtctggaccatcgtaccgagctgagaagaagcgtgagagggaaagagctgaccaggaaaaggccaggatcctgtctgacagggtcgtgatgtcggggacccttgaggacagcaaactccgagctgcggagaaagccaagcatctggtgaccgacaacaaggtcaaatctcgccaggagcctggaaagaccccgacttctgctacgaaaaattccggagctccgacctccgaagcagggagccttgccaagaagccgcaaagcaaagattcggcgacgcgggaagccgaaaagaaaaggaagaaacctgaagacgactcctgcccttcgcctcgctcatcttgtccccgtcttgaagagaagaatactggtgcgggaaaaactaaagaagacccgaaagaggttcctccaagcctcgtagttctttcgtctcaggaatctgaagctcgcaggtcggaacctcgtagcactcctcctccaggtaacgtacttttattccgaattgacatgacaggatacactatggcatctcacatttctatgcttttgctatagctcccccgtcttcctttgccgacatcatgaggactctcgtggcccctggttctgccatcgcccccttcgatgaaatgaaagaggtgaacaaggacaactaccttcgcttcgctgggaaactcggcaaggtaaaagcttcatctggtttacaaggaaatccgacgtaaaaccgagactaatatcaccctttgattttgcagctaatcctggaattcaactccgtcttctacagtcatgaagatcagctttctgacaaagatagcgaactcgacaacttcaggcgaagtgaagacgagaacgctcatacggtggagagggccagcagagtgttgaagcgtatgaaagacgttgaaccccggatccaggaactcgaggtgaacaacattgacctcatggcgaaactagaggtaggtaaaaatgcctatcttgctgcagccgacaacgagaaccaggcctgagctgaactcaacgtttgcgaggagaagctaaggaaacttgaagaggagcaggccgggaaaattgacgtcgccaggaaggaagaaaggaagaaggtcaaagctcgatttcacgagttctcatcgaagtatgggaacttcttccggcagtccgaagaggttaaaacgctaaaggtccgcgtagcagagaccagagcaaaccgggaattgctcgaggagattcagaagggggaaatccccgacatcgatgtggagcttgagtcggttcgtgctgacgaagcaaagttcgtgcaacgagctgccgaacagaagactccccgacctgaccctgttgagcttaccttgctcctagctgacactcccccggagatgactgcggaaaacgctactcaagatgaagcgatagcgatcaacgaaaggggttccaacaagggttcgacctcggaggctggaatcgtggctatgttcccggtcgatgttgaaaaagagtccgagcaggcggaataatggggttgttttggaccgaagtggacccccacttgttttcttttaaaactcgaatttgctttatttggccacgaaggccttttgttcgaagtacttaactttacgttgggcacggaggcctttttgtttttaagtacttgattttggaggtcactgggaccgtttattttaattgaattagctagtttattttccgaattacgagctgagctcggtttactcttcgtataaaaaactgagttaagcaaaacaaagatgacctccctaacgagctagactcagtgttagtagggaggtcatttatgaccgcgaatcccaagtctcggacttagttcgggtatattcgaagcgagggtttgaacgtgtagatatccacccgaggcttgtttcggaaatagaaattgataaaaaatctttgcttcaagaaagaaaatttgtttttatttgaataatgaagagactggacccaaagtacgggctgcctacgtacccaaaggtggggatcaagtcagacccaaagtacgggctgcctacgtacacagagagattcgaaatgtttggagatgaactgaggtccgttatcggttacaatctcatatggtaagccgtgcctgcaaatgatttccttccaaatgaaagctcggacttgaacttgagttatgtttgaataagtcgcagctttgacccactttgagaagtaatcggtcagaacgagtaagaacctcacgccccgggttgaaacgtggagcggcccgatgatatccattgaccacttcatgtatggataaggtgcagacaccgaggtaaggagttcggctggttgcaggatgtatggtgcatgtttttgacattgctcacatcgtcgtgcgtacgcttcacagtctgccatcattgtcggccagaaatacccgtatttcttgactttgaacgccaaagaacgacctccggagtgatttccacaagtcccgtcatgaatttttttgatgacggttcggggttgttcgccaaagatacagatagcgtccggagccgaaataagtctcctgtagaggatgtcatttgctatgcaaaaacgcgcgttagtagcttttaatttacgagctgcccatttgtcgggaggaagcactccgtggaggatgtaattccgaattggttctctccagtctgccccccaatcgtgaggtatctgattagaaacctcgggattatcagttatgggcacctcgtcctcggcaacgggaggtacaaattctggactgtcatccccgtcgtcaggttgttgaggttcgggactgcctgctttttcgtcaagtcgcctgcgcatagctcgagtggtgacaaaattcgtttcctcgagatgtatacttggctaagctattgtttcgacaggaattatccgtgtgacggttacttcggaagtagatgctaaagcggctagagcgtcagctcgaacttttcgaactttgctgtcagctcccgaacctgatccaggtaagcctccattcgactatctttagcctcgtagtctccggagtactggcttgcaaccagctgtgaatcgcagtgagcctgtagggctcgaaccccaactccaatagcgaggcgaagaccggctagcagagactcatactctgcttcgttattggaggcgttgaaagcgagccggaaagattgttcaaggacttcgcccgtaggtaacttgaggcgaactccggctccagagccttgttttgatgaagcgccatcgacatgaaggatccagggttgactcggaacatcggattcagcagtagctagagggagttcgatcaggaaatcagcgagaacttgagacttcagacttgtccgcgcacgaaattcgaggtcgaattcactcaactcgatggcccatttggctagccgtcctgactgagacggactgtgaaggatggcccgaagtggcagagatgttaaaaccacgattgggtgagactgaaaatatggccggagtttccgagctgaagttacgacggctaaagccagcttctccatcatcgggtatcttgtttcggcgtcagaaaaggatttgctaacgtaaaaaataggtcgctcgtcacttcgttcgactcgtactaagacgctgcttaccgcacttaccgagacagagatatagagaaagagtctttctccgaattcgggttttgcgagaactggaggttccgaaaggtagttctttaactgcttaaaagcgtcttcgcaacctctattcgccttccgaagtaaagtttagaaaggcaagcacttgtcggtagatagtgagatgaacctgttcaaggcagctactcgaccggtcaaacgccggacttcacttattgtccgaggtgaagacattgctagaaaagcgtttatctgccttggattcgcttcgatacctcgttcagtcacaatatagccgaggaactcgcctgagggaacggcgaaagtgcacttcgagggattcaatttcataacgaacttgttcaaaatatcgaaacactgctgaagatgatcgagatgcgaagtggagaaagccgatttcaccaacatgtcgtcgatataaacctccattgttttgccgaggagatctttgaacagtatgttcctcgttccgttataaaggaagttttctcctggtcatccgggttcatcaggatctgattgtatgcggagaatgcgtccataaaagataacatttcgtgtcccgtagttgattccacgtgtcggtcaatatggggaagtggaaaacagtccttcgggcatgccttgttgaggtcggtgaaatctacacagacacgccactttccattctttttcttgaccaccacggggtttgcaagccattccggatacttgacttcgcggattaatccttcttcgaggagtctgacgacttcggcatttactgcttccgcgcggtccggaccaagtttccgatatttttgcttgaccggtttgaaagttgggtcgacgtttaactcatgcgaaatgacttccgtgctgatcccggtcatttcgccaacgctcgagacgaaagttcccttgtttcgcttgaggaaaagaacaagtttgcttcggaaactttcgcctagattagctccgataccgacaagctgatctggatgctcctcgcttattatcacccgctctacgaggtcgtctcctacttttttaattggattcggagcggcctcgagctgtggttgctatttgactttgagcttgtgtccagtcatataacacattctagatgtacgctgacttcccaagatttgctttactccggtgggagttggaaacttgacacattgatggtaagtcgaagggactgctttcatctcgtaaagccaaggtgttccaagtattatattgtaagcggcaggtcgatcaaaaacggtgaattcgatcattttcacaatcccttgagcagtgaccggaagtgtaatcgttctgagtaacattgaagtctcgctcgtgaaggaaacgagaggactcaaagctcctttgatatccttcttagaaattcccatacgtacgagggtatccagaaaaattaggtcgacagaactcccagtatcaatgaggactctttgcacctcgcagttccccacgtcgagcgatatcacgagggcatcgtcgtgcggtttatctaagtcggaggtttcttcctccgaaaatgaaatttcagggcagtcaatttgattggtcttaggccttttcgccaccggagcgaccaccttcctttcgtgctgcttaattgcgctgacagaatcccgaaagagtttagatcctcccataattactttgaccatcttcttcgggccttttggagtgacgggagctggctcgttcttttgctttttgttgggaggtgaagatatctcgaaatctaacacgtcgtacgctgtctgagccaaatcgattgttgtgacatcgatatcatgaatttctcccgaagcaaattttgcagccaacaaccttcccaaagccttataatcctttgtcgcatgaccattcattttgtgaatctcacagtatgcgttaggatctcggacccatttgttgctcgggagagctccattcttgccttttggagagaaaggcggtttcgatggtgacgcttttggggaagttttgagcggctccttctcaacagaaaaagttcctgctgctggctttcggagctcggagggtttcttcgaggttgcaggtggggaggcttttggtgcagcgttaaacttcgtagccaaaaaagcccgttcttcttcggcattgatccagttcgttgcttgatgaagggcgtcctgaatcgattcggggcagtttacagttagagattcacggaaatgcgactcatgccacaaaccgttcttgagggcggactgagctgccgaatcagacaggttgggtacttggaccatgatctctttgaaggcagtgatataagttcgaagtggatcgtcagctccttaagagaggttccaaagatgatcctcagtgacgtcacttttgataaagtacccgtactgcttaatgaaagcagtggagagttgcttaaagttatcgatcgaaccctcttctaactgggtgaaccaggtaagtgcgggacctgacaaactttctgagaatagcttgcagagccctgcatcttcttcatgtggctcaagcgggactcgacctgcgatgacctggaaaaaagtcagatattcttttggatctcccttgccgttgtaaccggggagtttgaaatctcggaaatcgcgaatacgaagctttgagattctcgaagtgaaaggtgtcctccttgttgcttcaataactttttccacttcgggggccgacgtggtagcctgatgaacctttgcgttcattgcccacatttgatcttgaaggttctgcagctccgagttgactgtgctcggctctggtcggggattagaattcgggagtctgatggcgggatccagtggagccggcgcccgagctattgtctcatctgagactgcagcaagacctgctgacggagattggatgactggattttgtgtcgatgttgctctgacgtcaaccggaggtgaaggagattgctgaccagaagcttcctgcgaattctggacgcttgggctcgcggcgcgctgaaagttgagtcgtgttcgaacacctgtagtccatgccgttcctgcagagaatcaacccgctcggcatatgcattgtgtgttgacctgatctcggaatggtttacagctaaagcggcgagctggccattgcaacgctcttggaaagatacgaacttatcggagagtgtcgttacggcgagctgctgtctgtcggttttctcggatagctgctgaagcagctgcttgatgttgtcgagggtggaggcttggccgccggaactctgatcgtcggtgttgctcatggtggattgatcgttgctctgaagtaaaagactttattcccctccttctagcgccaaattgtggatgtcggaatccgcaattagaatcttgtggttgtttttacgaggatctttagtcttgttaaacgaacaatgatcgaatcgagaagagaagaatgtgtttgtgaattttgtgtatagtattagtatttcatgaatcgtccccattacaattgtcatcaactcgtatttatactcaatacatcggatcaaacgtattaaactatttgctgatttcacgctgcggatctcgccttatttacgtcgtacgttacgaatcttcaactcgggactttaatgcgcagtttaagtcgcgatccttccgtttctgtattaatgtcggatcaccctttaagcggccaggctcatactgggctatgaattgggcccaattcatcttgaagcccatagaatgcggattgggccgaagtgggccgaatccgacatccacagttactacttaatggtcaaattctacaaacctcttttactcacaaggtaagtttaaattttgaaattaagctaaatcaagtcattgtaaattaaaagacaaaaaatcaaattaaattgacgtaaaattcagataattaaaatatcaggtttagagaattctcaagaaatagtcaaatagtagatctatgagttacttaaaattgttattgcaccgttctagaactgcaaatctcaattctataatcaatcaactctcgttgcattgacttactatgttcaatagtatttaccccaccttatatgtagattcttagaattaagcaaacattaatatctggtttggtaagtttacttacgtatctaaatcaaacctatccgcatctagctatttagacccatttatgatagttctaacaacaagagccctcttggattttacctattaacttcagaacaaattttagttagctactctacaactagaattaagaacaattaaagatgaaaaactgtaaagataaatcctaacaggttatcgatctactaatttatctaaatctctaatgagaaacctaaacctaagaagatactcaaatatgatcatagaaatagaaagcatgtttgaataagattgcataaattaaatcaaaagaaaaatagagtttagaaagaacttctctctacatagttttaaaacttctgaatttacccgattcaacatttgttttttgttagtaattggtttgacataaaactctacggagagaaaaatttacccgacataaactaacccggtaaattgtatgtcaattatatgtatatatttatcctttatctcatttcgaatttgtgcaatatttatagtgtcctataattcaaatatgtatataaagacaccacatgctgaaattgtttcattaatttcttcaccgactaccgcatagagagaatattatagacaatataggtaagttatacatcattaaattaaacgatttgttcgagtaaagtcgatgatttcaataagtggcattctaatacccaaaccgactaaaactgcacaacaacatttgggtttaggatttcgttccgatcgactttgttatggtggctaaattaagtggtttctttgcacaagatttcaagcatgaaattcatcaaggacacaattatataatgtactcgctaactaagagaaacacgaaacataaattatggagtgctattgtgtttcattatttagtaccccaagttgattaattacctctttattctaattatgctagcttcccaagatttcatgtcctttattgcccaagttctgattatttttgccagtactatataacaatagtttaaagattatatttatttatgttgtgtctagggtttgatcaagattatgactttgtttgtaaaattatcgtcttctatctgttctatgcagtttaaaaaataaatgttaatgtttcttttcttaagtaccatatttaatatacaaattagaaaatgccgtaaaaacatgcatagacagataaaatatgtgtatgcatgcattaagatgcattaatcagtgaaggatttatagatatgtatacaatggtagcacattgtatatatatttcttgcattttagtactcgagaaattaaaaaagttgaaaacagaaatgatgtatacacttcaccaatcatatttacgtagctttgacattgattcactgtttagaattgaatcatccagatacactaaaatataagcttttccacatcctttgatgtgtgcatttaagatgcatgcatacgtcgaatatagtgtatgtataattactactatccgtagaattggttcaaagtatcttaccaggtgtaagatttgaaatagaaaattaattagtcttatatacttcccaaaaaaagttactccaacgtaactgattaaaaaaatattgttttagccctaccagatctgttttatacagtatatatatactacaatattctgattttactagatctatatatagtatgcccaaatactatatataattctctcttgtttcttaatgatacggccaaaactcttctttaccaatttcagtttcttctatatgcaattttcttttgtcaattctgttcatttttataaaatgcatgcaaagccaaacctaactcagaacataaattgacaatatttttgatcgaataaatagacacgtgacggtggagatattacaagaacaagacaccaaaatctgaaacgttgccaataaaaaaaaaagtaatgaccggtgatatccggtggctaaagacaacaaattgcacctctctttacccttctcgacacacatttcaactccttagagcaacatgaatggtggtctatcttatgagtccctaaaaaccaaaataataataatattttaatgttgttattatattttagttttttaatagagtttgactactaaaagaactacacgtgtatatttagggttgagactgtcctttaaataaggttttttggatctcttctctcctctgtccttctctttttaattattttttttttatttttattataagggattcataagagagaccaccattactgctggtcttagattcttccggatttctgtaagttttttaatcttttgtttatttttagaccagaacctgaagaactatttctatatactgaataactcgctttaatctattgtaataattctataatttttaggtatacatttcaatggatcagttactcttttacctaatcactctatttatttatttctgtcataacacctttttcagttttgttttttactttcttcttcttttgtctgattcctactatggcctttcatcctttttttttttttggttgtggatctgaatgaaagttgttctttttggtttggtgagtacttttacaaaaaatgacatctgtgaaaacagaactgaagactttcaagaaagtaaagtgaacatagacactttactatattcggatatgtgttgcatataatcgcagttgtaaattgtaatttgtcgagaataattatcaatgtagacagtaatttgctagatcttattatgctaaacatgcatgcaatttggcttgttaccttttcttagtcaaactcactgtttctttaatcttatatttaggaaaaagtcattaatttggcgggaaattgttgtaaaatggcaacaggtgattccttttttttgtcctttgttttacttaaaatcttcaaaaatattatgaatcatatgatcactatttccttacatatttaatcatatgatcagttgatcgctgttagacaccatatcgttatttgattattattctttagattctaggagcattaattatttcagaggcagcagtctgaactctgagtaagttcagtttgaggaaagcaaaaaaggaaatttattttgaatagaatttttttaatatagacattttttatacacatatataagaagcaatatagaaggaagatgtataaactttgaagcgggcctattgctatataaatatattttgggtgagccctaaccctcttttgttttttttctggcaatggaaattaaatgtttaatgttaaaatgatatcatgtttcctcaactcattgatctctcctcactaatttttgctaggaatatatctatatattatatatataatcatcactgtccatagtaattaaaaaaacatttcttcaaaaataatgtgatattcgaacatgtgttgtaactttatccatgtattgtggttttatttgtttgcatttatatcatagtaaatctttgaaattatgatttgcatgttttaagcaagacgtgataggtactttgttttgaaattaaataatatattttttttttcttgaaaggtttagagttttgtcttactgttgggatagtaacttactaacttatgcctgatagtaacttattctcattttgaattatataagaggttgaaaatgttgaatgactattcatctcagtttttaccatttgaaatggtctgaatgatgtttaactttttttttgcagatgaatgagctgaatgatgtttaactttttttttttcaactaaaaaaatttcaatcattcaactatatttcatccatttgaagcaatagtataatatagttatctacgtgagatttgtttgttcttcagttaaaaatgtggattattggatatctatataatgatattacggatatctataaaggtaataattcatcttatagagtagaatattaaaccaaaattataaattgagaaccaaaacgaatgccataaattctataatgtaaatgggaacttgagttttttttttcttgttgaagaggatgtatagtgtggttagtgttaaatattgaccgattctctgttacggtgaatgtacaaaaaattagctatacagtatttattatgtacatatacattaatatgaacggtgttatggatgacacaaaggcatgcgactaaacaaagacctggctcctagcacaatacgagcttctagtgtgcctaggacataagtaattgtatcttttaactcttaaatattgttttatttttatttattcaaatcacttaacaatactatctcactttgacgggtgcgaaatccaattaatcggtcaacagattttaactcgggaaagccaaaacaaaatcccaccccaatttttctccatttactaattttctttttacaggagaaaaatatttattaataggatgttattccttttttcttccgtctcacttatattcaaattattttgaacgaagagtgacttttactcttaccaaatgtgctttgttgatatttaattaattacgtctgttcatataatattgcatgtccgtacacacatgcaatgaactcggggatctacaaataaactataatttaagaggatcgatccaattgttgttttatgtatattatcttcatatcttggactctctcaatgagattgcatgtatgtgaacacgtagacgtatacgaatacgtagccgtgagcgtacacatgtatatggatatgtatgtacatgtgtatgttagtatgtagagatcagagggaagaaaatatggtcaatggtaagagatgatttgcggagtgtgggaatgctgggcttaggggagtcattaatcgcattaaacgagggacgtgagttccaataatccaagtgggtaatttagagaaagaggtgattttaattttttgttggtttaaactttagagagagagagggaattagggtttggactttttctagttggaagcgtagatttgtcttatttacgacactcgtgtccctatttatttcaatatcatatacagatctgccaaacagatattttaaagaagtgcatttgtattcattttagtcactttatgtgccaacattattttaaagtccattcaatgtagtattattttatttataaatgtggttgtgcataaaaattctactttatttctatatatacttgcatctttttaatggttgctaaattaatttacatcagtccctccttgatgagatcataaaaggattatttaaaaacatttaaagcgagccataggtttaactttaaaaaaacctgtttagcttcctaaaaattatctttaagactttaacagaaatcttcttctcctttgtttcaaccttcaagttacgagagagatatatatatatagtttttactttctagagagagaacgtaaggcaaggattttgtttgcagccatacttggagaaagcagaactagatctcttcctcttctcaatccttgacaagtaatacctcttcatgatttctctttaccaaacttgcgtttctcaaatctcttgacttatatatcttgtgatacgtctctaatcattttttttttcttccaattcctatcatttcagatcaaattatatacctcactggtttaagctttgattccaagaaaagggaaatgaattctaacaactggctcgcgttccctctatcaccaactcactcttctttgccgcctcacattcactcttcacaaaattctcatttcaatctaggtttggtcaacgacaatatcgacaacccttttcaaaaccaaggtatgtgcactcacatttatgtatatgtatgttcatattcaaggccttaatgcaattcttttattaaacatatactatttgctatgttaaaagcttttaaaaacgaagggttcaaatattaagacatgtaaaatcgaaagcatcattgcacatgttttaagattgttatgttcatatattttcttgttttttttacaaatttttgtttgtgttttcaccacaaaaataattaattatattctttctaattaggatggaatatgatcaatccacatggtggaggcggcgaaggtggagaggttccaaaagtggctgatttcttaggagtgagcaaatcgggggatcatcacaccgatcacaacctcgtaccttataacgacattcatcaaaccaacgcctccgactactactttcaaaccaatagcttgttacctacagtcgtcacttgtgcctctaatgctcctaataattatgagcttcaagagagtgcacacaatttgcaatctctcactctctctatgggaagtactggagctgccgctgcagaagtcgccactgtgaaagcctcgccggctgagactagtgccgataatagtagcagcactaccaacacaagtggaggagccatcgttgaggctacaccgagacggactttggaaacttttggacaacgaacctctatctatcgtggagttacaaggtgtttaagatgtctcaattttttcgcgtgacaataataaaatgcgtatataaatttgttacttaattttttggggtgttatatatagacatagatggaccggtagatatgaagctcatctttgggataatagctgtagaagagaaggacaatcaaggaaaggaagacaaggtaagtgtagtcatttatttgattgattacttcattttatttcctctttcggtcttgtctcgatcgaaatcttaatttcggactaattatgttcctcatcattcttatgttttcttgatgtttgtatcttggacttcttcgaaatctctacagtctacttaggtgagtataaatgattctttcatttttcttttgttattgattataatttgatttaaagtaatgtatatactgaagaatggtttgtttaatcggactatgcactcaggtgggtatgacaaagaagagaaagcagccagagcatatgatctagctgcacttaaatattggggtccctctactactaccaactttccggtaagttatttcaaattttcatgaatatttgtaattgtaataattgttgataatatcgttagttcctccgtaatttttatttgattgcgtattttagataactaactacgagaaggaagtagaggagatgaaaaacatgacgagacaagagtttgtggcttctataagaaggtgattttccttttaatcggaccttgaatgtaaaacttcaaatagaagctaagtaggaactttctaatcagataattctatgaaaaaactttctaattaaagaacctcgcgtaaacaattgcaggaaaagtagcggattctcgcgtggtgcatccatgtatcgtggagtaacaaggcatcatcaacatggaagatggcaagcaaggatcggccgagttgctggaaacaaagatctctacttgggaacattcagtaagaataaatattaaccatgcttatatataattctctcaaatcatgtcttcctaaatgatatacaagaccgtttcaaactaaatagagatcactttttttttggtgagtactatatagagatcattagatataaatattaagtttaatctaatatcaaaaatataattcagttttattttatagaaaattatgtgaattaacaccacttacaagcttaaatagatatatggtcatgcttatattcatatattttgctcaggcacggaggaagaagcagcagaagcttatgacatagctgcgataaagtttcgaggtctaaacgcggttacaaactttgagataaatcggtatgatgtgaaagccatcctggagagcaacacacttcctataggaggtggtgcggctaaacggctcaaagaagctcaagctctagaatcatcaagaaaacgagaggaaatgatagccctcggatcaaatttccatcaatatggtgcagcgagcggctcgagctctgttgcttccagctctaggcttcagcttcaaccttaccctctaagcattcaacaaccttttgagcatcttcatcatcatcagcctttacttactctacagaacaacaacgatatctctcagtatcatgattcctttagttacattcagacgcagcttcatcttcaccaacaacaaaccaacaattacttgcagtcttctagtcacacttcacagctctacaatgcttatcttcagagtaaccctggtctgcttcatggatttgtctctgataataacaacacttcagggtttcttggaaacaatgggattggtattgggtcaagctctaccgttggatcatcggctgaggaagagtttccagccgtgaaagtcgattacgatatgcctccttccggtggagctacagggtatggaggatggaatagtggagagtctgctcaaggatcgaatccaggaggtgttttcacgatgtggaatgaataaaagatgaattctctgtgttttttgcgaggcaaggtagggtatggaataattagctactttaatttccacaagtattaggatcggctggagtcttcttgattagtagaggatttagtgttttattttcttacttttgacggcgaagatgataaaacttgtagacggcggttatcagagtcctcgagggttagtctttttaggggtactatagtaacattagaaagtacccgaattttgtttaaaagctaacccttctgactaatttttcaaacttgtattcgtaatttataattgaagatttattgttcttatatttttatttgattatacatacttactaggatttaacccatggtacaccacgtagcaaatattttattcatatatataataatattaaattttacggttttagtttagtattaaagttatataattttatattaatgttgtaaataaaaaaattaatgatgataaaataacaaaataaatatttaacctgtgttatattaatttaaatccatcttgctatatttcatatctatccaaacccgtccggctatatttttcgtctcatgatattttaattttttataagtttaaatattagttgtggaattagttgtgattgtgattttatgccgaaaaaattatgaacttttaattccatggaagattcaaaccaagataatgaatgtttttaggtgcacatataattggatttgttcatcatacgggatagtaaatgtattttggtttgtttcacaatgtttgttttaatttattgccaaaatttaatacatataattcaaatagttcaaatttttgttgttttaagatttaatgaatattgtaggtgagataaaaagaagataatttattatgttttgcgtgacatatgggattgccatatattttaaatctttttggtttgttacacaattaattgccgtaaaaaatcaaaccattaattaaaaaaatcaaataattaaaatttagtggcagccattgtaaataagtcacaactccatgatttatttcacaaaatatatgcaaaaatgtatatgtagatttatgaatttaagtgaaaattgtgcataattataatgcttactatgtctctatacataatctttaactctatttagtcagtgtgcacataatttttgcttattagaaaggtttcttttggaaggactacaactctcaagtccctcaacaaccaataatggggaaagaagcttaattcttgggtcacaaagcatatgccttttgggaaggagtttaaaaacatacttatctgagtttctggtcgttacaagaatgaaaaaatatgggtagctcgagatctgtgattatgcgtttactcacatagaaataacattcatttcactgttgcattgatctataaaaaaaatgctggtagaacaaaacgttgtacgaaattagtagtgtataacttcctccacttctccaaacaccaaatcttggatcattcttagagattttaatcaaatcatcactttcagaagactatttctcggtgagaaatgattctaccccttcaaggtatgattgtatagcttacatgcttgttaatcaacaaatggatttattttttactgacattgattttttccatactaaaatcgacaatcaaggacttaacctgttaagagaaagcttcttagataactattcacataactgtataatattctgtttttcaaaattgcatgtaaagtaaaacaaataacatatattgtattctttgtttcatatataactgactaattaaggagttcaattcactttgaaaaatgacaaagaaataaactagcattttaacttgttgaatagccaaacaaaatgcttttggcttatgattttagagaatagacagtgaaatacaagtattgctcaaacccaaaagtatgtattttctctgatttttgtagtgcttacaattaatgataatgttacaagtactagactttacaaatctaagagacacaagggaagttttagcatttttgatcgattcaattgaagtacacggatatgcaggtacatattatgtgtataatgtaagaatagtctttgttgttgagttgcacacaaaaaaaaaagtcttggttgttgactttcagaaagaaagtaaagttaataattgatattttttaaagagttgatcatccgtaggagaaataattagtggtaatttaaaaatatctcttattatttacattaggaaaccatactttgattatccttagacatgtctttataaaactcgcatgttagatcagcttacaattgtttagtatacaactcttcagaacaaagagactcttgtattgtgacatttaaacaaaaatacttgatttttggaatgattaccgtctcaaaatagttagataatttttttgctaaaatgattgctaagactttaaaataaaataaacataaactagagaagtgaaactgtagttttatatagtttataactatatacaaccgtatatatttctcatagatgtgatccatgagattgtatatgctccattgtagatacttgaactaataagaaccattcttttattaataattttgttgtctaacaattgcttaaatctctgtcaaatttatagcctcttatctagaaaaatgagatcatagatattcatagtaggatgtgagtggctccaatatgtctttgaagaagttgtttagtggtaggagaaaaattatttcaagactctgacttcatttcatgaattatctattattcatataatacaattgcttatgagttatcttgcatccattaaaatttgctaaacatagctagatcttcttgtcggatacttcttcgagaaagaatcttgtttaattggcaattatcaccaaaattatataagtggttgttgatacacaatccattatcaataacactaatgatcacataatctgtaatttttcattacattactcaaaaaaattctattcaaatttgtagaaatctcacaaaaatataatttaatagcaatgtatggatgattttaattctcagtttacataaggaatgaaattatatattatgagttacatatatattgtatgctatgtatctctctagcacaaaattagattcataacatatactatcacctattaacattaatttatatgtcatactacataaattaatatgcgaaattatggatgatgcacaaaacacattagtaagaaaataaaaatccctaaaaaagtaagaagaatctttctttaatcaaacgagtccgaatttaggagaagtgaacgaattataagggttgtcctgttgaaacgactagtatgaacaagaggcggaccaaacgacatataaaacgagctgactaatattggacaagctcgatgggtttgaggacgagctaatagtgcactctctctatgtcaacataaagtgtagatcttgtgacaagacttgctattttgtatttataagaaccaagataggacatatgtcaaagtaaattggtggatctaccttccgacctattgacatggtttcggctttttatagacgctaactcatcgattaggttttcttccaaacgaattttaagttgaaaatagacccaattaccttaattattattggacattgtccattccttgagtttattccaattaaaacctgaattggaggaagcccaattcttccctcaacaactatgttacccatctcctcttaatatataaatttttaaaatataaaagattattattaattaagaagtttacaaacacttgtcaaacaataaccataataaaactggaaaaagaatatattatattctagatattaaccaaaaagcttaatatcattttcaaactattggtaattaactaattgttcttgaaaaatgtagtgtctaattccgtttcaaaaaagcgagttaacatttggaagccttaactctttttttcaaaaaagtaaaatgaattgaaatttgaaatgagtaaaaaaatcaaaagcagagccaataagatacgtacacgtcatagccgactctagcacaaacggtgtgaaacgaaaatataaacgtcgctacaaaaaaaatcgtcgagacaaaccaaaaaaaagcctaaaaagccgaccttttttctttctttctctcctctacctctcagcttctgctggatctctccagcagacacgatcttgttcggagagattcgtagggtaaagggtttctcttcttctctattttgctttcacctttataatcttttctgggtctcgattttgttttctaatttcatttccatttcgattcgattcctcctttgtgtgggaggcctttgttcggtcaacttatgtgttctgtttttgtctcttttttattgattagggaccgatctatcaaggcttcaagggcaaacaggtgaattagcttttgggatttggttttatttagggttcatttgtaagctgttgatgtgaattcttttttatggttctcgattgtttaatgatttgattgtttggttatatttgcatgtgggttttgtgtgtgtttggaaatttgaatgaattgatgtgaaaagttgtaactcttgtttttgttgatttaaaaggctaagttttgaaaattttcatttctgtggagagaggtagtgttggatatgagtgatattagctatgtgggttttgtatgcttttgaattttgaaatgaattgctatgaaaagttgtaacctaagaaaggtagtgttagatggaaattagattagtatgtgagttttgcatgttttagaagcttgaaatgaattgctttgaaagtttatagctttacgctgatataagaggctaatttctaagtagtgttggatagaaataagattagctgctctaatgtttttaaaatgattcatttatgattctaatttgcctaatgaatgtggtactaggtgctaggtaacctagacacttctgtttggttgggtagcttattgttagaaaacaggtcagcaagatttgtttgtctgtttcaggttctagagttagcagagaaatggctctaggcttgcttttgttctcttctttctatttagttaaagatcctgaattataggaaggtgcttataggtagtgtggttataaactatgaagatcatgtgtaaggtatccagataagttatttcatgaaaagaattgttcatctgcttattttcatgtgtatgttttgcactgattttctaaggcaactgatgatactgattgggtttaaatgtactcatcatcgtgaatcttctgcgaatttttgttttatttttccatgtcactgagactgaagatggctgattttaaatgtagaaatggaccacgacaagacaggatgccaaagcccacctgaaggtcccaagctatgtactaacaactgcggtttctttggaagcgctgccacaatgaacatgtgttctaagtgtcacaaggatatgttgttccaacaggagcagggcgctaagtttgcatctgcagtgtctggaacatcgtcatccagcaacatcataaaggaaacctttaccgctgcgttggtcgatattgaaaccaaatccgttgagccgatgactgtttctgtacagccatcctctgtccaagtcgttgcagaggtagtagcaccagaagaagctgcgaaaccaaagggaccaagccgatgtactacttgcaataagcgggttggcctgactggattcaaatgtcgctgtgggagcctcttctgcggaacacaccgctatgcagacgtacatgactgctccttcaattaccatgctgctgcgcaagaggcgatagctaaggcaaacccggttgtgaaagcagagaagcttgacaaaatctgaaaatctaagtaaacttctctggtttcatcaggtggcctggtgtttccttctcctgtctgtgtctggttcaagtattctcatgttaaaaaggttttatataaggtcgaatgaaagcgtgcttgatctttagcgtcttccatctctctgtggtgtggaactttctattatctgtgtttgcaagcagagaaacgtgctcttaaaaaaaatgctttgtgtgtttatctttctactatttttgagcactgtgttattgtttcctgtttggtctgtatcatattgagattgtctctgtagctacatgaagcttatttaaaaaggcctgtgtttgtccttcaatcagtgattcctttcaatttctctggttggtgagttatgtaactttgcaaagtcatgagcttactatatatgtgtatatatgggtcgataaacactgaagagctcgctttttcctgttctgagtacgaacgcccataaccatagaagaaggagatgatcgtaaggagacaaaagctccaaagggtgtcgtcctcacttgctttacaacatgtcctatgtgaaaaaccgacgtcgtatcaagttgcgtaagcatcgtatcaacttgctctaaacggcatcgtaggagttgctttaaacgtcaccatactatatactagttcctgaggacatcgtataaaaatgtttggaactgtttggttcattgcctacacaacaaacggcgttttatctgattttaccggttttttgatgagtcatcactgatagtgataactgatgcgcttttgcttcaccgcaactccttctcaaccgcaaccatttcactagagacacatgtaactatctcaaccgcaagatttggcaaacaatcaagcgtacgttcgttttcctcataaaccccagcaccgcatcttctacgtacttattccgctttcagttttgtttgatttcaccaaaataccaaacaatatttttttttgttttgttaaagaacaacaaaaacaaaaattaaaataataataaataataacaaaataatagtaataattaacaataaaatttactattttttctttacttttgtttgatctcatcatcaaatataaatacaagaaattttatgattttccatatatttttactttttctaattgaagtttttcttcaaattaattaaaatatatagaatatctaaataatatattattaaacttaccaattattatttcttttttaattagaacaaaatgtcattgttaaatatagatgaaaatcaactctcatgaatcattattttgcatttaatttttgtttctagttttacgtagatttctttctatttagtttagactttagaggatacaactaacttgatatttttttcgcgttttggatccaaattgaaactatacacatggcatacataatctcatcaatttaagtatataacacacttcaaaaaaagataaaaaaaattagactcgtgttttttttttggtcaacaaaaaatctagacatataaaatgccaatgcacatatcatcgtacattaacacacacatcattctataatatcaccaccgagcgtaaacaacaaccgagaaatgaacagagcaatgccgcagccgcgaccggaaactatacgtggcagtttaaaacctcacatcatggtgtttccatatccagcacaaggccacttgcttcctcttctcgacttaacccatcaactctgtcttcgtggcctcacagtctccatcatcgtcactcctaaaaaccttccttacctctctcctcttctctccgctcatccatccgctgtttccgtcgtcactttacctttccctcaccatcctttaatcccttccggggttgaaaacgttaaagatctaggtggttacggaaatcccttgatcatggcttctcttcgtcagcttcgagagcctatcgtcaactggttaagttctcatccaaatccaccggtcgctctcatttctgatttcttccttggatggaccaaagatcttggtattcctcgctttgctttcttcagttctggagcattcttagcttcgattctccattttgtctctgacaagcctcatctctttgaatcaactgagcctgtctgtttatcggatcttcctcgctcccctgttttcaaaacagagcatctcccgtctttaatccctcagtctccattatcgcaagatcttgaaagtgttaaagacagtaccatgaatttttcgagttatggttgtattttcaatacttgtgagtgtctggaagaggattacatggagtatgtgaagcagaaagtgagtgagaaccgcgttttcggtgttggtccgctttcttcagtcgggttaagtaaggaagattccgtatccaatgtagacgcaaaggcattgttgagttggctagatggatgtccagatgattcagtgctctacatctgcttcggaagtcaaaaggtgttaaccaaagagcagtgtgatgatctggctcttggtctcgagaagagtatgacccgattcgtatgggtggttaagaaagacccgataccggatgggtttgaggatcgggtcgcaggtcgaggaatgattgtgagagggtgggctcctcaagtggctatgttgagtcatgtggcggttggcgggttcttaatccattgtggatggaactcggtgctggaagcgatggctagcggaacaatgatcttggcatggccaatggaagcagaccagtttgtagatgcgaggttggtagtggagcatatgggtgtggcggttagtgtatgtgaagggggtaagactgtgcctgacccgtatgagatgggtcggattatcgctgacacaatgggtgagagtggaggcgaggcgcgtgctcgggctaaggagatgggatagaaggcacgagctgcaactgaagtaggaggaagctctagtgttgatttagaaagacttgtcaaagaattgagctctctaaagatatgattctaaatgaataagcttttaaaaagagttctaaatgaacaaaattgtgttttcattgtcaaagtatcaagtatctacatagctagagtctcactaagaattacaaaactttgaaccagtataaattaacgagggagctagttagatttaaaaccctcatgttatctaataagcagatacaaagcgaaaaattgggtttcagatacaacttcataaatcattggaacattaaaacagggagagataccaaaccctatgggtgcattttcaaaacctaaatatctacaacccatgttcaaaacggcttggtcaacgaaagttggtcatttttcaaaatgtcaaagtaaagtttaggatttttatggcattttaaaagtttatgctttgttcgtcccaaatttgaaagttcacgattttttcgacattttttccaaaaatgaattgaaaattacatatttaaattaggctttaatttctttgccattttgatttaagcttgcaccacaagtctttaatttgttctattacttaaaagtatctcaagctaacggttgaaaatctttagatgataattaacttcttagtaattaaaaaaaaaacagctcaaaacaaaataaaacaaagatccgaagaacaaaactaaagaacacgtgcatacaatcaactaatgcatgagaggaaaaataaacaaaacccctaattaacactcattgttgttgctatcatcttattgctcgatatcagaagcagcatcatagtagtcctcatgatctcctccaaaactatcaatcccacaaggaacatgaccatttccaaaggccttgacatggtccttaagcgacctcttgtgcttaaaatccgagccacaagagcaataccaaagctttccacaattcttctcatgcgttctccaatctcctttcactgcaaaggccttaccacacatacgacaagcaaatggtttagacccatgtttacgtttgtaatgtgtttggagggttcgaaagtccttaagaggcttggctcgtgggtggtcaatgttgttcttgcaaccgggtgcacagcagaaacatggtagtcttagcattcctgttggttgggttcctcttaaggattctggtccctttctgtattgtgagccgtgtccccacatgtgcatctatgataaaacgtttttcagatcacggatacaacaaagatgtcagtcttaaagtaatattggttgtttttgatcaaaaatcaaaaagtaagattggtttaagtgtatatgtttaagagatatgaaaaaatatacatatgtttatgaatagtagtcaaatcattttttcatcgacatttaaagccaaacttattatcaacattaagcatttataaaaaaaattattttttaaaatttatagcttatgtaatattttccaaaaattatttcattaaacattaaatgttatgttgttatttaaaagtgaactaaataattttaacacatgcggaacatgttacaaaaataataatccaaccttatgtaagatataaatgtgctttaacaaaaaaaagggtgtaagatataaatgtgaaatattaaacacttttaagtgaagttggagatgtagatattaacattagctttcattatttcatgtcaacagatttctttaggcatggaataaattttagctgtatctatcttcggaatatatttaaacaaaacaacgtctctattccgaaataatctgctagacatttatcttctgccttagctttttaagaaatatttttggggttttatgagttcacaaaattcaagagagacaataaagatgtaggtgtactaaaagcatatttcagggttataaagagtcagtctgacaaaaagactgttggttaaagaaaagaaaatcttccgacttaaaccccgttgataggtcgctcttacatagccatcatcattcaacaccctgaaactgattagacgtgtacgatcaaatttttaaaaggtgattattctctagttactaaacaacaagccatagtagtagactagtaattactaaaagtactagtacttgttaattaccactattaatgatacccctaaagatccatgaatcaataacgagtttgtacttagacgacccaaacaaaaatacagaaaaacccacaaaacaagactcaaatctatattcaagaacaataaaaatcaaatcttgaaatgagtttagtctttagagttgattcttgaattaatggtgtcatacctgcatgttgttgtatctgttgaatgtcttgaagcaaagaggacaagtgaactgtgtaggaccaatcaaaatctgagaaggagtaggaatccaatagtgatgacctctgtgtagatctccatgatgatcatcatcatcatcaaggtgggactcaactgtgacttctactcctcggtcatgatcttgatcttgctcgtccgtggttgcatcaggagcaatattgctcctaatgctctcaccaacaccgtagtttggtaaccctagatgaagatccacagtcacaagaggatcatcaagaaagtttgaagagctaatttgatgggtgtccatgaaatagtgttggtcttgttgttcttggtgccttatggggcttaagctaagaagaggaagagcttctcttagtgggggtgagttaggggaagtggaagtggtatgagtatgattaatgtaattagggtttgtggtattagagtaatagtagctaccgtgagagttgtaaatgtaagagagagaagtggaatagttgaagctattatggtcacatccattgttgaagagattcgaacaagctggattagacatgactctgaggagaagacaaagaagaagaagaagatcaagaataaaagcaccgtatctatatggtttgatgggtatgtgctagagagagatgagatgtgagtagtagtgtgtagatagatatatatatatatatgagtgtgtgagtgtatatatatagatgtatgtatatatgtaacgtttgagatgtgacgaagcggtggaagattattcattatgataagaaaagggtacggagaaggtagagggagaaaagacctaagaagaaagttgaagaagcaataaagaaaccatcttcgggactcgcaatggttgatatgtatgtatgttatgcactttaaagtcaaatattagatccttgtacttaagattcagggtgagaaatattatatcttaaaattcaagaataggaattggagataaatatgtataatcgtgtttaactaacatatagtgattagaaagtttatttcgtgtaggatggtctcacatgaattggaaacatcaaataacacaagattaaactttcaaggaaaaaaagaaaaccaccagatcattacatatttactgtattgaaattttatggatcacaagcaatgcctatcaccggaccgatatcattagcatttagcaaccgcttcaatggtgtctactatctagagtgaagttgtttagcgtaacttatttataaaaaaaaattataaaagaatttaattatttttctcagttataatcaaaagtcgttcgttaaaattaaataataataattccgtttgtaagatttaacaatcataaagtaccacaacgtctccatgcatgcatgcaggttacgaatatacatatgtttctattatgtcactaaatcccctctagtatcggatatataaagtactggtataaaatttcgaaatttaaatagtacgtgaagctattggtccccaagacacaaactaattaatcctctttatccttgagtacatacataaatcaaggatatagatgcttgttctctacctctcaaacttcgaataccgataattatgtgtgtgtatacctatttacggagagaggttatatattgataaaacaattaggtgttgtggggataatatattgatggctttgggaaaggagatagttgtgatctaagacagcacttgctttggtggtctcgtctccatgtcggctccgtttcagaaacatattacttgggaatggtaattccaatttcataattcatctacatgtaaatgtgtattttactggtttgtataaagatttcaatttttatttgctgcttttaaaaatatatatattgttttcacatatatgttttttttaaaccatatttatgttcttaatcatgcatatatacgtttctaacacatgctttttaacaaaacaaaatacataattgtttttcttttttgagttggaatgttaaggaagtcgatcatgggattgtaacaatattgaaatattcttttatcagaaaagaaaacaatattgaaataccttttttctttctcgcctttgtaaccatgatacaaaaaactattatatggtcctctatagactatttatatgttgctaattgtcatgggatgtataataagaatgaaaatctgaacaaatcagattgaaacttatttaaaaataaattgtataaactaatcagttcaatatccttttaagctgagttagtctaccgacccaataaaactaatatatttaatcaacttttttttttccttttaattcggttaaattgtttctaattcgttgtatatgtaaaatcacattgacgtagttagagaaaagacctagtttttattttttcaatgacatttttctcgagattgagaatcttaaccaaatgaaacaatttcagtagatatacaataacaatcaatattacttgtattgtaacattgattactagtttcaaactatttgcttattgcaatatcaaacatgtgaatatgggtcaaagatcgtgggtttgaaagtgaaaatctgttggtcgtaattaatgtgtgaactcgatgatcttaggataaaagtccaaattatattgacacagagtttacttctgatattattaattatgagagaatataaagacatgagatgttcccgagatagcacgagtgtgaatgttttgtggttgcactttgcaattgcatcagttcggtctttcaaaccgtctcttgtcttctgtttcttcgctgttctctcttcttcaaacatttttatctatctatgcaccacactatattaatacaactaattgatattctgttgaccaaattttcttttttccttttcattttctcttacaaatgtttggtatcatagtacacacttatagtaggatatacgtctttatatatgtataggtgtgacttatatatgcataaatgtgagcataacatattaacatgtaggccataaataatggttgtgggtttttaaatggcttttatagtttttgatttttgatttttggggttttatcttttgtaaaagattttagttattaaaagacatgaatggtgattttagtttttggttgtttttgagaaggtatagaggattccacacacagtgaaagcgtcaaatccagcagtttgtacttgttcttgttgataagtgatattttacaacgattcttattttcttgaaattacttaattttattctacctaaataatcaattccgattaagaacaaagtaagcataactcttttatttttatttttcttgcacactattaaagataaagaaagttcaaatatattcatcttctaaattattttgttagcttcacagtttaaaatcgtatgacaatattctagagtgctaactgcggctccttaccagctctagaatacatatactaaccgaaaaccctggacctagaatctccaaaaatcaaattctagagaaattatttgctcgtcaagcctatatttttccttagttgttgtgaaaactattcactaaaccgtcacaacttcttttgcttttatctcaccgcccattcaataacaatccttggctcatcaccccttcaactccaactctaccacttcagctcacgcgtccttgttagcagctaagtcgtctaatgatgcaacttcatgatcccaacatccacctgttccagaatctacatctacagtctcatttgttttttacttagtttgtttctcaagcactgtaactgtccaaacctgaaagtcaaccaaagagaaacctagttacatcaacaaaacaatatctagaatcagcttctagcgtagatatcaaaagaaatattcgtacaaactgccatgtttaacttaataaagataaaaaaaataagtcatgttcaaaaagaaacgaaaattctgaaataataggaatttgttgcaaaaaagaaaacaaaaacaacagtttttatccctgctgctaaggcatcttgtttcatctgaatagccagtttcatcgcatggggtgcaatagttgtaccgattgcttgactcgtaaagggtcgctcattcttgacttcataaattggaacaatatgatttgccatcatgaagcagtataccaaattttggaaggataattgaacttcgcctgtgatcaaatcgactattttataatttgactagccaaaacgaaaatctaatgttacgtttaaaataagtcgatgaagaagaaaattaagtaaacaaaaattaaatataagccgatatgtgaaaaaattgatcttattaaagatagaataaaataaattctacttgaatatatggagaaaaaattatgaatgttaatttaatttgtctattagttaatattataaattatgtaattttaaattacttatttttgaataaactataaatctaaatgtttactatgaagtatgaaaaataattttatgggtttaaaataacaatgtagaaacaataagacaagaaatgaaaagggagatcaatgatgctatatacataccctcacgtttcatcttccgtcccttataatcactgtcttccaaatgattgtaagtttgtaacatttttttttcttacgaaaactagcgataagataaagaaagttgaaagattttcaaaagatgcagtttctagtttaaaaaaaaaatcataatgactccaatgcatatcttctgaagcatgagaataacaaacaaatactgcttacccaacaagcaattctgcaacatactttatcctttgtgtgttgtacagatgcttcatggaatgatccgaattcaagggcaggaataggatgggttctacttaatgtgcaaggaaatgaaggaaaaactgaacaagtatactccgaggcttttcatccgttgaccctgctaattcagttcttgatgcagaggtcaatgcgtttagagctgatcttttccatctcagacgtcttaattacaacaatgtcatcttctgtggtgattccctatccctctatcggtacatggaaaatgtaaggaaacagtttcatccaacccctggctactagctcaagccggaagttccaacctagctgatgattcatatcgtatttggatgatattaattctttgactattagctcatatagcttcaagtttactcgtagaagtgaaaaccacgtagcagatcttctaactaaaaaggttaaatgtcaaaattccccttttactatctcttgtgatttctaaatgtcagtgttgtaatgacttaattagcttttatgaaaagttggcggagaaaaaaaattcatacagatgcagacatgtttttaaaaagtttatatagaagtatattgtcttattatttaaaatgttgaaatacatagacatcaaatggacacatattttgatataacattttgccatatattctaccaccaatttatgttgatgacttaattagcttttatggcgtattacttattatgacacaaaacaaaaaccactagcataaacattagttaattatagggaaaataaaagcacgagaacattactagattttccaatcaagtacgtgccctggtggactttcatatcttcttgtaaaccaaattccatccattcttgcaatccataagcgcaactgattacattttggttgaatgccttgacgatatacttgaatatcataccaatattttggtctagttccgtgactaagcaaacaataccaagtttcatcattaggataattatcctcgaattcaatgacataagaaggatctttaaagtttagtttgtgaaatcttgtaggtttatcgtctatgctaccctttcggcatgcaatgttcagaataataccaggactcagctcgttatgaattactacatgatttttgcaatgtgttgcttgatttagctcaaaatgcatagtagtaattaacataaaaattatgagataattcattttttggggtctaagaacttttttgaataaagacatcaatatgtagtatttataattattttgtgtgacaatttttgttattcatttagtaaataatctttttatgattagcttaatttaaaaacaaacataaaaaacttggctatagatatatatctaaatgtaaatataaaataacatggaaaaaaatatagattaccattaacatttttagattaaaagaaaatcaagatgataaaattagaattttaaatccatctcactcaaaaagaatataatgtatgattgtataagatataataacactaggtagtatcatctatttggaaatatatcttaaatttctattaattgtttctatcatctaaagttcattctttctttgtacacttaatttttttgatacatcccactacaaaataagtagataatataaatgtttacatgtctctaggcatgaaatcttataaaataaatattataagataccttcttcaatatggattttgtttttttggtcagcaagatggattgttttttctatgttagattacctattttggtggctatcaaagtcttgcaaggaattatttttccattaattattcttgaacatcttattattaaagagctttagatctatatgtccatgtgaggtttaaacgttaagtccaatccatgaaaatcagtccaactcatgttttaatgttaagcctaatatttgaaaatcagcccaactcgtgttttaataaggttttaacgttatgagaagtctagtttgagaatcagcccaactcatgtttccataccaagtcgattacaaaagcgttcttattgggtattagaaattcgttcagttttaattaaaggtatatttaaaaattcaaaaggctgctgataactaacaaaacgaaagagtatacacaaattgtgctttatgctagcaaacaagaaaattatggtattctctgcaacagacttatctaaattgctgaattagagaggaccaagacttttttttgtctcctttctcctagattttacctaattaaaacataaagatacaatactaaaacctttataaattaataatattgagtctggaaatttttattaatttataaaagtaatattttatcgagaaattaatcattattagtttacaaagagatttgactactttatatgttttttctgattctcttttttttttttggttataatacatattgggttttgaaattctattatttatagttccttatactcttttaatttacaaacatgtctacttcctttagttccgcgggatatctaagcatttctttcttactctaactggttaaataactttgaatctagtacttttttgcatataaataaatatatatatatacatatttttctgtttgccttatgtttgtttttataatattattacgcaataaattatacgatatatattttaaaaaagttttataatatgatcctcataaaaatatttttcggacccatcactatgaatatgcaaaaccactgcgaaactcttttggcacttaaccgttttcgggatctctattgtatatccatcattgaaatgcatatattttgtgttccgcatacattttttgttaactaataaccgaactaaatataacaaacttttgtcttccaaactgtacctttttctttcttccaaacttgtgtctccttcattttttatttactgagcttgtaaaaatattgctactaatttgtcaataatgtttgcgagtatttggtagaaatattcaaaattttgcgagagatagttaagggatttgcaacggcaagttgacatttttagttcatgtaaagcttagtttatcaaagtcgaattttttaaatttgagtggacgtgcgaggaaatttaatctcctcatatatttctcgcacatttgtgacaggtttgcagataccttttcgcgtgggtgcagtggcggaggtagggtgttagtagggggtcacttgacccccataactcttaggaaactttttattaggcttaattatttggtatttgttgataattttgtttaaaatattaatattgacccccttaacttatgttcaaatcctgtttttgcaccctttctattattatatttcttttatttatgcatattgtctaactttttccatctttcttatatattaatttacatcatttgtgaggattacaacaattttgacattattttggttctaatattttatttaaaacattagtaatatttaaacaaaaaattagctgtaaaactgtattctaataaataatttaatattaattacttatatacatattaatattgacccgtaacatttatttctagctttgccactgcgtgggtgcataagatcatctccattggtcaaaaatatggagtgtctttaaaatataaaaataatgaaagaagagtaaaatgaagagtgtttttgaatagtaaaaaattgtgtgacactttagacccaaaacaatatgatgtctttaaaatttactattaatttatgtttgaatgatatttgagacacccaaaaaagataaccaatggaggtgctttaagattgtgttaggattcaaaataaaaaaagaaaaaaagaaataataagatcaaaaaagcaaagaagaatagtaacgctataccctcacattttggctttcgtcttttcaactccctctgttttcgcaaattttatggttgtaagttgcaacacttccatttgttacagaaaccaatggataatatgataacgaaagttgtaaacgttttcaaaatagaacaatatagtctcttgtaaaaaaccataccgatccaaacatataaaccaaaatagtataaaaatatactattttattattgaaaacgttgatgcaaaatacatagagatatatcaaatgaacttgtatataaccaccgaattagatcgatgacttaattcgctcttacagcttagtacatatgacagcaaaatgaaatacccccatacataaacattagttactgaattttccaattaagaacatgtcctggcgggctatcatatcttcttgtaaaccaaattccatcttgtttagcaatccatgagcgtagctgaccacaacttggataatagccttgacgatatacttcaatatcataccaatactttggtctagtaccgtgactaagcagacaataccatctttcaccatgaggtagctgattattatcctcgaactcaatgatataaaaaggatctttgtactttagggtgtgaaacattgaaggtgtgcgctctatgctgaattgtcggcatgcaatgttgagatcaataccaggaccgagttcgttatgaatcactacatgattttttttgcaagcttcattttgcccaaaatacatagtagtaactaacagaaacattatgagataatccatttttttatgatataaaataattcagaagtacaaagagcatcgaacacttattgcagtaaatatagagaaatgcagtcagccaaaaaaaagaaacagaaaatatttggaaatatatcttaaacgtacaaaaatataagggaaaatatattagtctatcatctcagatctcattcgttgacattttgcatttaatttgaatgaattcatatctccatataattctagtgttatgtaatttttagatttttttctggaacataaattattttacagtcaacaaaaaaataactgaaaatatatggaaatatatctttaatatatattaaaatagtaggcaagtaaattaatttaagatctcattcttttttcttgtatacctaatatgaatgaaatcaatcaaatcatatctccatataattttagtgttataattcatagatttttaatagacaagatttggaaatattaaatatatttaaatttatattaaataatggaaaaacaaactagtgatattccacatttaattttctagtcaagatgacagtttcttgtaaaaatatcatacaacatcctttcaaaaagttagtataaaagtatattgttttattatttaacgttgatgcaaaatacatagacatcaaatggactcatattttgatacaacatgttgccatatagtctaccaccaatttatgttgatgacttaattagcttttacggcgtattacttattatgacacaaaacaaaaaccacttacataaacattagttaattatagggagaataaaagcaagagaacattactggattttccaatcaagtacgtgccctggtggactatgatattttcttgtaaaccaaatcccatcctttctagcaatccatgagcgtagctgaccacatcgaggataatagccttgacgatatacttcaatatcaaaccaatattttggtcttgttccgtgactaatcagacaataccatttctcaccgtgaggtagctgattgttgtccgcgaactcaatgatgtaaaaaggatctttgtactttagggtgtgaaacattgaaggtgtgcgttttgggctgaattgccggcatgcaatgttgagatcaataccaggaccgatttcgttatgaattactacatgattttttttgcaagcttcatttatcccaaaatacatagttgtaactaacaaaagaaatatcagatgatccatctttaggatctaatacagataaatttttgtggtaaaaaagacatcaagatgtagtatttataattttcttatctccagacatattatctgtatttagtaatgatcttttaatgacataagttaaatttaaaaacaaacatcaaccaagaatctaatgtagaaaagtatgattggcctagaagatttaaactaaatgagtaattctttctaattatagatcaccatgaaaagtgaaaaccaagccaaagtatacgtttaacaaaatccagaaaaacaattagattacttaggcagtaaatttatcgactgaaacataattgttggtgtagtacttgaagctacgagagatatggaaaattcgcttagtcttcgaatactcgataatccaagtctttttgtctgtcgagaacttcagaatagatgtggcacaatgcttaataaatgagttttcaatttgctaaaaaaaaaaaagatttttcaaaacctcacttttgtgtcgtagcctcgcagacctaaagcttgttttgcgatgaattagtgacatcgttctaattactaaataacaaaaaaaattctacaattactaaataacaattaagtaaataaattacacatttgttgctagctggtgtatccctaattaacgacaaaaggatgttttacttaattcaatcgacaagaattttgataattttcttgaacaaagaaaagactttgataatttagtccacccattaccatgctatttttatccgtacgtaatcagaaagaaaaatattaggtatacaatgcaatatttgacctttggttccaataaatatcgaaacgcctatataaaagaaaattctcaaaacatatatatctccaatagttgtgtaatatatatattgaagtctgcatgcgtgactgatcacaaattagtgataaaattttcttggtgtaactcattttgtagcaaaacaaaagatcaatattttgaaaaattctataaacgtttgtagagtgaacttttttgtgaaaacaataggctcaaaggaaagttagaaggctatgtaatgacaacgagtcgaaagttcacaaaattaaatttcatggttatttgaaataataacagtttggaaacataaaattatacatagatttgacaatgaaatgtggttgcaattgttagacaacaagactaaatgatcaaactagattaacatttattacacatattacacactaacaaaaacaattatgtttacatttgagtgaaggaacaatgcagtgtaaaatatgtggcttaaatagagttttcttttgtcctaagcagaaataagctgttcttgtagaggtctcttggctggagttgaacgttgtgactcagacgattgaattagtatttgcattgttatagttgcaatgaccaagaagaacacaaacaaaagaatgatcttccacgaggccactattgaaagccattgcagtagcttgaaaccaccgaatacaaggaaacctaaccaaatgatgaccacctgtttccaacaacattaccagaatttataagagaatcaatttaatagcatttcgatgtgtgatgtttcttacgattaatggcttgattggccggttaatttggtgaacttccaagtcgctgaaaacgtcttttgtgaagtatttctcaagttgagcatcctgattttaaaagtaagcaatgtagtggcatgagttttagcgtaaataggaaagtttgatgagtaaaatattgtttgtgaaccttggtgataaatagatcttggcaccattgtgcaatgccatcatcggtttctggcaactcactcattttgtgacgtctcatctgcaaatttatcttcaagaaaaaagaaacaaagagtttacgatatagtgagcataggcttgtatacgttaaaaaaaaacacaaacacatttgaaacttttttaacctcagatgattgtccactgaacatcctaagcagagttggtgtaggctgattgttatgaacggttaaggtacagtcatatattgcaggaacaaatgaccgtatttcagacactgccgaaacaaatccctgattttgcataaaattatgtaaatccaagtgaagtaaagctcataataacctgaaaaaagcaagttgttggtgaaactcacctttgtacgaggaatcaaaacatttcgaggagacggtaagcttctgatagaggcgtactcttgagcagcttcaagcttctcctgagtgaaacgagttccttcaacgaaaagagctaaccaaaatgtcattggaaagtcttcaagtcgtttaaaacctgcctgtgtaagaagcaagacaaaaaaaatgtttcaagcacatgaaacagaatcaaatttaagctcaagaaagaaaacaaggcaaaattaaccttgagggtattctcatctttagcccaacttctttccaagaaaatgtaatccgaaaaccacatcgaccaacctatgatctgtgaaagacttgtaatgtttcagtaaatcattaaagagagtaaactaaaaacaggaaaattcaacaaaagatcaaaagaactcactggaagatacttggcttctttcttcatgatggctaatgagcttccaagacaacctacacgctgttatatgattaatcagagacagtgtttatatttctccaaatttgaaaaatcatgtttcagtgaaagacaaaaacacctgagccatgacccatccaataagccaatcaatgtcacttcgatgattgcttaagacaagtgcgtgttctttccctgaaatttaatatcaagattaaaaagaatcattatattcaaatactgaagactaggttgcataaattgatctttaccaattaactctagagtctctgcatcgacgtataaattgatctgcagcaacaacaagacgaatcacatatcagactatgatacctctatgtaaaccacaacaagattcatgaaaatcaccaacctttatacaagcccaccaatcaaacaaccatatgagctgcaaccaaagtaattccgcaacatttttgtttattcttctatacaaacttcttgagaatggacgaacaatgatgaagaacacaagctggaaacagagaaaatgtgtccaaaaacctttagttgacacaagtttcgattttataacagacattatagaacataaaatgtttcagctatgtctcttccattgagaagacaatacaatgaagatagacttcttttggtatcagagcaaaacaagttttaacaaaaatggatgacctgaatgatgttgacgatgagccctgagatcaagaagaggacaccaacagggataaagacaagagccgcagggatcttcatgtctgagagagataaggaacaacacaaagcagcaacagaagaatatgaaaaattgttgaagaagacaccaacagaggatgactgttatctttgttctcaaattctttttgggagattagagaattgaaaataaggaaaatccttgttgttttgacgcaagagcgtttttcatgctctattttaagcccatcaaagctatgtctctctctcttacaatatttggttgccaaacacatggagacatgtgcgcatgtaaagctctcccatgaagtaatagagtaaaatgcaattaaaaacagcaaaactcacatatgtcataaaatttgattttggcggtttttgagtttatttttaacttcacggttgttaaatccggatttcacattggcaataagtggtgagatcaaccttccttatatactactaaagtccttttccatctttctaatatgtgatttttctccaatgttaagttttatggagttttaattcagaatcaattgacaaaaagtagaaaagcacatgttccttatatactactcaaatcatttcccatctttcgaacgtcggatttttctcaaatgttaagtttcataaacttccaactcaaaatcaactaacaatgtcttgaaagttacacgtttcttataaactactcaagtcccttcccatccttccaatgtgggatttttctccatacatccccattcccctcgaaataatggctcttctagccactaatctcgacataatccatcatacctctcgagataatgctcgtttctagctatttcacggaattgggctttattttggacaatcaattagtgagggtgatcaggtctcttttctgggccagattagcagggtagggtgtgttcggactctgatacaatgttaaattcgggtttatggactttcaattaaaaatcaattggcaatgagttgagagacctacatttcttctatactactcaagttacctatcatctttttaatgtcggatctttgtccacaaaaacttttgcaaagatcaaaaaacattaatcgtcccatgactctagaataacgcccgaaccattgcaagtggttcccttgtaaaatgctgcaaactgtccagcagctagagtgctaccttgaccaccttcaaataggtgtacaaccgcaacatgtgtagaaccaaaggtgtgcctagaatttttaatgccaaagtaagaaaattaatttcatgttctttttcttttggtacagtacttggtgggattcaaaaatgtacatactatatacaccaaccgccaaaaaatgagattcaaactacagtcaataagaagcaaggaagactaaatagagggagctagtgattatctgacaatcaaatcaagtagacaaccccgatggatgtcctctccctacataagggagttcagttcttactagcactttgagctccaaaacaaattcaatatttgaattttcccaaagcctggtcaagcaatatatggtcaaatttaattgaatgtttatataaaaatttatggtaactgtagaaaattgtaaactattgttaaatattttataagaaatataatacaaaaatttaagcaatatatttacttatttaggtctgggcatatgagtattctgggagccagaaattttagttaaagtttatatatatataatatttaattatatattatagtagatgatatatttaaagaatagattattgtttacatggtctagagaattgttttttttttcacctaaataaaactaaaattatattttttatatgtagtattgagtttttgaccatttctcaacaaactaacaagcatcactggttgtggataaatatttgaataaaaagaactctgacttttgatatatagttttgaaaatgacattatttccctctcactgtcagaggaaagaacgacgaaaggacgaattgttcttccgcgtatttactcatatatcccttcttgatcgacgaccatccaccatgaaaagggatcttccgttggcctcgtagatttaatttatcgacatctattcagaatgagtactgacgagcttctcaccttcgatcatgtcgacatccgattccctagtacccttttatatatctttgatgatctctcttaattttcagatttgtttactacatgttaatcggttgacttttgattttgatgtagtttttttttttttttttaatgaatgtagaatttattcaaccataaaaatgaaaaaccttgttacaataaatgcatccttaaatcgaatgttgttttgattttgatgcagttgaactgaacaagcaagggtcttgctctctcaatttgactaacaagaccgacaattatgtggccttcaaggtgaactactacattagaatataattgtctttgttttcttctacatatttgagcttttgtgtatcttagattttcaaggtcaaatttttaggctcaaacgacgaaaccaaagatgtattgtgtcaagcctagtgttggtgttgttcttccaagatcctcttgtgaagtattaggtatgtctctgactttttttttctttcgtaaatggactgttcttcgccggaaaagggttttggaatcatgggtttcatgtctccaacctagtgatcaattttttttgtctccaacctagtggtcatgcaagcactaaaggaagctccggctgataggcagtgcaaagacaagttattgtttcagtgtaaagtggtggaaccaggaaccatggacaaggaggttacttctgaaatggtatggacattctaatcaacgggatttacaccatgattctgatatgttcttaacactattttggcaatttggcttttggttatataatacactcttttaatttctgatgaaaactctagtttagtaaagaggcagggcatcgggttgaggagactatattcaaaattatctatgttgctccaccacaaccacaatcaccggttcaagaaggattagaagatggctcttcaccaagtgcttctgtctcagataaaggaaatgcttctgaagtttttgttgtacgtatacatttccttttgtattgctttccttgttttctagtatacccccttcttgatcgacgaccatctaccactcactttctctaatgtacggataagggaccgtccgttggcatcgtagatttaatcagaatgagtgacgagcttctcatcatcgatcctgtcgacgttcaattccctagtacgcttttatttatccttgatctcgatctctcctaatattcagattagttttttactctgttgatcggttgacttttgattttgatgtagttgaactgaacaagaaagtgtcttgctctctcaatttgactaacaagaccgaaaattatgtggccttcaaggtgaaactaatacattataattgtctacatgttggagattttgtgtatcttaggtttcaagggtcaattttcttaggctaaaacgaccaatgcaaagaagtattatgtcaggcctaatgttggtgttgttcttccaagatcctcttgtgaagtgttaggtatctctctgatactcttgacttatcttttttactttcgtaattaatggatcgttcgccataaaagggttttgggatcatgatgagtttcttgtctccaacgtagtgatcatgcaagcactaaaggaagctccggctgatatgcagtgcagagacaagttattgtttcagtgtaaagtggtggaaccagaaaccacggccaaggatgttacttctgagatggtattgacattcttatcatcgggattaaaatatgattctgatattttctaacttggcttttggtttattttcttatgaaaactctagtttagcaaagaggcagggcatccagctgaggagactagattgaaagttatgtatgttactccaccacaaccaccatcaccggttcaagaaggaacagaagagggctcttcaccaagagcttctgtctcagataatgggaatgcttctgaagcttttgttgtacgtatacatttccttttgtaattgtgttgctttccttgtttaattttaggttctatgactatgaaatggaaagtaatccatcccaattttgtcctgatggcttttcttcttttactcccatcttcaggatatgctaagatccttgttggttccgttattttccaatgctgcctcctccacggacgatcacggcatcactctgccgcagtaccaagtgttcatcaatttcaggggagacgagctgagaaatagctttgttgggtttcttgtaaaggccatgagattggagaagatcaacgtgttcactgacgaggttgagttgaggggtacaaatctaaattatcttttcaggaggatcgaggaatcgagagtcgcggtggccatcttctccgagaggtacacagaatcatgctggtgcttggatgagcttgtgaagatgaaggagcagatggaacaaggcaaactcgtggtggttcccgttttctacagattaaacgccaccgcgtgtaaaagattcatgggagctttcggagacaacttgaggaatctggagtgggagtaccggagtgagcctgagagaatacagaaatggaaggaagctttatcatcagttttcagtaacataggcttgacgtcggatatacgaaggtataatttgataaacaaaaatatggatcatactagtgaatttctgtatatagtgttgattctcaacttcttctctgagatttctgacatgacaggtttaacgacttcttatcagttccttttaatgatgaaatcgaatcttatatcatatgacatatatatatacccaactaaattttgtgtaaatgttttcattggtgtgtagtaatgagagcaaatttgtcgactcaatcgttgaggaagtgaagaaagtgctaatcaagattggtaccgaggaaagagaactctaagaaacttccaccacgactagcaaaacgttcgaaggagaatgagaagagtttgatatgacccctagtccctagattttggagtcgaagaagagcaaagaggtgcaaatgtatatatcaggcaggttcgatttagtttattaatcttcattgttatgaaaattatttttgtgaaaattgatagtctccggtgattaatttaaatttacatctcttcatttatatattcaaaaatttacgtaaaaactgttttctttttaaattattatcgactcgcatgacctcttccttgcttaaggatactatcatatcttacattttggggcattcttttctacaacctttagaagatttggacttgtctcccgtttatccttttttttttctctagcagacaacttcttcaaagatcatcttccatggaagtttcctcgtttaacattgaccgatggtaccacaatatatatcaagcgttcgtacttcgtaggttttcttgtgcaagagacagcaaacgtatctttagatgatcatgacctgagagacagccctttggttacaaactatgtttgcttcactactcccataaatgatttgctaaaattccatactttattgatatctctctcccataaggtttcttcaaaagtacatcactcgagtttgttttttgcaacaatgtatttgttcgagtttgaatctttcacgtttatagtttggttatctcctacttagttttctcactcggatattaaattttttaagactgttatatttgcatagttgctactggcttaattttatatttttaaggaatttaatattctattttcattttatataattaaaattaacagatagttgaaaccccgtctatagtgcatagtctttaattaatcatgattctatttgtccttgtataagtagtatattttgttgtactttggatttaccaactcttgtatcccaattaagtaaatacataagatgtaagaaaataactacattaaaacccatgcttgaatactacccaataagtaaatgaatttgaaaaagaaatctattacagtttactatatctggaatactacattacatttaaatcattattcatcaatataatatctctactcaacagaaattttgcattttattcatgtaaaatttaatctttgcaattatttttatattcccttttaagaggctttattttgatacaggtaaaattatttagtttgacaaatatatcaaaacataaattcatttggatatgtgtaaatctaaaaagttaaaataattcatgaactactactaaatgattaagtacacaataatacatttctagtatatctatatatatatatatatatatatatagatatatacatatatttgtttataaatactaaagtagctatgatgaaaccactccaaattaatatatagcttatctacagttaattttatatggaagtatctaatacattttaaatatttcctcataaatttagtaatcttagtaaaacatctatttgcttttacttgtttttttgtatattactttatgcaataatttatttatttttatccttttttagagaccttatatacgtagtactagttatatgatttagaaaattttgtgacacccaagtataatctttattttcatcttaaagctaatggtctcggtgaaccttccatgggaattagtggaggagatcctatatagggttccacctcaatctcttgctcgattcaggaccgtatgtaagcaatggaattctctttttgacgacaacaagtttgtgaacgaccacttggttcgatcacgaccacaattcatgttccgaacagattctaagatgtattcggtagccgttaatttcagtggtccatggatagaggtccatgagttaaccttagacattcctggtttgaattgtgagatgccaatatggctatacaactatgttgattgtgatggcttgttgttttgtactagctacaagtttaaaggggtcttgatttggaacccctggttgaaacaaactagattattcgcatccaatcatcattatccaacgaaatatgtcataggttatgataataagaaacgatacaaggtgcttgattatgaatttgaaccatcatcaaaattgacgatttatgagattgggttatattcaaagaaagttaaagatttggagtctgatagttcttggtcagttgtccaatccaatagtgtatctctgaatggaactttatattgggctggtgtagatgttaacaatggtattttcattagaagcttcagtttttcaacagagagactaacaactttttgtcgcctacctttgaagtacaatgaagacaatattctagcccttgcggtttttaggaaagatcggttttcgttgttaaaactatgcaataaaacatcaaagataaagatttggttgacaaagaatagtataaataatagggagataggattagtagaggacgtggtgtggataaaactcatgacagtgttaatacctgatttccctaaattgccatttcgttggtataatcgtcctgacctaacttacttccttgacaacgatgatgctaagaggctcgttatctgttgttatgatgaaactcaacaagtttacatctacatcgtaagaagaaatattgtaaaaaaaatcaaaatagatctctttgaggatctacttgatcaatctagtcctcatctccgtacttatatccccagtttggttcggcctacccaggtcaaagaggacaataacaaactatatgtattataatatatatttgtactttggtatttcgttaacaaccatatttttcttttcaatccaagatttttcttatctatagtctgatatttttcttatataaaactttgacatgacggcttttgttattgtataaaattaattagctttttcttttaacaaacctcgaaatgataatgatcgcttcgataaaaccttaaatgatttttcttatttcatttcttcaagaagaaatttgtttttcatggttttgttcttgatttttttgggaacgttcttagatcctagaaataaaccaacatttaactgcacggggacgatctcaaattgatgaattagactcaagtttcaaataaaactaaatttgaaaattcatatattaaaacttcataagaatgtaggatgctattaaaaatgagatatatagggcaatgacgtcgttgttgggtcgtcattagtggccagtgggcataagatacgcatttccttgaaaacttttagggtatacagtttttttatgatatccataccctcgagaatttgtaaagtttaattaggtttttgttttgggtaaaatgtttaatcatggtccaatacctcaaaggccaagatagaaaaccacaaatatggatataccataaatcaagaacctgaagatatgtattcatcaagtattgtttgaatcatccgtcctgacaaaaaaaatctgaaatgtgtgggagagaatattataaaaccaaaaagattcttttttttttgttttgtctaaataccgaaaagattcatgtagttcaaataggatacgagccagttttgtacgcggccgtttaaccaaaaaaaaaaaaaaaaaaagttcggttgcgattgaacttataagataatctcatggtcaaaaagtcacatggcaagtgaaaagtctttgcatttggtaagaagaaaactttaattaaaaaagcactaaattattcaaaaacgagaatccgacaacgacaaaaggacaaacgacgatgagaaactgccaagccaacaaatggaatactagaaagaaaacaaacacttaaatatattcgctatataatcgtttcttattattttaaacataattaagctagtacgtattattttagtattttgctaaattatactgtagtatctggctccccctccagctcgaacttccttgtcaaccagagactgacctcggtcattatctggaaaacgatggcatggtcacaactgcacatgaagagatcaatttagtgaaataatatagcaaacggaagtaaagtagttgtgataaaagggaagaaaaaaaagtagttgacggtttgtacagatgaattgtttttagcttgatttgtttaaatccagccttgctaagtttttcagcagatgatcttccagtttcataaggaaccattttatcatctttaacacaaaccaacgacaataattagcttaatatttttaataaatgagaaatcgatgtatatataaaaatcaatgttactcatactatttccatgcgtaactaagaccgaaagctctccagcacgcgatgtagcgtcaggtatagattctatttgatctcctaacttgctgaaaattttatttacgcttacatcagttaaaagatatttaggttttaataattagaagaaaaccatatagagaaatgacgttagggcttgaaaagaaatacaatctattgggaagccagcagttgatgccgacaacagctcgtatttgaataggaaaacttccaagtgcatagcaagtcgctatgtggagagctagtgctccaccaataccgtaacctgctacgcccttcatcactaccaaaacaagaagaatgacaagtgaaatactaattagctagagatgaatgtaatgtacctacaaattttagatttgataatttagattaccattttctggttcattctttaagagtccagcaacatgtgcagctgaattctttaaaccctccatctcatagggatcaggcatgcgactagaaaattcgttgaccttgaaccctgattcagtaaagaccgtaggaaccaatttaaatgttttcacctctatgaatactaattgcatgttcttctttgaagttttgaagcaaactgatcttacatgcccttgctggtgctccaccaaaacccacgttagagattagaggagagcttggacagatccacttaacctatgaataaaagaaatatgtgtggttaacaaagataaaaacattaattggtgaggttgatagaaaatatattgaagaaatcttacattgtaaagcgagaagctctttaccaattcagaggaactgtaacaaagacacatatgagagttaagagagaagatggagtttcgttctttgacttttatgtgagacaacaagagatcgctttgatcttttcacagctagttcaagacaaagaagctagcaaaacaaagaattttgcttactcatagccagattcgttgagatcatgaagccaaactattgtcgcctgatgccttgctctaggcgtcacagtaactgtgtctccaaactcagtggtaacttttttttttgaatgaaactcagcggtaactttagcccttgtactacctggaaatgatttcaacaaaaataattaatgacaatgtttctctcatgacataataataacaacaacaggaaacaacactagctaacatttcaggataacaaaatattaacaatcagaaacgaaacaagaaaagaaaccagaccagaagccatgctcttttgaaaagaaaacagaccagaagccatgacttttttaaaacgctctttacagagtttctttcaaaaagtttgaagttatcttatggatccctgaaacgaaacaagaaaagaaaatgtaagcgaaggtttgagtgaagttgtaatttatagaccaattgggtatacaagatataactttcttttaaataatgataaaagacaattgggtatacgagacagaaggttgaagactttagcttgcttttcctctacacttttcccttgaatcaaaaggtcaaaaaatttccctggtcactaattaatgaaggaaactaacaagaggtttcattgcaatttaccaacggctaattaatacttttaatcttttgctatttttcagaaaaaggcccataacaaccttaagtaattcgaatatgtggttaccaacagctgaaagcaaccttatttctgaatcacttattgataaaaactcaagaattataaccctctcgataaaggtacagagtcttatgaaaatttcatttactatttttacctccagtcatctaacttttcttatataaaatagttattactcaatatgctccagtcacttaatttacaaaaacaaactgaaaattgtgcttttaattggaaaaagttcagactaaaattttaattgagacatcatatttgaaatatattagatactatttcaaagaatttataatttgtgctcttggttcaaccagattaaagatttgaatactgaaaaaatgcaaagttttcagcatttgcattctgcttcttttatccaaaagtggtggaagttttaaaaatggtgcaaaccatataggttttagaaaattatgactatgtttttattcaagtaacttcaacaaagtaacttacataaaattatttctaaaaataacttataatacaactacaataagcaataaattgaaaacacatacagatttatgattcaatggcaataaatagaaaattgacgaattaatttgtttttctctaacacaccaggtatttgttagctagctaggtggttttagatttttgcttctttttcttttgaaatttctagggtttttttattttctttgttttgattatgttttttttcaagattttttttttaagattaaaatatatatatatatatatatatatatatatatatgtgataattttggtgagaatcagagtgcatgtatatatcatatgggttgtgaaccataaatagttcagtttgaaatgagagtttgtattcatcaaccttttactagaaatgacaataacaaaaagaggttaatgtggatagtttcggacaacttctattcccttgaatcaaaagttcaaaatctttgtttggttactaattaatgaaggaaaccaacaagagatttcattgcaagaattattttaacaacgtctaataattttaattgagattcatatttaaaaactaatacattgatcattattatttggaagaatttataagttttgcttctggttcaacaaaatttaaatttaaaattaaataatgctaacaaattttattttttttcattctgcttcttttattcaaaagtgggggaaggttaagaaaatggtgtgaactatttctattcatataatagcaacattcttctttattaacaacttgtgaatcactacagatcatgaagtttaaatattgattggtgattattcaggtaacttcaacaaaccaacttaattgaaattatttctgaatataacttttagtcactacaaaaaaacaatttaaaaaaatgccaaagagcaagagctaatctgtaactagaagtaataatatatatacagatttatcattcaatggagatacattgaaaacacaagaattcatttgtaggttttctctaacacacattagctccctaaataatgaagtaacttaacaaaggtttcattgcaaggaaaaatattaccatcgtctatctataatatctctaatcttttgctgagaaaggtccacaaccttaaagtttcgactctgttggttggcaagagctgaaagctactatttttctaagtcacacttattgataaagttcaagagttatttatcaacatctagtttatatatacaccatagaattcttatttatataagagaaggttttgttggtttacagtgagcttgcgagaatttcattaacttttttcaagattgataaagtacataattacgttttaaaactgatatattaatttaattgtcaaaaatcatctaacgttattaatattttggattttatggtattttcatttagcattttaagtttttgcacactcagatatccaaaatatcttgaatctcctgtccgtttctaaataaaaaaagtcaaactaattaataaatttctaaaaaaacatataccatgctgtatttctttctttttaaaaatgaaaatgaaataaatatttaatttctatgattgagatcatttcagaaattacttataataatagtagatatcagtgatagacattctaatcgtaatactattgatactctctttcgaccatttgcatttgcattaatgtatggatcaaggcagttttcaagtaattcatatattttacaaggttatttcagaggatatgaagacactgaagggaacaataacagaccatggttttggaagaaagctttaacgtctgttccaacaaattatggtttgtctctttcatctgttctcggtatagtcagaacagaacttgtttcttaagaacaagaaaccttctaaacgagcagagagctaatgaggatttgttgttcctctttagtgacagaagcgaaattgatgaaaaccaagctgatgacagtgaaactcaatcacttggacctgagattacttggaaccagtgctacactttaccaaggcacgtttttgtatacatatggttgaaccattcagttacaaaaagaattaagacaatgcgtagcctctgtctgtataacactacaccttatgatacagcatttcatcaaatgctgaagcttaaagcctctcagctaaagcctcggacctacagagtttgtgagagcactggcttctcttatgcgttgactagtttttgctctgcactggcttctcctgtatcagcctcaacagatgacatagtaggcattgtcatgattttgacaggtttcccgagtttggttttatcttccaatgctgcgagttgaagggcttttgcacagaccgggaaacactgatcatcccatgactccagaattacgcctgaaccaatgcaagtggttccctcgtaaaacgctgcaaactgtccagcagctagaccttgatcgtcttcgtctaggtgcacaactgcaacatctccgtctccttccatttcaaaactgcagctgtagaagccaggcccatgtcggacctataaaagccgctctcaacttatcagtgccaagtaaactatcatgtgtagaaagtaatcatattgtttaccttgcaacggagctctctaactttgcctgaaggtttcccactattccatcttaaggagccgacacggaaaatccgccttctcttgtcgattgagtaataatttctggagacaaacactacattgttcttggtgtccttttcaacaacatacctgtacatggataaagggatatcacaaccaaaattaaagatccaaaagaatttatacttggcgttcagccaaattgtcttctcaacactaatgaagtgttcatatattaagaaccagaagctgcttataattgtcatatgagccaattgctggtatctcaaccaacgacaaaaatagctaagaatctcatacatcttttaagaaacataccaggggccaccgggtaaacgcaagccttggcgttgtccaattgtgtaaaaccaaaatccccggtggttaccaagaaaatccccagattcggcttccaatataattccttccatctcccctatgtgtctacagacaaagtcgctgaactttatctattacagaaaaccatgttcttatgtttcagacttgcactagacaaacagccattaatcagaagagcaaactaaaaaacataccttcccaaggaaacaaattccttgcgaatcctttctatctttatttggcaaatcgaattgtgtggctagtttgcgaacttcgtcctgtacaccagaaaaaaagtatgacaaccaccacgaagaaatcaaaatgttttcgttattaattttctttcggaatcgagcagaggtatgggaataaaagctctcccaaccaagtgggacaaacttcctcgagtaccttttttacacaaccaagtgggaaaagcagtcgcttaagctgggtttgagagagatgtgagaggaagtaggtctgatccttcacctaaacaatagaaaaatacagactataaatggtagaggtactgaaattaaaagaaatgcacctacgaagcattatagccaaaaacaataggtacaatgcaaacattaaacatgctgatcagaaataaccggcagattaagtcaagagtattttactggagtaagtaccatgtcttgtgatagttccaaaacagatgatgcatcattttggtcagcaggaggatggaccactttagcataatgacctgaacctacatagtcatactccatatcactgattgcatccatgaatgcacctgaatatataaggtcaaactatcgctgattagtcaaattagcatatacacttcaactgaaagcagaagtctttcttcattggcgaaaacccttgatcacaaactattgcacttaagagcttaccaaacttaattctagtattacatagaacatccggattaggtgtacgtccacatcgatactcctcaataatgtaggaaacctgatatatagtaagaaacccaatcagaaacccaattactagcattctaaaaagaagcaacgaagaaagaacttacaactctttcccaatattcatctgttaaatgcacaacctccaaaggaacatcaacctgtaaaaatggcaccactagaaacagtaaacatcgtcccttcattgtaaaagtatacaaagcatgaagcttttgaaacaggaatcgaaatggtttatcaagaacagtacctgctcacaaacatgttttgcatatttcaaatcatcttcccaagggcactgattccagaaattctcaaagccttcctacacaacattgaaacaatcacaaacccatatgtctatggttccaacaagcaattacgaagaagaagaagaagcacacctgaaaccagattttgagatagaaagcggtacatgagtgaccagcggcgtggaggagacggagagcgacactgctatcgacgccgccactgaggagtacggcgacacgaagaggcttctcaggcatggaacatgagaggtattggtcgacgataaaggcatggcggctatagttacggttcgaggatatgagaggcgtgattgggttagaagattgtggagacggcaattgagaggaagaggaggaggagaagaatgaggggaaaacgcggaaggaaattgagatagaggaaagaggaaggcgaaatagcggtggtgagggagagaggaagggtttggcgacggcggagaacatcggaattcgccggcgattgaaccttcgggtaaaaccggagggtttatcttatctgcactgttttgctttataagacaaaaacctcgaaatgacatttttatgttatcatttggttcggttaaccaaaatgaaccgagccgcttgcttcggttaccagacgatgccaccaaaattagccgaatagttctgtttgcttgggttggctttcggtttattttggttaataaagtaccgaattcggtggtggtttgtgccaatcggtttgaacaaaaactgcatgcttaatgttaatttgctccatagaatcaatgaattagtatttccctcaaatggtaactattctgttatagacttatactaaacattgagaaaattacattttaaccttcaaaatattattaggtagcactttaaattttgaaaatttttcactaacattataaaccaccaaaaaataatttacgaataatttaaaccttcaaattagcttttctgtttgcaccgtcataaatatgacggagtaatccatttttgtttgtttattataaatttgtttaatctaatgttgagtggcatatatggagaatgaagtttggaatatgaacttgcaaatcaaaacaaatatattaaattaaaattaagaaatcaaagaacaaactgttaaatagtataagcatttgctgcgtataatccgaagcaaacaaatttttaaatttatcaggctcatttttattgacggcatacagcgtgacagtctcatgaatacttgcatcaataacacccaagtggttgtttttaacaaatcatcctaaacacattatatagtgccttgtaagcatctggttgaataactaccacgagccaaagtttattcatggttctaactctgtaagtgatttaattttcaatcacttatcaattttaagttttaaaaagatttgaatattcactttatactctatttatccgaagcaaacaataaatgaaattaaaaacttttgtggcacatgaacactaatctacaatcaaaacgcgaaatggtaacagaagaaccggcaaaattgaatcaaatcgtgaagaaatcaatattcattctaatcaagaatctaaaagtcgaaaagtttacctttgatccaaattaaacaacagaggttcagtagagattgggagatagagagagacaacaaagatcaaagaaatcaaagtgtaagttgaatacaaatctggtttatcattgtttatctctctggcatatatttcaatgaaatatggaataagaacctgcaaatacaaataaagtgtaaaattaaaagtcaagaagactaagaacaaatcgtaaaatagaaaattggatgcaattagaaaatttcgaatccataatttgtatattgaaagattttgatatagaagtagtgattgctattagaagaaagatgctattgattaactccaaaatctgaatatgtaagaaattttttaaaaaacatctgattagagaaggaggaaatataaatttgaaaggaagaaatttgaaagctttttgtataaggccatgtcgttgttccatcgagatcgtgggagaatagggggttgcagttttatccaaaaaatagaagcctttctcgtaaaaaattttatattaaaacattaaaataattttcatcatctagacattaagacctttttatattaggccacatgagctgcgaaatatgatggaaaaatgagctatgtgaccaaggcatacgaaattgttgttgatcatataacaattgtgtcatttgctattgcccatggatcaaaacctggtaaagtcattaattctttcaaaagctgtatgattttctctcgcaagatgattcactaacataagttatgtataagtgaagaaagtagtggtatgttttccaacgtctattccaacgtccagttcgttatggaatggaatatttagaagccaaacaaggtgttttcagtgggtaagtcaaatagaagattatttatcgcattctcattttcaatatagattttgtctttcaatagaatctgacactgtttttcaatatagacttgtaaaatttgttgttcgggtgatgggcgatgtcctcacacagctgaaggaacatgaagaacatatcacccaaattttaagaatcgatgaattaggcttccgcaacaccaaggtgagtactgaattttaaattctgatagaggaaaaaaaacgggttcttttatttgaaacttacgtaatgctttccttcctttttttatatctgacacttgggtttctatttgttaatgaagcaatatgtgctcaactttaacgactctaagaagcctgattcacacatatccacagctctgatcgagatactgaaggtatgttactcttgtatattgttttctgaagctatggtactctataatatttataatatttaaaattcttctaaagttaaaatatttataatatttgaaacttcataaaagtcttaatattataaatattttcaactttttatgaagtgtattctttagaagttttaattatattagctaaagccttatggacactttagcaataacaaatgagtacgatcaaagcttttgttcactaaagggtttagacagtttattgtaaattcggtaggttttatatgatgcactagtttgctcgtttcatatatatgtggtttatcctggtagctagtgattttaccagcttaaataactaatgtagtgcattgtgcaatttatgggtagtagaactgttatactcttcaatttatggcatctactttatctcttttaatgcatgcttcaataacacccaataaataaatgaatttgaaaaaacaaatggtggaagctatttgacaaaaacaaattatcttaagatgcatgcttcgcttaagatgaagtacgtagaagtaaaattcgagtttattatgatgaactagctgatagttaagttgtagcaaaattttatgggtaagatgtaaaaaaaaattctttctaaatactaaattgaatatagaaaaagtgtttgaattactatttcaaattcaaatatcatcaataagattgtatatagaattacaatgtatataacatagaatacataagactcaaattttgttcaaaaccaaaattattacattaaatatcgaaaaatgtgtagcttaccattttactattcaaaatcaaattctgtcaaaaaaatttacatttatatctaacacccgcatatttagaatggtcttatctagtatagtatatacaatattttactatattttgatttctacattatatttaaatcataattcataaattgtaatatctttgctcaacaaaatgtttgcattttatttgagtatattttaatcattacaattatttgtatttttttttgtttttaaaagcatctatttgatacaggtaaaatatttttagtttgacaaaaacatatcaaaacaattaattcattttgaaatgtgtcaatctaggaagtgaaaataattcatataccactaaatgattaagttgacgataatatatatttgttttttgtttagaaacactaaaatagctataaggaaacaaatccaaataaatatagcatatctacgtacagtttattttatctggaagcatctaatacattttaaatatttcttccaaaatttaatattatttagtcaaaaaatctctttgttttaacttattttttgtacattaccttatgcaattatttagatatacatataattttattttgagagagaccttttttttttgttcaaagagagagaccttatatatatagtgcatatatactgttgttttataatttagaaaattttgtcacacccaagtataatctttattttcatcttaaagctaatggtgtcggtcaaccttccatgggaattagtggaagagatcctatgtagggttccacctcaatctcttgttaaattcagaaccgtatgtaagcaatggaattctcttttcgatgataataagtttgtcaacgaccactttgttcaatcacaaccacaattaatcttccgaaccgagtctaagatttattcggtagccgtaaatttcaaaggtccacggatagaggtccatgagttacccttagccattcctggtttgaaatctgagatgccgatacggctacacgactatgttgattgtgatggcttgttgttttgtactagctactttaacggggtcttgatttggaacccctggttgagacaaactagatttttcccatccatacatcgttatccagtcacatatgacataggttatgataacaaaaaacaatacaagatgctcgattattataaatgtgaaggtgactcatcaataaaatccataatttatgagattgggttatattcaaagaaagttaaagatttggagtctgatagtacttggtcaattttccaatcaaatagcgtatctctgaatggaactttgtattgggctggtgtagatgttaacaatggtattttcattagaagcttcagtttttcaacagaaaaaccaagaactttttgtagtctaccgtttatgtacgatgacgacaatgttctagcccttgcggtttttaggaaagatcgtctttcattgttaaacttatgcaataaaacatcagagataaagatttggttgacaaagaataatatcaatgatagggaggtaggattagaagaggacgtggtgtggataaacctcatgacagtgttaatacctaatttccctaaattttcattttattggtataaccgtcctgacctaacttacttcctcgacaacgatgatgctaagaggcttgtcatttgttgttatgatgaaactgatcaggcttacatctacattgtaaaaggagatatgttcaagaaaatcaaaatagatcagtatgaggttctatctgattattctcgcccgcacttccatacttatatccccagtttggttcggccttcccgggtcaaagaggacaacaagaattaaggtttattatgtttggttatagaacaaactatatggatgtattttgtactttgttattgaataaaatcttttagctttctctacaactttcaaaataatattgatagcttctattaggggtgtcaaaatgggtcaaaattcatgggccaactcaactcaactcaacccatgaaccctaatgagttaaattttttgactcaaatgagttgatgggtcaaatgagttattgggtcaattggtttgatgagtcaaatgagttgggttgtaatggttaatggtttcaatggtttacccaattaacctatcaatttttgtaaaattgaattaaaccaactaaaatctctaaaccaatatcaatttaagcttaaccaacacatctaaacaatttaataaaatcaatatttttccaaatttcttaaatatacaagcgatgaaattgagaaaaagtaaactcgtaatttttccaccaaaaaacataaatccgtgattttctcgccaacaacgtaaacccgtgattttcccgccaaaaacgtaaaaccgtgagtttcccgccaaaaatgtaaatccataattttcccgccaaaaaccaaaaccggtgatttttccgccaaaaacgtaaatccgtgattttcccgccaaaaacgtaaacccgtaattttcccgccaaaaacgtaaatccgtgattttcctgccaaaatgtaaacccgtgattttcccgccaaaaacgtaaacccgagattttcccgccaaaaacgtaaacccgtaattttcccgccaaaaaacgtaaactcgtgattttcccgccaaaaacgtaaatccgtaaaaagtggaatccgtaaatatcctaaatttgatgataatgaattaataatgataattatttattattattttattataataattaattaaattattacttaaatgagttaactcatttaacaactcaacccatcaaattaaatgagttatgggttgacccaacccatttaacaaaatgacttgggtcaacccataactcatttaacccttaactcatttgattatgagttgagttgagttgggttacccattttgacacccctagcttctataaaacttagatgaattctcttattccattccttcaaggagaatttttttttaaatggttttgttctaaattgttttgggaatgttcttggatcccatgaaataacccaacatttaaatgattgagccagaatgccagatcgtaaattgatgaattaggtgtagaatcaagattttagacaaaagaaaaaaataaaaaaaggctgtagaatcaagattcaaacaaaataaaatttgaaaattcaaattattgactgacctgttaagaaaaaagaattagggataaaatgatttatgacttagttagtctatcatctgagatttcattcttcatttctgtacacataatttacataaattaatgtttccataaacttctagagctatcaaattgtgcaattcatagattttttaaggaaaatatttaatttttcagtcaaccaaaaaacaaatagcaaatattcggaaatactgaatatctttaacatattttaaaattaaatagcataaaatttaattgttataaaattaaaataaaattaaatagcataagaaacaatttacaaaattattaataaaattaagtagcataagattatgaacttattaaaatgtatatttcttttatgtagttgaaatgtgaaataaaagaatccggaatggtttaatttggataaatttcttatttggatacgcctattgaaaaaaagttaaaaatattttattttattttcaaaatggaaaaataaaactaaaatcacaatgagagtaaattaaaagttgaaacaaatttgattactttgattatattaagataaaaaaaaatgaaaagatagagttaaaaaaaattgaagaattacatgaagaactaaatcttaaaattccaaactctgatccggttaatgccatcctaagtagaagaagataccgaaagatcaaagatttggccaacgaacaaaacagttcaagtttgtcttctctaatcaagaaaagaaatggataatctgccacaaaatctatgggaggaggcggcataatagcgctgcagccacacaagtgcaactgtgcaagctagagcagtagcagccgcagcttctgcactttcttcatcgatctcaatcaaaacattaagatccatgtcactgaaaactcttgaagcttcaaaacaatctcaaaatttggaattctgaattcaccaactctatctttccatctcggaatgtggctgtcctagaatccataactagatgttatttcctcgacaggcttatccaatccatctttcttgtccggtagaaagaaatacattgagaattggcgacttgtatccttatagtctactcggtattgtagtattctaaggaccttgaaaccattgtaagccttcatatattttctttcatagcttttcatgaaaggcacaagtacttgtttgccattgacaaggtggaaaggtttgtgtatcgtcattgacttaccgaatttgttttcccaagctcccttgaagtacagtgcgtttccataaatcttaatggtttggtttgtaacagatccaggaggtagaagatttttgatgagaccattggtgtgacgtaaagcccacgagttcacctccatacgcacttcctcggccttcaaaacaacaaaaaccattaacacaataccacaaaccaaagatcacacacacacacatatatatatatatatatatatatatgtagtttctctaagcacttaagtgtacagtgtcaaacatctgttgacctaatttatttatagaaattcgaaacctaaaagataggaaatcaacttgagcaaaatcagcttgaagaaattctcaaagagatccttggacctgggactacacgaaagtgaattctctatctatactccattgactgccgcgtggaccacctctttagcttccttcgacaaggacaacggaagcgatttcgcggaaacagaaccatactctctcctcatgttaccattaaagatttttggaatgacattttgaattctttatctactagatgcacaattaatctcacacaaaaacttaatccagcttatgtgaactaccattttccctcgaaaatctatcgtatgtcatgttgacacttaacacaacattaacttcaagtcatcaataatttgatgtaagtaaattgtaatgtgtggtcggcctaaaaccccttttcaacaaaaccaaatatttttactttattgattctaatgagtatatattttattaattataattttgaacaatgaccgaaaaaagatgtccaaaacaaatcatcaaatcgctcttgcacttccttttttttctaacaccaatcgctttgcacttcaatcaattatattttgtttgtttcttaaaaaaaaacaaattaccttcctattttgcaaagatttttaaatttattactttggaagaaaaaaactaattctgattctccaccacatacaggaaataaaaaataaaaaataaaaaataatctaaatctaccttaattcacataggacatagcttagaggtgcatatcggaaaggtacctatgggaaaggttatttctgattaaagtaaaattatctaatatattattattattagcagtttcacattttctaaactcaattaagcatcttagtgcatatcctaggagggtatatatgacaaatattgtttagaaaaacgtatatattcaacatgctgaatcgtttttgtaaatacaattaagttaaatgttttcatatcatattcaaagtttatttaaaagaatcatcggatagtttgaccaatttttttttataaatcttattaggcaactaattatggagttatttttaattaagtgtagttgacaaaaaaaaaagtgatttacaaaaaaaaaaaatcaatatatattagatgaaaattgtataattgtaacaaaaaataaaatatatatgtggaattaaataaataaaccttatttcaccagttaaatcatttttttgggaaagtaatagtcatggttcacgattttaattattattttttcttggacaaaatatttattttatattctaaaagtacatattttccttttaaaagaaagaaaataattaatatgttctcgaatgtttaaacttaaaacacgttccaccttccatctacacgcatctgcttagtctcaaccatttgtttttcgaaatcattttttgatttctttttgttattgtcaactttcctactccttcattgtttccattttttcatatcattcgaatccatcgagatttatttccaaaaccctatctgaatttgactctatttatttggtccaaagtccaaaacagagtgcaacattcgccaaactgctagagaacataaactgaggatttgttttgttggtttgtaatttctgggaaattgtttcgtaaaagttttgcttggaaactgtttcgtgaaaatagaaaaaagtaaagagacattgttgacctctcttcttggttcagaaaaaaaggtgggttcttcttttacgttacattcttttgctatcttcgttcttaatcactttttcaaattctacacattttggaataaagtaaaattcctttttttgtttgtttttttcataaaggtttcgtcaaattgttgggtagctatctctcattaattaaaatcaagtttttcgatttttctttggtaattgacattaaccaaacttttagtgatagaaaatttgtggttataaccaactttctcttcttaatctcttcttatttcttttgatgtttttctatattttactttttggtatatgaagaggtggggaaagtttcagcctatgatccaaggctaaattgttcttagaacaaattttgggattttctggaaccctctagatttctggaggcaacacaaaattggagtttgacttaaagtcatcaattatttgaattctaaggtaattgtaatatgtggttattagcctccacacaactttattcctgaaaatgaaataattctctttttatctttttctagggggcacctaatgaaatgtcaccaacctaaccgagaatcatttactttgctagattctgtatacatattcttatatgtacttgtgacgctaagagactcaagaagcttcagtaacatctcttaatgatgtctgaagatggctacaacacagattttccaagaaaccctctatacattttctttagtgatttcaggtaaaatatattttcttgtataattctgtttgaggtcatggcctcaagaagtgaaacttgagaattggtttttctttgatgtatcagatcagttctgaaatttgatgagctcggtttagagatagcgcgaattgctttacccgcagcacttgctttaacagctgatcctattgcatctctagttgacacagccttcataggccaaattggtaacaacaagaacaacaactcttttcatttgtttattgttattttataaatgaaaattattggtgtaattttcggttcttgttgtggtgatgactgataggtcctgtagagcttgctgcagttggagtttctattgctttattcaaccaagtttcaagaattgctattttcccacttgttagcatcacaacttcctttgtagcagaagaagatgcttgtagttctcagcaagacacagtccgagatcataaagaatgtattgaaattggtatcaacaatccaactgaggaaactatagaattgattcctgaaaaacataaaggtatatatttgttcttgctaacataatcactcctctgtttttttttgtggtggtaataatcacaagtatattcatttttatttcagattctttatcagatgaatttaaaaccagtagcagtatctttagtattagtaaacctccagccaagaaaagaaacataccatcagcttcatctgctttaatcattggaggcgttctcggcctttttcaagccgtgtttcttatatccgcagccaaacctctcttgagtttcatgggagtaaaacacgtaacgtatcgatcttttgttctctataaatgatgttatgagattcaaaatcacttaacatggtttgattttttcaggattctccaatgatgagaccttctcagagatatctatctttaagatcacttggtgcaccagctgttctactctcacttgcggcacaaggcgttttccgcggatttaaagacacgacaactccgttattcgctactggtaatactatttttttcatatgttcaaaatccttaaaacagaacaaagctaatgatccactttacttttcttgtttgatgattaatgatccactttttttttgtagtgattggagatgtaacaaacataatactcgacccgattttcatatttgttttccgcctaggcgtaacaggagcagccactgctcatgttatatcccagtgagtttagttttgcatgtgaaccttgaataatctcaaaatggcctctactttaattgactagtggtttctatgttcattttcagataccttatgtgtggaatactcttgtggaaactgatgggtcaagttgatatcttcaacatgagtaccaaacatcttcagttctgtagattcatgaaaaatggtattgtaaaatacttcaaagaaaattcaatgtgtttacaatgaaatctctgataaaataacactgtttggttcttgttttcttgtgaaatatttctctcccaggctttcttttgctgatgagagtaattgcagtaacattctgtgtaactctctccgcgtcactagctgcacgagaaggatcaacttccatggcagctttccaagtttgcttgcaggtttggttagctacttcacttcttgcagacgggtacgccgtagctggccaggtttttagataatgatgtctctaacattgcatccttttacgattaagcgcgtggtttaaagttttaacaaatgtcttttcctttaggcaatactagcgagcgcgtttgccaaaaaagactacaaaagagcagcagctaccgcctctcgtgtactgcaggtacacacaatttatgcatttgtgtttgcgtttacattatgtttacgattttggatttatatgaagaaaatatacacagaaagtatacataataggtaattcaaaggcaaacaaacaatggaggcctatgtgtactttagcttataaagattcgattctagatcaatttaaagctaaagaactaaatcttgtgacagttgggattggttctcggttttgtacttgcggttatacttggagcaggattgcattttggagcaagagtgtttacaaaagacgataaagttttacacctaattagcataggacttccggtaactaatcatttcccattaaaccactaatcaggatcaatattattacgtaacattaatttggctaaaaatcatttcttgtttcctaaagtttgtggcagggacacaaccaattaatgccttagcgtttgtgttcgatggagttaactttggagcatccgatttcggttacgccgcagcttcattagtaatggtggctatagttagcatcttgtgtttgctcttcctctcatcgactcatggttttattggactttggtttggtctcaccatttacatgagtcttagagcagccgttggattctggcggtaaaactttgtgaaactctctgtttcttgtagtacaaatgtaaaaacttttccaactttcttataacagaatgtaaatgtgactgtaacaggattgggacaggaacaggaccttggtcttttcttaggagctgaagaaggaattttagagggaagagcatgttttaactgttcttaaacctttatttctaatgaggttgtgtaactaaataaaaataccaagagtacaagtctggagattcaaataattctatgcgatttttactgctactcttgtaaatattcaagttgtatcctgtaattagaggtggttagtccaatttttggaggttttatttcagatattgtagttaaatatagaaaatcgatagaacatatagaaactgatttttgtttggttgactatagtgttgaacttcagattaattttttcaaaacaagtagttcgaatatgacttctcaaatgatataattaggatgtcagttttggtttggttttgtttcagattttgtggttcgtgaaatacaaaatatatcagctggtttggttttgacaacagtggtttcaaatcagattcatctttcttaaaacaagtaattaaaaaataaactgagtgaatttcgtgagaaatatggtttgtttgaatataagagttttgatttaatttttcttcttttctttttggtttagttttggataggagtttatcaaagaaaattcattttaaaaatatatgttttgtttttttcttcattagaaaaaaaaaacacattctgaatatgcaatacatatttataaacaaagtgctaactctattcacattacacttcagtttattaactagattgataaaatttatcatctattaaatataaatagtttgacatttctaaaatacgtgaaaattcattaataaaaaacatttataaaataaaagagtggaggtatttgtcacatattatatatttctataatatccaaacttataagaataaatatcgtataattgaatctcaaccgatctacaattttttttacaaaaattgcaaataataaaataaaataaaatttaataaggcctatgtttagaaaactcttttcttcaacatgattggctcatagccaccctcaattattactttaaaccaaaaataaaattccaatctttattagcaaaattaaaaacaagaccaaaacaaaaaaaagtagaaacctttacggaactcctctgccattcttttccaatctaagccaaaactcaattaccctttttccgatttaccggagaaactaaatctccgccatgcctaccaccaccacctcctccgcttcttcctcctcctctgcctccggtaacaatcgtcaatccgatgtattctctcgtctcgcttcttctgaccctgaagtcaagcttaaggcccttcgcgaggtcaaaaaccagattatcggaaatcgtacaaaaaagctctcttttctcaaactcggagctattcccgccatagcttctgttctcgctgatgctgacgattctgatgaatgtaataacatcctcgtgcaatctgcggcggctcttggcagtttcgcttgtgggtttgaagccggtgttcaagctgttcttgacgccggcgttttccctcatcttcttcgtcttctcactaatactgacgaaaaggtttgattttgaataaatctattgacttttttttttgttaaagtctaatccttttcccccaaatttgtgtctagattcgaaatgacattagaattacttgtgggtctttgaaaagaaagcttgaacgatttagaattactcttgtctgaatcttattagtttgggacttgtggttaaagttttcacctttttgaattgtctgcatctgaggaattaaagcattggcctttagaattttgtggatcctctcttgtcttgctttcttatggcttccttattgcttctgtttcgtatttatgattcttcttcaggtagtagatgcgggggctcgttcgcttagaatgatatttcaatctaatcaagctccaaagtatgattttcttcaagagaaaaacatggagtttcttttctcgttgttgaatagtgagaatgagaacgttagtgggcttggtgcgagtattatcgctcatgcttgtggaacaagtgtagagcaacgggttctctgtgaagctggtgtcttggagaagcttgttatccttcttgatggttctttaagccaaagagaagcttgtcttgaatctttagctacggttttgaagaataatcctgaagctgtttctgattttgttggacttgagtctgggaagtattttaattctgtgactgagttaacaaaggataggtatccgaggactaggctgctttcttgtctttgcttagttgtcatatacaacacttctccatcttatttcataaacatgggaaccaaatcaagtttgataactactctgcttgagcttcttaatgaccctggtcaatctggagatgatgctgccttgggtttatcctgtctgattgcggaaaaagaggatttacaacagttagcttacgaggccgatgcaatcaagaatattgttgagatcttgaagacaggtagtgagctccagtctaaacgtcttcagggtttgtttttgtctctagctgaattgtgctcaaagctagaggattgcagatgtagcttcctgtcattgcaggtgtgtttccacatgccgttttcttatatgatatctagctgaattgtgctcaaagtttagtattaattttgtatagtatgctaaattgatttgtctttttatccttctactaggtattagacctgctgactgatgcgctaagacacaaagatgctgatgtaagagctgcggcatgcatttgctttagaaacgctgctcgatcagtcaaggttagttaacattatacatttcgcatgttattagtatttcagcaggttttgtattaagtggtaagttccctgagacatgtcatttagagtttgagtgcaggacgattcaacagcgatcatgttatgcttcctttggttcagctattgcatgatccatcttcctctgtccaggtactgtgtcacataagatgccgcatttctttgacttagtctcccatgtgattttttttctttagaagcaaatggcacagtcgatttgaatgtatatgtacctatatattgtggaccaggttgcagttcttggtgctctgaacaatatagtaatggatttttcatcaccgaagtcatcatttatcgagtatggagggataaaacagcttactgagttgtcaaaatcaatggatccaaatactcggtgtagcgctttgcgggctttaaggaacctcatgttccttgccgacattaaacgtaaagaactcttttattcagacgttaaggctcaaggacttgcttgtctcattagtggtaaatcattctacgagtcttcaaaccaaaatcatatgatacatctgtatgattttttttgttaactaacaaacaaactcattgcactcagatcctgagcccccagtgcaagagcaagctttggccctcctccgtaatcttgttgatggatgtatcagctctatcgagtttgtatttgatgaagatggtcttatcttagatactgttgggaggcaattgaggaaagctccacaggcacaaatggcaatacaggtgacaaaattgaaaaaagtataccttatcaatagattaacaaaatctctgatataaaatgtttttctttccccagggaatgtatgtgctcacgaatgtagcgagtgggactgagttacataaagaagcggttatggagcaactgtttcctcaagctaaagctggatcagagaatttcatgcttaagtttttgcagagcgacgagagccagttacggtcagcagcagtctggacaatcataaacctcattagtccttcaagccccggtgcatttgatcggcatgtgaaattacggaatgcgggtatcattccccagttaaaaaacatggtcaatgacgcttgcctcgatgttaaggtacaaatttattacccttttagttaccttgtatactctacctcttatcattgactcagctatgttatttcaatctctttggctttgcagattcgcatcaggactgtattaggccagtccatgtcttttggcgataattactaaacacagcgatattgcttttcccaaacacacagaccatacaacactgaacatatcagtagtgatttaggtttgattcaattttcagcatatagcaaaagagagacagagcctagagtttatgatcatgattcgtctattatctctcctgctccagagacacacctatgattcaacaggtacttgctttctcaggcttgttctgttcatttctggttacccaaaatagccataaccgtaactggaaccaaccgtaactggaaccgcatacaccaaacaattgatcagagcattttgaaagcagaatgctaggatttattcatttgctataccatctttttttctcgatcaaaattggttaaatgagattttatgtatttcaaattctgaaaatgttcttttctttttaacaaaacagtttttgtattatgtgtgcaggtgaaagcagtgagaaggagttgtactattactttacttgtgccacttttagattagatccaccacatttttgtttttcttttaattttttgccttgagaaaacttcacttgtttcattgtttgaaatctctcagtttatagaaaaaaacatctgtgttttttgtatcagtaataattctttgcctcgtcgataccaatgtcccaaattaatcttttattttggcattttggcgttcaaatcacgcatgacctattattaactttcgtggcaaaacataaaattaaaatggcttactacaaataattgaaatataaataatactgcgattacatataaaggtgttatacacaccctttattcaatgtatttttaaccaccgaaatggttagaatttggcagcataagcagtagaaaacaacaactacattgagtatatttgttgtcgatgttctgtcttgtagtcatttaatttgagagctattgtatcagtgcaccgctaattttttttactgcaccgtctaaaactttttgtcataaaccagacaaatggtatagagacgtctatataactactaaaacttgaacttggttttgaagaaaaagactagctctgtaatatactaatatgtttgtctttatgtaaaatggcctttgagaatctaactcgccgagtcgccgtatgtgcacagtgaatcctatgttttggatcccatgatgagatccagcctcgaccactgtgtactttctttagggatataagcttttttttttgcaagatataaatatttctctcgtataaacaaaaaaaatggttacgaacagttaccacaattgtagaaattcatacttgtatatacacattttaaaatttgcagagacaagaatctcaactaaacccaaaaaaggttagttggttttggttaaaataatagggttagttggagtgtaaagaaccccatgcatttatgcattaaatttaaatcccattccaccccacgtgaatttatattattgcatcaaagtattttgttaaatgatattttattccgcctgtattatgcagtttttttatctttttattaagaaaaaatatcttaaggctaaacagaaacaatatgtagcaattatagttaccacctaatacctccaataggtagtgtttttgaagacaaacatatcgtaatcatcaaatgtgagactcttctctcgggaactctctcttcttttaagtatttttctttctcatttttagttaatgggagactgtaattgtcttgttttttgttaactaatacatagaggtttaaatgttctaagctgtggatgtaattgaattttattatttaaaatagtatatgtatgtgacagcatgcctacatatatatgagtaatattatacgcagtataaactaattttttgttatatagtttacttttaactaacggtgttcacatgcatttgaatatatataacttacacataatgtttaatatcagagatatatagtgtttgtcttttaccgcaaacttaaaatgcatttgaaacaacaacacaacaaataatttcttccgtaatttgattccatctttttttgagaaaattaaagggttttcttcttaatttaatattgttgaaaagattgtattggtacatgttaaaaggagatctacatgctggtttatttttctttatcttctttttttgatatattcatctagattcttttagcttattaggggacaaccaattaaataataccgttttcaaatatcatttaaaaacatactatcattaggaaaaaaaatcttgataaatagttttattattaaggaaaatcatattgcgttaatcgtataaatagcattttgacaaaaaaaaaaaaaaaaaggatggaaagttagaaaaacgactaatgacgagataattgacaattctaaatttctaagacaatattattttatcatatgtatttcttcttctatgaatatttaaataaaaagaagaaaataaagcgtacccatttcacatttcatgcattgatcgtccatcaaaaagaaaccctttctctttagtttccaaataccaagcaatctcttcttcttctttttatttacctttttctttcttggctttttcttctcctctgatagaaactttttccagtcaaatttaataactttaaagtaaaactcccactaaggtttatacacactcttcatatatagattcacattcacccatttctcttcttttttgctctctctctcccttctcttctctcttattctggtctcaaaaatggcatcaaaaggaaagaaaccactaagaagaacaactacaagaagaagaaaaagaagccacttcaagaacccatctcctccatgtagtatcaatagtgacgtcacttcaacgtcatcaacatctacttcacccacatcaacggccacgccatctccggtttcagcagagagtggatgttgtactccggagaagtcacgaataccggagatgctgacgtgtccaccggcaccgaagaagcaaaaggtggcgcaaaactgcgctttaaggaggagacaaatcgctttctttgctcctccggatgtagagctcttcttcgttttcgcacttggtcaacaaaataataaataagttaagtttataattagggttttgtgattattatcatggtatcaatatctagtttctagtttgattcaaatacaataatatttaaagtatattatagagagtgtagtgtgaggttttgcttcttttcttcttcttcttcttcttcttattttgcttttctccctccttggctcttttttaattttttcgataattttgaattaggtgggtttgaatttctggtagggtatgattaatcaaataccctatctcttttttagttaagtatgtaagtgaatggtgcttcctaacatttcaggcttgttagctttgcagtttctattttgggtttgtattttggcttgagttaattaggagttggattgttcttcttgcattttacctcaatactttatacgtaatctcatcaaaaacaatttccatacaaagtacttctgaatccatttcctttttattgggtacatcagaaattcatgaaagaacaccaattttatcagagtgaagagctcaaattcaaaacttttgatccgagttcaaaatatgtcaagtttcctaagaagaaaaaaggtctataaagccaaaaaaatagtggatgcagaataatatgtacacaaaagttttggatataatccaaagttataaaaagattcaactgtttcttattggatataaagttcataaagattgaaaaaattacatctcaaatttgtttggaaattaaagaaattaccttataataagtactgtaattatataaactgaatttagttaataagtaaaagtgttaaaacaaaacaagaaaaaaacaagagacgaaggatatgtcagtttaaccaagggatggccaaagtggtcggagctgacgataacatctccgaagggaatccaatgaaaggactcgtgcggcttttttcatcattttttctcttttcttttcttttctttctccacacaattccttttaagagcaaagttaataattacaagttataacgaatgtataaaactatatctctatatatagagtaggtaagaagaagacgacacaatagctacgttgataatatctacgtgaattattaattcgtctttcccatcattttaatcttttcgaattattgctacacaaaatcttcagacttcaataatgtggataaatgataacatatgacgtacgaatctcatgattgagaattagaaacttacacctctacgtgcataatttattcgtttcgacgtcaattaataggttacttgagactgtacaacatagatgggagaatctgcagtacagaaaaatcataatgttttgctaatatattttagaagatattacacttgcaatatttattattatttttttttcgtttttttccaacgagtagctttgttacatgtgttaaatatattcatttaaacagatggaattttgattaccttaagaattttctgcataattaagttctgttaaactctaactattgtatttctgttgatttttatttcataatattttactcttgtgtttatcaattaataacatttcttccgtacatgaaaccgtgttaaatgtcaatcaattaaccttttatccaaagtactttcacaaaataaaaagtaaaaattttaaacaatttttaacggcgtatttggaactgaggttactcctaataagtggccaagtcccaagtatgtaggctcatatggctaaggtggcctaatttcaaatcacactcaacgaagttcttccataggttacgtacaatattatactagttctcatcataaagtagttttaaggttaaaaaaaacctacgtataggtggtgggagtactagttactagctagtataagaaaagtattcgtatacatatttgtgtgcaaggaagatctcgcacgggtgcatattatcacacacgtacaaacaaaaatccaattaggtacctaaaagctacaaatcaccttggaatgaggatttgattcgagtccgtatcaatttctttttggtttctctttttgtctttgtattattattaaattatacgtcgtcccaaaataaacaccaaaaaatcattaaactatgaaataaagtaaaatattattaactacattgctaagataatcaagtaaccaaataaataaagctaatcgtacgtttatgtcaaagctaatcaaactttacaagaatcctaggttccattctcccctacaaacaaacactacatgtgaagtgtataaatataatgggcttgtaacaatccgtaagttacccattaaggcccaattacaataaatatcaatttctctcaaattgtttcaaatttaaaaataagtggccaaagttacgaaaccaatccaatctcttctccgtcgtcgtaaccatgtcttcaatcgtcgagcacgtcgttctattcaagctcaacgacgacgacgttgactccggcaagatcaactccatggtcaacggaatcaacgaactagtcaatctcgaccaagtgcttcacctctactgcggttcaatccaccgccttatcacgaccaccgcctccgacttcactcacgtccttcatagccgttacagatccaaagaagatctcaacgcttacgctatacatcccgatcacgttcgtgttgtcaaggaatcagaatcgattcgcgaagatatcatggccgttgattggatcgccgaacaagctccggaagccctagcaccgcctcttggttcaattggtaaaatcacgcttcttaaattgaaagagaatgtcatggaagaagcgaaattggagattatggaagtgatgaaggagaaatttgaaggaattgatcagattactgttggagaaaacttttctccggggagatctaaagatttctctattggatcgatttcgtattttagggatttgggtgaaattgaggctgtggatgatcagatgaagttgcagaatgataagattcgtgattatgttgatgataccattgttgttgagttcaatgtgccgtcttcttcataagtcttctaagtgtacctgtaaaatgctccaatttcattccttaaccgaaattttaaaccagtttggtctccggtgtaatttcgtcgattacagtcgtcgtcgccgccgccgccgccgtatgtattaaataaaatctttttttattcaacacatttaaaagctcatttacgtcggtattaatcatattagaccaagaccaactcggtttcataagagttaagatgaaactagaagcacgaacactacacaccgttttcatcaaccccaactgagagataaacggcaaggctttcgcaattgaaattctcacagtggttaaaggcacttggatcgatggtgccttaggcttcattcatcatcttgctacataaccgtagaggaagacgaataggtttgatctgccgaggtaataattaaactgcaattaggtgagttcatgcttcttcttcttttaactgtttcttgatttttagtaatcttcaggaagcccttacatctaattttagttgttctatctctttccattacgatatctgttttgagtctctcaaagggcttttctttcatgtgaaaatttctaacatttcttaactggaacttaaaaggagtattttgcaatttatcagtattttgagaatcgcatccagattaggttgatacaatttatctcgttttttcactcgaaattagatggttgtttgtgggactttcaatattcagtcttggtaaattttgatgatgcagattatatataattgcgtgaagaaaagagaaatggtgggtggcaagaagaaaaccaagatatgtgacaaagtgtcacatgaggaagataggataagccagttaccggaacctttgatatctgaaatactttttcatctttctaccaaggactctgtcagaacaagcgctttgtctaccaaatggagatatctttggcaatcggttcctggattggacttagacccctacgcatcctcaaataccaatacaattgtgagttttgttgaaagtttttttgattcccacagggattcatggatacgcaaactccgtttagatttgggttatcatcatgataagtatgatctcatgtcatggattgatgctgcgactacgcgtaggattcagcatcttgatgttcattgttttcacgataataagatacccttgagcatatatacatgcacgacgttggtacacttacgactccgttgggctgtcttgactaatcccgagtttgtttccttaccttgtctgaagatcatgcattttgaaaatgttagctatcccaatgagaccacgttgcagaaacttatctcaggctctccagttctagaagaattaatactcttcagcactatgtatcctaagggaaacgttttacaattgcgctctgatacgctaaagagactcgatatcaatgagtttattgacgttgtgatttatgcacctctactccagtgtctgagggctaagatgtactcaacaaagaactttcagatcatcagttcgggtttccctgccaaactagatattgatttcgtcaatactggtgggagataccaaaaaaaaaaagtgattgaagatatcctcatcgatatttcgagggtcagggatctagttattagtagtaatacttggaaggtatacatcttaacatttgagcatatttgtttaaaaatattcctccacaaaagtttctcaccgtaacatttttttgttcacttatgttaccaggaattctttctatactcaaagtcaagaccattgctccagtttcgttacatatcccatttgaatgctagattttatatatctgatcttgaaatgttgccaacgcttcttgagagctgcccaaaacttgaatctctcatattggtaatgagtagctttaacccttcttgagagctcctatttacacatattgtttgagataacctcttatatgtatctctctactcaatttgttttcttttatttattcttttgttcctgtttttgcaggaaatggtcaagaaccaatccacgcgacgtcatggggagaagcgagaaccaaatgtgatggtttcaacagtgccttggtgtttggtatcgtcgctcaagtttgtggaattgaaacgttcaatcccaaggtatgaaggagaaatggagctagtaagatatgtcctgacgaattcaacagtcctgaagaaattaaggctcaatgtttactacacgaagaaggcaaagtgtgccttccttacagaactcgttgcaataccaagatgctctagcacatgtgtagtccttgttctttaattacttgaaaggtattgatgaacttttcgtttaaggtcaatcttttggtcgttaaattagttgattttcggaggctttgagccacatgtaaattttgcagttaagtccttcttatgctggttgctgctcatgtaataatcatcaatcaccaagtttgtttcgaatttgatggatacttccaccaagtcgctgtcaaatattttgtatgctcccatggataattattttgtatttttgtaactgcatggtgattccttacatttcaggcttgttagctttgcaattttgttatttgtattttggtttgagttaattacgagttggattgttcttcttacctactttatggttcctctgaataatctattcgtagtcttatcaaaaccaaatccaaaaaagtacttgtgaatctatttcctttttaattattgcgttcataaatgaaaatgacaccatttttatcatagtgaggagctcaaatttcaaaacttttgatccgagacatctaagtgtaccgaaatttgaaacgggttatgtctccggtgtaatttcgacggcggatttcgtcgattacagtcgtcgccaccgtatattaatacacatttggaagctcaaataatgggcttcttgcttgaagcccattgacgtcggtactattgtatttgcaatgattttaaacgtcgtcgtacaagtaataaatcagaacccctaaaacccttttcatctctccggacacttcttctcccgacactttcctcttcaaatcccaaacggctatctgactttggaagaaagagagattcagagtggagaatattatggaaggaactttagatgaagagaatctagtcttcgaaaccaccaaaggtatcaaaccaatcaagagtttcgatgacatggggatgaatgataaagttcttcgcggcgtttatgactacggttacaagaaaccatctgagattcagcagagagctttggttccgattctcaaaggacgagacgtcatagctcaggctcagtccggtactggtaaaacctctatgattgctatctccgtttgccaaatcgtcaacatatcctccagaaagtacgtctctgttttcccctgagattgaaaacaaatagtaaccctttttcagatttccaatttaggtcactaaaatttatcagaattacatgattaatgatcttgctttgtaattgagttgaggaacacttatctgtttctccaatttgctaatctacttggtaatacatagttaatgatcttgctctgtaattaagatgcagagcactagagactgccatatctgttttccagtttgctattttatttggtatgtaacacatggttagtgaggaacactttcttgacactataatgtttgttttccgatttactaaatccatttattactacatgttactgatcttactttatgattagttaggaacacttacttttaggctgcaagatctgtttttttaccgctttactaattaaatggttagattcattaggatgaggaaggtttacttaaggctgtgtggtatttttttttttgtttcaagggttcaagtcttggtgttgtctccatcaagagagctggcttcacaaacagagaagactatacaggctattggggcacataccaatattcaggcgcatgcttgcattggtggtaagagcatcggtgaagatatcaagaagctagagcgtggtgtccacgctgtgtctgggacacctggtcgagtttacgatatgataaagagaggaagcttacaaactaaagctgttaaacttttggttctggatgaatcagatgaaatgctgagtaaaggtttgaaagaccagatttatgacgtttacagagctcttccacacgatattcaggtttcgatctcaattgtttaaacagtagtaataattagtagatcctagtttctatgataatatgaagttaatacggttggtttataggtttgcttgatttctgctactcttcctcaagagattttggagatgacagaaaagtttatgacagatcctgtgaggattcttgtgaagcctgatgaattgactcttgaagtaagtttttccttctgccatttttatgctttaagttttagttttatcatgaaatgcatcaacctttggttttatagggaatcaaacaatactatgttgatgttgataaagaagagtggaaattcgatactctttgcgatctttatggaagacttactattaaccaagctattatcttctgcaacacaagacaaaaggtaaaagactcttgttcttaagctctggtccctccacttttgtcgataatattatacctttgatctgcgttttttatatatatgaaaggttgattggcttactgagaagatgaggagtagcaatttcatagtctcatcaatgcatggagacaaacgtcaaaaggagagagatgatatcatgaaccagtttcggtcatttaaaagccgtgttttaatcgcctcagatgtatgggcacgagggatcgacgttcaaactgtatgatctctctttctctcattctctgtcttttaactatcaatgtcacaaagaaactccatgttgacattaaaaactctttatgtaactaggtttctcatgtcatcaattatgatatacccaacaacccggagctatacattcatcgtataggacgagctggtcgttttggtcgtgaaggtgttgccattaactttgtaaaatcttcggatatgaaagatcttaaggatattgagcgacattacggtactaaaatccgcgagatgccagctgatcttgtctaaagatgttgtttccttgaagctgaagttatagaatcggttttgaaagaagttttgttcttcaactatccattggtttagacttaggcacaagctctttgaaaatgtatacctcacttcagtcatttcttttgtaccaaccaaaataatattattgtagctattttattttctgaaaatcaacaaattgtgtttggctaaaggcttcgtgatgaatccaaaattgttctcatttagaaattgtatgatgctttggtttgatggaatttatcgatgtagtaagaaattttggttcggttaaatccggttaaagtaattgacggtaacggtaacggcaattgacggtagatatatacacggccacggcgtctccgtatacagaggaagtttctctgatcgccatttccacgtcgtactaagcttctctttcgccatccgttttaggcaacgaagacgaagatcatgaaagggcttacgaggcttctcaattctctttcgcgacatacagcttccgtaacttgttctccatcttcttcttctcttctgatatcacgtcgctctctgtttatctcggcggcgacacactttccggtgaatttctcggagtcgataacaactaatgcttctcgtaactgttcgagatcttcttcatttcccttcaattggatcggtatggtaatttctaggtcgctaatcttcacatttgtatatcagtaaaatgttaaaagagtagtctttttgtcacatgattcttgaaaatgaaatctgatggcttgaaattggtgtaatgagcagagcaaaggaggacaatgtttatccaaacacaatcaacaccaaacccctcttctctaatgtttagtcctggtaaaccagttatggagattggaagtgctgacttccctaattctcgctctgctatgagttcacctttagctaaagccattttcgccattgatggtattcctcgtcttttgctacaacatacaattgtttcctcctcatataatccgtgttttgtgactaagattgtctctgttgatgcaggtgtagttcgagttttctatgggtcagattttgttactgtaacaaagtcagatgatgtaacatgggatatactcaagcctgatatctttgcagtggtaatggacttttactcttctggtcagcctttgtttctcgactcacaagctacagctgccaaggataccgctattcatgaggtaggctgctgccaatgtttgctagacttagacttttaaaaagccaaatactaatcaatgattgtttctcaggatgactctgaaactgtagcaatgattaaggaactcttggagacgcgtatccgaccatcagtccaagatgatggaggggacatcgagtattgtggattcgatacgtaagttttttatttgagttaaaagcaaatgttcaataagatcggatttatctttatcaaagctatttgttttggttagggaaactggtatagtgaagcttagaatgcaaggagcttgtagcggttgtccaagttcatctgttactttgaaatccggaattgagaatatgcttatgcattatgtttccgaggtaaagctgataaggagatgtcctaccatttatcatttctgttattcttttgctgttgagggagaatcatgatcttgttaatagtctactcttgttctctaatcattactcaccaaagcgtttgtgcaaaacacaggtcaaaggtgttgagcaagaattcgatggtgaagaggagggaacatcttctggtccaatggagtagagtaacagaaatgcatcacaaaaaaacttgagatttgttgctgctcttcaatatacagaagaagaataaactagaggtacattagttttgtcttctcctgaacctggaagcctcagaaaactatagactactggaaaacatggagttgtctcatataacccaataattgaaatttttacggttatatacttatatggcttctagtgagcgttcaccaagtgtagctgaaagggtaaagatttgttgcacaaagttaagtagaagtttttgctgatttgaagttatataaggtttgtgatcgcatcgatgattcaatacattaacaacgggttttatagatttaatcaaatatgatccttacaaaccacactgagaatagttatacgacatagatacagttgctggttaaatagcaaactcagttacggcatatcttggcggtaggcattgtgacacagactggagcatacttcttcttggcagcttctgttcctctctttggctcatcgtctgccattgccaccttagctaaggagcacacagctgcagctgcagctgtgaagacaagatccctcctcatcttcatgctctgttcttgcttcttgttctccaagctggttgtgttttcactcccggaggctttgaccaccgtgaggcttcgtctgctgttgctggagatgtttgccggaaggtttgagacggtagggagaaatgaagatgtcatggtcattgacgccattgcaattggtaagttggattcccacgtgtgatctctttatctctctctgtttcttgtttatctgatgacttggtgatggattgtgttttaaaagttggggatgatccagttccttatccaaaatatgaatttatagcaaatgggtttttgccacgtgtctctgtgctatccttattttccaaacaaaatgaacactagaagctttctttcttgtagtgtccggaagaactaggtccattcttgattcttgggcaaaaaaggtcaaaagcccaattcacttcttcgaaagccaaaacggacgagtagtcactttagtcagtcagtggtcacgacctttttctggcccaaacagaaactaatagaattaaattaggtaggtgctattattccattttcaaaacaatataaaaaggggttattgctaaaataggatctttttagacaaaaaatttgaaattaggcacttgtctatttgacttacaagaataggtattttcatgtatttgaattgacgaatttgcccttgagtttttcttcttcttcatgcttcttcttcttcatcgttcttcttctttcttctcttttttttttttccagaaactgtaaatccattttaatcattaaaatttagagaatccaaacaaaatatttggtggatcttccgtttcgattcgtaatagtgaagacaagataataatttcggtttgaaattgaatttaacaat

SEQ ID NO: 86 - DNA, 110893 bp, Arabidopsis thaliana
gaattctaaggtatgcttttgtagtgacatgccattctaaattcgaatgaaactagagtttcacatcggtctataaaaggagagatcggggagaagataagtcatatccaacatcaatacctaaggaaaccgacgtttagtagcgctaccactttgtatttacaagacagttcagattcttgtttgaaatcaagttccaagtaactaacttaatgtgaaactgttcgttttcaataagttaactttactgaatgtaatggttgaatgataaataaatagataaataaatattccaaataagaaaatatatttcaataagcattttaacatttaaaagatatttatcttaatgttgaagattttttctgaaagatataaaattaattttctttaattattgagtttactttggtaaaaaataatttgatttcattttatgttcacaaacttaaaatattgtgttataaacagaaattttgtatttggaaaaaatcgagtagtatagtgaacaaatctttaagagatgaattttcacaagtttggtcacatacataataaagttggtgtgtgtgtatgtgttagtattgaaaatgtgtaatccatttaattgagtcattgccattattggagatactttggtcaaatgtctatactggtaataataccaaaaaattcaaataaaaacgttcaattaccccattttaaccgatcaatcagtgcattgattatgttttagctattaagaaggaaaaaatcttctcttaatcagcgttcttaattaaatcgagttatagagtgaaatgtgacattctttattcggtgactcttaacacattaaggcactatttgttttcttatttctgtgagaaacaaattttgtaggaggcagagaaaccacttttgtcatttgcaggcgagtgctacttttaatttatttatttaatcgttttttaagtgtaattaacatttctgttttactcttttgtcgattctttgtctgcagattgttgttccataacgtttggtttcacgatgttttcctcttttttccattgtatttgaagaagtttatggattgtgttaaaaagaatccaataaaaaataattataattttttttgatatgtctctccatgacatcatgttttgtcttctaattcaggtttcacgaggcttttgtcagatttttttcttctgtattttgaaccttccttctttattttgttcaaaccatgatcttctttttcttcaaaacaatattttttgccaacatttatttactagccaaatctttcacactgtgatatgttttgtctttactatcatcctctactcgaataaattatcaatttatcgagcttgtttttctgtttatctaatgataaaatatactgtatgattttattttaaattaataggaatataggataatgattcttacttttttatatatagactgataacaagtattgtcagttcattgctgttcaattttttctgtttatctaatgattacagtgtaagaaaaataatatatttatccattttggtcatagtaatactcttcttttagctagattcatatcaacgctctatagtaaaatgttttggatttttgtgaggaaatataaccaaagacaaaatgaaatttttaacaagtgatagaaacaaagtttgaaagtaaataaaatttcaaattaaatgcaatgaagttttgtttttttctctctgcatacaaaacgtttctttttgggttatacgtgaatttctcattctttaacatttcgaatcgtcacatcgcagactaccaaaacaaaagtgttcttgattcttccaaatcgagatgggcagagcagcaagatggtttaagggcatgtttggcacgaagaagagtaaagatagaagccacgtttccggcggagactccgtcaaaggcggcgaccattccggcgacttcaatgttcctagggactctgttttgttgggaactattttgacggatacagagaaagatcagaacaagaacgcaattgcggttgcaaccgctacggccactgccgcagacgcagcggtttcggcggctgtggttagactgacaagtgaaggaagagcgggagatatcatcatcacgaaggaggagcggtgggctgcggtcaaaatacaaaaagtcttcaggggctctttggtaatttttgcatcttcaaaatgttctaaaattttggcaaatggttttgttaagttcgaatttttggttatgatacagtttgaacgtttttcttcatagattacagttttagcaaatgtgaatcattaaaagtggaatagttggtttgaaaacaattgtcaatttcattttttttttggttttatggttaggcgaggaaagcattaagagctttgaaaggtatagtgaagctacaagcattagtgagaggatacttagtaaggaaacgcgcggccgcaatgttgcagagcatacaaactttgatcagagtccaaaccgctatgcgatcaaaacgcatcaatcgcagcctcaacaaagagtacaacaacatgtttcaacctcgacaatcctttgtaaagaactattctcatttccattggctctctttttttctttaagccaaaacaagacttaaagtgtgtcctctgtttgtaggataagtttgatgaagcaacgttcgatgacagaagaacaaagattgtagagaaggacgatagatacatgagaagatcaagttcaagatcaagatctagacaagtgcacaatgttgtttcaatgtctgactatgaaggcgattttgtttacaaagggaatgatttggagttgtgtttctcggatgagaagtggaagtttgctaccgcgcagaacacgccgagattattgcatcaccattctgctaataatcgctattatgtaatgcagtctccagctaagagtgttggtggaaaggctttgtgtgactatgaaagcagtgtgagtactcctggctacatggagaaaactaagtcctttaaggcaaaagtgcgttcacacagcgcaccgcgccagcgatctgagaggcagaggttgtcgctagatgaagttatggcctctaagagtagcgttagcggtgtgagtatgtcgcatcagcatccaccacgccattcttgttcctgtgatccgctttaacttaacttccatggataaattttaccatttttaatcttcctttccttttgttggcaaatgtaaccttgttctctgaagttctaatgtcactaatttaagaacaagcaaacatcaagcagttctaatttcttctgaaaactcatcaatctaaagataacattacaatagccgtaagagtaaaaaccttcaaacaccaatgtgttattctcctgtttcaaaattttcagtttcgagtactagttcgcacaaacttgaaagcgcagattataatactaacctgatcatcaaacagagcaatacggagaagacatgatttttgaatagcgcattagaaactcaagattatgcagttttcattcttcacttaaggatcattctcacactattttactgactacaaagggctgacaacccaccccgttatcggattcttcctacggatacgagattttccatgagagacagactgcaaccgttcaagcacagtgtaggtaatggaatccggtgtgagtccttgctgtttcatctttgagtatagatcaactgcttctgcggttctcccgttcttctctagacaatcaagcaaaatgttgtacgttacaatgtttggttgacaccctttaacaagcatctcttcgaacaaactatacgccatttcgactctctctgttttcccaaaacattccatcagagtgctgtatgtgaccacatcagggtttaatcctttttcttgcatctccttgaatctcacatgggcttcatcaacatcaccgttcttccccaaacaattaatcaaagagttgtaagaaataatgtcgggtttacaatcactcctctcaagctcctcaaatatgttaatagcctcatcaacttctcctacccggccaaaactagcgataagtatattataggtgaatatatccggagaaggaccgtcctttttcattttctcaaagagatcatgaatatgagatatttgctttagcttcccgagcgccgagaacacagtgttatacatcatagtatcagttaccacacctttctcatgaatcttgctcaacatctctatcgcttcaatggttttacccgcaccacacaaactctcaagcatcgacatgtaactatctctctctcctttcacagggaagctccacatatcacaaaacagcctgtgagcctcacttacatgccctaacttgctcaacgttctaaccaaataagaatatatcccctgagtcatataccttttcgaaatctccacaactccatctaacctcacaagctgaccttcagcaactaaaagattcaaaagaagactatacgtatactcattcggccgacaacccgtttccaccattctagagaaaacctgaatcgccttatcaaccattttgcctttcgcaagaacttgcatcaaagtattataaccaacaacattaagcgtaagcccttcagtaatcatctcattaaataaaccaacagcttcatcacacttcccaatcctccccatagtcctgatcataatcgtgtaagtatactcatctcttctacaatgcctcttcttcatatcttcaaaaacttgacaagcctgatcaatctgacaaaaggctgcacacaattatacataaaaaccaaaactttacttaagagagttagttctatgagtgaaaaaacaagtgagagctctctcaaaaagcaagtaccttttcatctttagctaaagcatcaagcaacatattgtaagcaaagatgtcaagtttatgtcctcctcttctaatctcacaatacacatcaaaagctttagaataatcacgagatcttaagtaagcttgaaggagacacttgtaagtgaaagagttcatctttaaatcccatttcttcaccaatcttaaacacatttgtaaatcttccgtgttaccaaagaaacctattaagatattcacagttgatatgtttccatggacgtttgatttcaccatggaatcgagaatcgaacgaacacgatcgaatctgtctggaagatttgaccttgagaggattaagatgatacgattgtaaaggaaagggtcattttgtgagtaagggcaaagagaagggactaatttgaaaaattccacggcgaggagaggtgaatttagggatttgagaatctctgaagcttcgtcgggtgtgagtgagagtgagagagaagagaggtaatcagagagatcagagaaagcatcggagagattagaggctccggtgatgagatttgtggctcggcagattagatgacggcgaggtagagggtagccacgtacgtcggcgggaagaggattaggaagagaaacttcggcggagagagatcggccggagggagatgatgaagtgactttggcgacatactttgtggcatagtgacgtcggttaggtctggtgattgtattgacggagttgaagaaacggcggcggagaagcttcattttgcggcggagaaggatacgagttctctcttcagttgaattgaaactcgagaggtaaaggagatgaatcttttcgtttaaatgggccttaaaattgattagagcattgaaattaatgggccttacaaaaacgatttgttttattttgtaacatgttggatttttttttctttttctttcattgttctattgagagaagttgagatatttagttcacatcataaattttgcaaattgttttaggtgagattgctatagattggttgttttttttgttctttttgcaagttgtttcgaataattatgatgactataacttaaaaaagaaataaaatactgtaattaaaatttaaaacccctaaataaatatcttctgtgatagttgaaaagagaaaactagttaatatggtgaaataaaaatcttcgagaccacttatcccacataagtccaatttcatcgtctggtttgtaacatttagctttaaccatattgtaccatcctcctctgaacatacagttgcctctgcacttgaccagtgttaatgtgtaatcatcagattcaggaccttcctctataatatggactttcacttcaacaccgtttcccaaattcttgaccaaaccacgttccatctgccgaattattttttcaaaatcttgtttaggtagaataataaaaccattattaagatcactctcggttaaattcttctttagaacccatggatcatatggagctaaacccaattccaaatcgagttcttgagccatccctgctaaaatataggaatcttaattattcatttgtgaatgttaatagtgagattgagaaataaagatcatacctatgttttatatatagttttccgatcaaaatagtctttcctttttcagttgttacgctttttagtacttttccgtttaagaagtttacatttttgtcatcctacaggtgtttcaaacattttgctcaaactttacaatcttttgttttctttatacgaatgttaccgacttaccgtttatgtttatatgtacacaaatcgttttacattactacaaaaattatagttttacaatttctatttttttctcgtccaaaaacgctttggtacgattcatgtggaagttttacatttcttttttacacgtctcgttcttgaataaaaacaaattaataattagcaaaaacttcgtttacatccaaaataattgacacacggttctagtaccattgatgttgtttgcggtacacgtaataaaatattatttagtggaatacaaatactattgacttgaaaaatggagagagacatgcttaggtatccaatgtgttggaaattgatcctatacttaaccctacttgagagatgagatcaagagaagagtggagaagatgataagagactgcaacaaagaaagaagaagagatcgtagaagatgaagatgtacaagagagagctttgtcgtaagaagaagaagaactgaagaagtacaaagaagaaagacacaaatgggccatgtgttatatgttaagcccaaatgttaagtgggctgtcttgtgtggtgttaagacaaaacaattaagctaagtaggttaaaagtagtacagtataaatatgctttgtaatgaatctagacaagctaaggaaattaagaagaaaaagattaagcggcagataaagagagattccaacccaatgatctccatgctaattggccaataattttcctatttttttaggtgtggagctgaagtttcttctttcgttttttagatgtaattaggcgttttagttttacgaatgactaacaacgctagtaacaaactttgagattcgcttataagataatcacatatgcgtgtttagtctcaaaggaacaaaacttggaccttattttatccatagtttgccttggctggaacaatatctcaaaccaaggatggtcagtggtaattctgcaccaatcaagtcaatcgatcactatggaaatccaaatctataggtgatcaaacttcttgggaagaactaacactctatggattcccatctaagaaatgccaaaaagagaaagtgagacgaacaatttgttgcaatgtgtgcaggaacaagctctaataactaattatttattggaattaaaataaataaataaaagtaaatatttctcgtcagaatttttgtcaaaattttcccgccaaaattttttttgtcaaaaacttttcgtaaaacaattctcgccaaatttctttttgtcaaaattttcctgtcaaaaatattcagtaagacaactacaaaattcgggtaggatttcacgtaattcacgaatgctttcacaaataaaaatttcgtgaaacctttcctaaatttagtgaaatccttcctaaatttcgtagaatcctttctaaatttcagaaaatgattatttgaaagattccacgaaattcaagaataattctacaaatgtcacgaagggtttcacaaaaaaaatatgttctaaatttcgtgaaacccttcctgaattacttagaatctttcctaaattttgtaatatgcgtcttgaattttttttttaggcggaatttttttgacaaaaattatttttggggaaaaatattttcgggtttttttttgacgaaaaaatattgtagggaatttttttgcgggaatatattgtcgggaatttttggtaatgaattttttgggtatttatgaattgttttagtcattaattttaataattaaatagaaaataattatttgagtgctatttgtgtctaaaaaactttttaatgcaaattttgtccaaaaaacttaaaagtgtgctatttgtgggaatttcttttatttatatttaaaatttaattaaagttttgagtgctatttgtgaaatttttcaaaatagatgctattttttgaagaaaaacgttttagtgctatttttgtcaatctcttttttttttaccgtaattcttcgtttcaaagaattgtgtctaactatcccaacttgttgtcttggatttgcaaaaaatggttcaaaatattgtaattattcatcataactatatccaaatatataaatatattggcaaaattaaaaagaatttgatctatctttaataaaacataaggaaaaaataataaagaaaaagagaaaaaaccataatgaaaacaaaccattttaaaagtagctcataatttcaattaaatagaaattacaatatactttaaaatatatatatatatatatatatataatatataaacatatttttaaacattctttttaatttatatgtaatattgttaagaacttaagagttttgagtttactatatgatgaagatataaataacatcaaagcatcaaacttgaaggagaaatcattgttggcgaatacgaaatcgttctttgtctaaaaaaagacacttgatcttgacgatttctaatacttgaaaaataggccgccgctagaccaagcatccaaaacttttcatgtaactggttggttattataacttcaatattaataaaatatattttctcccatttttcggtaggatattcttggtgtaaactccaaacgaccaaatttaaacattctagcacatccgatagacacaaacgttcatttagattccacatttctatactagtagcatatttggtgtcaaactctggtaatactatccatcgaaattcttcagtgtgaagatcgatagctaatacttggtaagatgtttgcttaagcttcttcaatgtcaaccaaaagagggatccgtttgcgtagactgatgtttgctcatcgcagaagatgcaatgatgtaaattataaaaaccagcgtctctttgctcaccattatcaagggatggaaccttggccatgaaataatggtcataatttttatttcttgaatatatcaaaatcaccttatatgattttgtaacaatatctttgccaaatccagcaagaaacggcattctcttcactaatccaccttcatgataaaattacatttgataaataagtatataacaaattactatgtgacaattgaaatgcaattctataatcaaccgtagaacaagaaagttgacgaaccaaataggttataatgcaagactgattgagaaagttgtctccatggtttatcggccactgtgggggtaaagcaactaagagtaaatgaccattgcgtaaattcgggagaaagtttcatgtgttctttagttgtcggattgatcaagtaaatgtacttaaaatcttcatggatccgaagcaagaccaatccatcacaagatcccaatacttgaatagttttgttttgagattcgtcaactggatcatcagaaaaagtgtagtaactagaagaaggacacttttttccgttgttgtgatcatctctagaaaaagtctctaaaagaaaagttattgagtttgaatcttcttcaacaaaattcgctgaaaaatgttgagcaatataaaaaaattttacattaggggttgataagcctgtacgaatgagtcgtttgtgggaaaagtaggttgatttgattatcgatctccatttttttgataagactttgaatctagccagtgatgctgttggaagatgttgaaagatctcttcaactatattctctggtataattattgtcttggaattattatgtttatcattctccattctttttcaacgatgatgattcttggagtcggtttgtatatctctatatataaagaaaattatgatctaatcttggatttttaactttagatttaacattaattgtagcaaacgagatagaacactattaatttattttagaataataaagagtaaataaataaacatgtatttgtatatgctataacctttaaataataaatgttgattaatatatgtatatgttactcctaaaaataatgaaaataaaatgagacagattatgattaaatatactttcatttaattttctttagcaattaatcccttagaattaattgtttgataactagtctgtaatttattttgaaccttgctagattttaaaatttcatctagattaactagattacgacattaactagattataccaaaatttcttgaaaaaggtttgatatctacttttttatcctaattaactagattatgacatttcagatgtgcaatagaccgtaaaccgtggtatacaacgatgcatgtctcctctgttctttaacacttaataaccttcaacaatgcaacactctaaagttttaacactgcataatgatggttcaaactccgtggagtttggaaaagcatataaaatccgttttattctttgatgcacaagcgccatagaaaaaatagaagcatgcctaagaggatgccattgcattggctacacacttttcagtgtcatgcaactgcaaactctattgccagggatatagcaacaacatacaatgaaccattctgtttttcaagtatgtcatttaagcatatatctcctgtttccttgaagggcctggtctctgcgctagtcatgtcacagggagcagatgatgcatagaattgatcagtttcccaagctattattcgcctaaaagaaggatcaactatcactgcagcatttacaagctgaaaagtacgttagaaagtgtataaacaatgggatatattgttatcaaaatgcagataagagcgataaaagaaatcatcaagaagtgggattattctagaacgactaaagcttagataataaaaagacaagaaagataatttagagtcttttggttacaaaaggtatcaagaaaccaaaatctaacaaaagacatggagcttactaggttgggggatgaaatgaagttggccatatgttactctgttcttctcactcttctttgaataatgcagcatatttgcatacctattagaattatagcagaaatatgaaattcaactgaaaatataaatgaatgagcaaaacaggggaaaatgcacattttattcctcaagtatttgcaatcaacacatttattcctcaagtatcgtatgcacaatatttttgaacttatggttgacttaacaactttgacctaaaatagttaacctttaccaaaaaatattaaatgaatcgataaacaacttaataaactcagaaaattatcaaattaaaatctaaaactcctaatagctaaatttctatatgtttaatttttgtttatattaaaaagaactcgcaacttaattttggtcaatctctacttcttctcgaaacttccactaccacaaagcaccacaccttccggccaactcaaacaagagaaacgacagtgtttcaactgatggggtttaatgaagcaaacacgataatgggcctgacaacaaaaaagcccataaatcagacgacatcgccgacaacaggtaccttgtagatgtccaatagttagtttacggcttcattttcttctcttttttttttttttagggcttcatctttatcacacgtcgttgcattgtaaatggtcatcttttaagttttaaccataggaaagtatcttttgtttcttaagttttggtatctaagatctgtatttactgatattgattgctttaggatttgaaatcggatagttaaatgagtcttcggggagaagactctttgttgcatagttatgtaacttaaacttcaggttgcaacttaaaacagtaacattacaatttgcagcaattggcatgcactttctgttctcttctttatcaattttcccatccttttatatctcaaattttaaccatacaggctgagaaaatcatttattcgaattcaatttggctacttagagaaaaaaaaaagtttcatcgactctaccgatctatcacgttattaaattttacatctgaattgatcgatgaaagattattatttatagtacataacaaagattaacgtacgacaatagaaatggattcaaataatcccaataagagatatatactcgagagacaacattattattttgcataattaaagattaatgaacggacaatagaaatatatgagacgaacaatgacactaaactcttcagatctcacgttgaagatttaatcaaggttagtctaggtgagtagcagatcaagtagcgctttgtgatcaagatcgttaaacatccatcggctcgagtaaagatctatgaattcttgggagctgattaaagatgcccattgctttgagacacatacgcatttacccaaggattgtagatcaggcaaccgtgacagaatctccatttgtagatgttcaggaaatgtatcgaaataatttggattctccattcttgttcttctctagtgattttttgtgtgtttgagagatagagacctactaaacacacatgtgatatttaattagttgaacttgttgagtcgtaaaacgcgtacatctaaaataaacgaaagaagaagtttcacctagctccacacgataaaaacttactaaaattattggccaattagcattaagatcattggatacccaagcatgatgaaactgacagatttgctttattacgtagtttagctcttcccattacaacagaatcacacgtcaaaatatatataacaagttaacattttcttaaaaggttttcaatttattgttttttttgtacacaatttcaaagaataaacacgtcaaaacatactaatttatatgactaattaacagagacaaataactttaactttagttcatatgcaagtcgtcaatccacaaaatcaatttaaattatttatgttatcaaatttcgaaatacactgatgtgaaatgtgatatatttatattagaggttgttactaaggttttgacttgtgagtgactgggtgatcacgtgagtcgtacaacgcgtacatctttactttatatttccaaatggaataatgttagttacacaaacttactataattattggccaattagcatagagattattgaagtaccaaccatgaaattgacagagtttcttaatttcactcgtttttgtagtttagttcttcgaatacaacaattatatcacacgtcataatatatacttgataatgaagttgaaaaaaaaaatcaaaaaaggtttttactttaattatgtgtaattgcatgataaattgtgttatacgtcaaaacttattgattaatttgtattactaaattagcagagagatttagtaccaagcatgacttgaaagattttatttttatgtagtatatatctactcatccacaccggattgttcaagtgatttctaagaaaaataattagaggttcatttcaactgtatccacattctagaattctcaagatctacatgccaagtagatttttgtgaggaaagtagatgaagagtacttcaaacaaatatcaaggattcaacagtttaaggattcaacccgttcctataaatcataaaaccacaaaatatcccaaactgacgatttctactcgtttctcttggaattgtgtagaagatgacgaagcgtggtcgcattttgctcccaaggttactctaattcatcgaaaaaatcgaattatcgaacctatttctcccaagtaaattatctggcttttgttttgtttttttttcttccttaaaatttgtgtctttgcgaccaaagtaagccacttttagaagagaaagttagagcttcgacgttgcgtgactttgcaagctggtctttttaattaagacaaaaagcactgatttcgtgtgtttttttacattacaatttctattcatttttaaattatccatcgttcgaagtttacaattatcccaaaaaaataacactttctaaaaacataaacgaaagtttataactgtaaagtgttgaagttgtagatgatcgaactctttacagtgctatgcttgctcatccctctcctaccaccatgaacaaacttggaatcccggaactctcgcttcttactgttcctcctcgtcccattttgccttcctttgcctcctcctgatcaatccccgcaagacacgcttagtcttttcttaccttctcctccctggaaactctttccattctccaaatccaagtttaattcattctgctttatcgctaaaaccgcactgcattaagaagccgagacttcactttctccaagcagctatctgatttcactatctccgcaaagtaaccccgttccttacgtctactcaacattctccggtaacatatatgcaaaattgagaacacttgcataaaaactgacacagttctaattgtaccactgaagttgtttgcattacacgtagtaaaagattatttattggaatacaaatactcctgaaaattggagagacaaaccggacaaaatccagtcatttatatctgtcgatggaaacaaaatccatttcataaaaatacgaaactgtaattgtaaaaaaaaaaattaaaattaaaattggttgggtcttcttctccccaagatcttctttattttacaagtcccaaaatattgttgatttggcaaattgtttgttttgcttcaacgaaatttgctgcttattgtgtcatagctcggaacagccaacactgccaaaaacaaaaacacgataaacaatattaagacactagatcttggtttgtaaaagattgataagaaaaaagtgaaagttgtttaccatctccaaaggaacccattgtcaaaggctttgaaataaccttgctggtgaagtctgcaatgtctttcaaggttagttggtctactgacttcaagaattgatcaactggtttcctgcaagattttgtaaaaaccacaaattatgatgtgtctggaattgaagaaaactatggagatctagtgaacttcttcgggttttcaaatgaagttctgcgtatacatacctctctccgtatgtaagtatctgtctaccaatgtcttctgctgcaatcatctggcacaggaaaaccgtttgaacacattcataacatataatggtttggatcaagttaaacaaattggcaacatttaagtatttttatgtaagtagagggtgcgagagttaaaaatatacccgagattccaaattcatcagaactgcagattttgtggctgccttggcacgatcaagatgtgcctggttaactgtccaacataagaacacaaggaaaatgtttcatagatgtatgagaatggtttcaacttgttagattaagtgataatggaagaaacaaaactgcaaaccttttcctcctgcaacatctttgagttctttagctgctaattcaattgcttttgcagcgaattgaggactctgcactcaaagacacaaatcccctatcagctaacacatattaccgaaacacatatccggcaatgaatttttcagctaaaaaaacttggacatcactttaacctcaaagtcaatatttcttaagcttaaccacaaaaattggtattccgttgttacacatctcatcaatagaaaaatgtggataagtaatgaaaggaaaaacatagaaagcgacatcaggattgttgaacttaccgagcaaccatagattccaaacaacccggtgtcgttaaagatgctagtgaatgcagtgcatgactgaacctcctgatattcgtttagaacacggcgatctgtaaccagacataagaacttgtatcactattactgatagcttagcagtgcgagagtatggtccgtgaactagttcaataaacaaaactagaataggccaaaaagaaatacaagatttgacttacaaagccacgagtgcattccttttccaggacctcccgcagagaatgagccacctcctcccataagcatctaatagcaattagattacattttattactttttcgccagtaaaaaaaatttgatcgaaacaagtgaaagttaaagcaaccaaaaagtaaaattcaattagacacctggagaacagtggcggtgactgcttctttctcgttattccagccaggcacctcgaaagcaaccgcaaagtgtgtagcctgaaaatggaacaacaaaagctcaataagaaatgtgacatagaaacaccttcatctcagacacacttgtccagtgatgggaaatctgtcatgaatacctacctctccaccagtatgttggcgaaaatctccaccgacatactgagattttggagccaattggggtggtacattaggaaggtcagaagttaatggctcagcaacttttaaaagttcctcatgttctactccacttgccgccaataccatccgtgcagcagtgaaattctcctgaaattcccagataaattgagtcaaaaagacaaataaataggattgtaattttgaaatcgctgagacgtagatggttcacaaaagctcatgcattcttacagtcataaactcttccaagagctccccattcaatctatctaaagcagactccggtgcgtacagaggacttgccaatggaccagagtaaccagcagaatgaatggcctccaagaggaaacccatagggttctttgcaagttccgctatctctaccttcatcttccgtagctgcggaaaagatcatcgacacatggctaaaagtcacataaaagtttcaacacagttatcagaataatacaaaaggaaaaaaaaaatgatctacctcttcattcacttcccagtccaagaaagcagggtttctaacactgtcaataagaacttcaaccatttcagggacataggtcttaagagcatcaatagtgtaactcatttgctctcgagacgcagaagcggatgtgttgcctccaatagcctcaatttccctcacaagacgaaaatgagttctgttcaacgtgctcttgaaagccattctttcaagcaaatgtgtagctccatggaaataaggcgcctcataaatagaaccgcaatcaacatataaaccaatcgaagctgccggattctgcacacaacattaactttcttcagttcacattttcaggagtgaaatcagacattaaaattcgttcttttatttaccggagtcgtctctgaggctatcttaagaccatttggaagagtagtgatctgaagtttgctcggctcgactttatcagcaagcggcggaggaagagaaacaccttgtagaggcatatccaatgaagtaagcgcagcacgagacccaccactcaaccagctcaagtaagccggcgttgacgaactcgtctccgcaacagcactagaactagcataacgcgctggtctcaaactacgagtaagaactccctatataacacacaatcacaatacatcacataataagaaaccaatcttttctatggtatcaatcaaaggacaataagaagaatcataatcgaaatcatttctcttaaatcgaaaatcagatgagttataatctaaaccaatggattgactttaaccaatcagagaagagatcattgtaacctatagaagtaactacaaacgaaagaatttgaatccagatctgttaattcactgaatcggaccaaatcgttccagaatcttccaggaacaggataaaagggtaaaattgtaaaaaggaataaggatgtaccttaagagccctggctcgtgaagctgccgtgcgatacatggcgaagattgggtaaccctaaatcggaaactgagtcgacgacgaaagagaggttgaggctgatgaatagagagagaggaggagacggaggctttttctcagtttatttacgattttgtttagtttagactttagaatctaagttgctacgtactcggtgatatcttgctaacataggcccataatatgtactaaaatctgacccaatattgtgttatgggcttggcccaatcctaatatttattcaaagtggtttttagactatttatcaatctgaacaaatctaaactatataacctatagccaatttcaaccgtcaaaacatcatctaatcatctttttcattaaaaatctgtttactgaagaattttaataataattgaaaattatcaaaaaatatgtccattctgtatttacttaattagattactgagttggtttagtgtgtacttcaaatattttgttactagattttaaaccgcggtataccgcgagacgatttttttttaaagtaatatattaaaacttgcaaattttaattttataaaatattaatattttacagtttaaaattgttattaggtaacgttataccacgaatccatgagacaattgttaaaaaactgaagttttaacccctattaaaacatcatattaataatattttaatattttataaatattgattcaaatacatccaccatataacccaattctaaaataaaatccgttatgtaatttcttacccgtcccatgattttttttttaaagtagtaatttttaaaatttaagaattattttttatatataaaagctttgcaaattgtatcattctctaatacatttatattttatagtttaattttatatatagtaatattatacataccacataacatttttggttttatataatcttttctaaattaggatgatttgatatgtttaatattagtagttttaaaaaataataaattaaagatttaacccgtattgaaacggtggattagttatattttacttttttattaatgttgattcaaaaacccgtcccttcaaatccgtcttccaaaaagcaatttattttattaatattaattttattaatgatatgactctgaattataatctaaacattttaactaataacataggagtgcaccatatttattcaataggaaaatgtatcatatgacctgaatgcacttttacccaaatccaccaaaaaagcaaatatattagttagcttaaatttgttaaagaatacaaattgaaaaagtatattacattttattcgaatatagtatcaaaacttatataacacagagatttgataattttttaattgttgaatactttttgttttgctaatttttatgtgattaagatttaattaatttcgtatataaaatattaaattattttacgaacttatttgtttataatttggtaacagatagatatttgaatattcaatatattttgcttcagtttaggaaatatttgatgacccatctttagatccaataagccctataatctagatattaacctgctgtataccgcaggtagacttatattttagttaaactaaaaacttttattgtaaagatgatttaaaaatatatgatattattttatttgattttaaatgtatattaaactgtgagttgtatatgttttgttaatattatgtatattgtttagtgtttaagattatacacttgtagtttgattgctaatttaagagtttcacctgtagtataccatcttgtattaatatcgatctaaacccgtcaattctaagattttccagcttgtattaaaaattgaatcacatcatacatataagaaaatctaatatgtttttaattattgtagtatataagattataaattttcaatataatatgtatgaaattgaatataaatatttcaaattatgacccgttactcagtagaaagttttcttaaatctattttcacccgttataatattttttcatgtattgaacagtttatattcgtttttaaaaaatcaaattatggcatatgcgaaaaaactctaattattttttataatgatgatattatttttcgcaaaaatagaatcatataaagatgagaagtgaactataataattaataaaaaattaatatgataatttagatatcaaatctaatttgttaatttttactggttacttttttggaaattaataatgtatttcgtttttgtaattaaattaaattaattaaaatttagatatcaaatcttatatgttgattttgattggttattgtttttgttaattaaaaatatatttcgttttttaattaaatttaattaattaaattagtatttgactttttaatccttataaattaatttactctttaaaattttatttttaatggcatacctatataattacttacaaaaagtaaggttacatttaaaatgtacttcccaaataatacagtaaaatgttcttctaattattttctacatgtactttcttacaatatatcagtaaatttatatgaacgttttactaataataaaatttataatcagaaattttaatttcaaattttagttagatgagaaaatctggaatattaaacttttgcaatcctaacaagctttctacgtttaatcatacattgaataaaaaagtcagttctcacaaatagcacaaaaataaattttgatatcaaatttagcacataatcttcaaaattctaaaattaacaaaaataatatcaaaaagactaatatatattaacatttagttgacgcttaacgcgatcgtattctatttcaaattataatttattttattgttttacataactagataaaaataaaataattattgtgtaaactcattgatactcattcgtgaagtgtgtggtatataattattcacaaaacgttttttaattgcttcttcgtgaagttcttcctcagccaaaccaactttctctttccagcaaccacgtttttaattgctattgtagagtatttttcttttaaaaaactaacggaagttggtgttggcctttttttttttaaatgtaatgtcaaatgatatttaaaagaaatatatatacagttttagaacttatgtatcggaatttgaaaacaagaaatcaaaataactttgaaagtttcagagaatgattaaacgaagttgtgcatcaaagatatctagctccgagattgaatccagtgatggtatgcctcattataccgcttgtcatctgaaagccgaattgctgaaatctgatttcgaatttgtttatccacatcctgtgatacgctgagccggttgaggtgtcgtccattttaataatttcttatataaaaaagaaaaatttatgtacctactaatttggaaatctattatatgcttttaaaagaaagaaaaatatttgggttcactactaggggtaaacccttatattcacctattttattttagtcaattaaaatctgacacctaataacaataataaatattaatttaattataaaatttaatttgctactaaaacgaaatgatgtatcggtttgggtttattagaaaatgtcagggtttagattttgtgattaaacgaagttaaatatcggtttggatttagaaaagtacgattagagtttagattttatgattaaacgagttaaatataggtttaggtgtataaacatatttagattttacaattaaacgaggttaaatatcggtttgggtttaaaaaatacgattagggtttagtttttttacgattaaatgagtttaaatggcggtttgagtttacaaaagagaattagggtttagattttgtaattaaacgagattatatatcagtttgaattataattataattttaatttattatgtaatttaaataggatttgatatgacatgtttttattggttaatacaaaagaaggtgaataaaatggtttacccctagaagtgaatctaaatttcgttctaaaagaaatgaggtgggagttggtgtagacttttataaacatctaataccctgctggcagttagtaagccccccataggctgttagtacacttcaaaaacattacttaatttcattttccaacactccacattttgcaatcacattattcaaccgaaacaatagttacatatgatttctctacaaacttccggaggatcaagcgaagaagaagatatgttattagccatacaactaggcgggctaaactttgtcccgtacattgtaaaaactgctagagaactagatttgttcgagattatggctaaggccagacctttagggtcctatctctcaccggtggatttggcttccatggctgcgccgaaaaatccacacgctccaatgatgattgatagattgctacgtttccttgtggcatattcggtgtgcacgtgtaagttggtgaaagatgaagaaggacgagagtctagagcatacggattaggaaaagttggaaagaagttgattaaggatgaagacggattttcaattgcgccctatgtgctagctggctgtacaaaagccaagggaggtgtatggtataatgtacaacatgttccaaataggtgttctcttttgttttggtatgtaacataaatgtttattaatttgtactaatacgagtttctttgcatgaaaaggtcttaccttacggaggcaatacaagaaggcggagcatcggcatgggagcgagctaatgaggcattgatctttgaatacatgaagaaaaatgagaatttaaagaaaattttcaatgaatcgatgacgaatcatacatcaatagtaatgaagaaaatactagagaattacattggttttgaaggtgtgagtgactttgtagatgtaggaggaagcttaggcagtaatcttgcccaaatcctctccaagtacccacatatcaaaggcatcaacttcgacttgcctcacatagtcaaagaagctccccaaattcatggtaacttattttgttgtctctttgttattcttaaattgtcatttagttttttgtcttttctttttctttagtgattcttaagattaatattaaaactatacggtagacgacgttagaaggtaaaatctaaaaactagttttagttgattttaggtggattagtcagtagtaaacaaagaaattggttgtgccttcatcgcgaaccgttttatcgcttcctagatcatctaaaacgtatagattacaaagctactagtacttgtttgatgattaaatcaactctttccaggcgtggaacacattggtggtgatatgtttgatgaaattccacgaggcgaagttatattgatgaaggtatatcaatttgaattccattgttgtttttttttttaaaccataactatatgcaaagtagagtcagaatggatctaccaatttcacagtacataagtatctcagtttcatagacataagtaccaatttcatacttgcaacaattttttttttttaagtgactgttcataattgaggttgatgatacaattctaacaatactaatcatgttacatttttttttttgtatgatttagtggatacttcatgattggaacgatgaaaaatgtgtggagatactaaaaaactgtaagaaagcattaccggaaactgggcgaataattgtaattgaaatgatagtaccccgagaggtatcagaaaccgatcttgcaaccaagaactcactcagtgcagatttgacgatgatgagcttaacgtctggaggcaaagagagaaccaaaaaggaatttgaagatctagctaaggaagctggctttaagctcccaaagattatttacggcgcgtattcttattggatcattgaattatatcctaattgaaatgacttctttgaagttataatttaagaaaaattatgttgagttgtattttcatgctacactttgatgtaattccatgatattcttcgcaagtgaaactaaagatggcattctcgtgttttgtaatgattaaagttctttgttcccctctataacattgagctcaacaatcgttgggtgggtgggcgcctgggcgccggcaaaatttcatgaaacctacggagtacgtactagttatccaaaatcgtaagtatgagatcctagatttggaaatgttcactaaagaaacacgagaattagtctaaccatcctaatgatgatatcaccgatcggaaagaaattctatagaagaggaaagacacgattaagcgacaatatgtaattaaaatatcatgaaatacggaaaaatatcaaatactttttaaaaacatgtaaaaaacttcacaagtaaacatacatacaaaatttggtgttttaaaggccaaaaaattgaaaacaaagatcctttattactattgacaagtacaacacaccatcaaagtagaaacatcacatgataacttaaaatatatctaaacatagtaaaagctaaaaagcttaattattcaaacttcgagtgacaaattcctaagcaagaacttagtatacgtacgtaatcaagagagaatgaaactcaaaaactctctaatttgctgctggaatgaaataagcaccaatagcataaagaacatcgctagcttttccatggaaaccagcaagttttcctcctttaccgtctttaacttcatatttattctcagtctctattccaaaacgtggagaagtttcacccttaaaggtcttgaaggtaagagcaatgacgatttcgcttttataaccgtagactttgtcgacataaacctccattgatgttatgtaatcgtctgaatcaacctcaaactcctctgttcctgacaatgtcatttttccatgttcttgtgtctcctttttaccgtctttttcataatcgaacttgacataagctacaccagaatcaccttgaccaacataaacctttcttacatgatcgaaagcaccatcgtcaaatgtttctccataacttcctccttgagctttaactttgttgggaggaggagtcaaggaggaagaagaggatgagattggaacgaaataagctccaagagaattaaggtgtgagtcggcaaaaccatggaaaccaatgatcttcttttcattaacttgaagtgaaaattgtgtaccatctccataatattcatatccaaagtactgagaagtgtgtttgttggattgaaactggattccttgaatgatattggaagagtcgtacaacccctcgacggaaacaagatactcgtccggatggctaatctcaatctgcagaatcatgaagatcaataatcttgaattaacacttattcgaaaaacgtaattgagccataataataaaaatttacgcaccgttgaagtgccacctcttcctttgacaccgtggaagggtccttccttcaactgtccgttcttgacataatcaaatctaatttgctcaattcctagaccaccaactgcaacatgtatcttcatcacaccatcatgatcggttccgtcgtcccattgatttcctccattgcctccttgtgcttccaacttttgtggactagaattggtgttggattcacttccggtgttagattctttgcctcccgtgttagtttttgtgccgtcagcgttactttcggtaccttcggggctagttccagtgctaccatcactatttccaatgccactagcaccagggttagtttccttgccaccaacgttattttcagtaccttcgatgtttgaatctgttcctccaccagcaccagggttagttccagtgctaccatcattacttccaataccactagcaccatcgttagttccgccgtttccagagttagttttggagccaccagcatcactttccgtatctccaattcccccggtgccaccagcaccaaagttagttccagtgctaccagcattactttcaatgccactagcaccattgttagcaccatcattacttttcgagccaccagcgttactttccgtatctccaatgttggaaacagtttctccgttgccaccagcactagcaccagggttagttcgagcactaccactgctagattttgagccaccagcgtttttttcggttcctccgttgccaccagcattagcaccagggttagttccggctttaccactgctaggttttgagccaccaacgtttttttcggtttctccgttgccaccagcactagcaccagggttagttccagcactaccactgctaggttttgagccaccagcatttttttcggtttctccgttgccaacagcactagcaccagggttagttccggcactaccactactaggttttgagccaccagcgtttttttcggtttctctggtgccatcagcaccagggttagttccggcactaccaatgctaccagaatcacttccgatgccactagcaccgggcttagctccggtgctaccaggaggaggagcaggggcaaaatgagcgtcgatggagttgagagcatggctgctacttccaagaaaaccgacaatctggttatctttgggtgcggcaacagaaaagtagctactggttttatttccgtaagtcccatatgtccttttgttcgtcttgaacgtcaacgacgttatgacttctcccgaaaacgtagttttgtagtaaccattcacctccgttatatactcatcagagctcagtgtaaactggaaaaacaaaacgttacgtgattaacgaacaacaatgtttactaaaatgtgaacactttgtttactaactccgtcaattttggtgccagcggtgccacgtggctgggacttaagggaggttccgtcgtattcgacctcgatagatcggatgacatcatcgaacgtaagctgaactctcttcaccttcgtgtgttttccgtcatcccaagacatcgtggccgttgaattccgtttgatatcttctgaaaattattacacaaattcatccaaattagaagtttatacacttgaaaattataacaaaacgtaaattcttttatccttttttaattggttactaatgaacataaaaacgtctctctaggaatgtaatggatcaaaatcataaaaagagtaaacattaattatacagttatagcttattatgtgtgtgcaactgatatcaacatagccacagaattgatttgttcataaatgcttgaaagtttattacatacttaaactttagtaggggatatcacagaatttggggatggataaaaatattcaagaaaaatcgaaattagatagagaagagagagcgagtacgtacctgagtggaggatgattggaggagagtaaattgcaataattgagggtgggtaatggttccatatttattgccattttcgggataaggttagttactgttatttgtcacatggcaatattaaacatttttggttacaaaaaaaatatagaatatgcttctcacccacaaaaaaaaaaaacgttttgccaaaatttcttaaatggatgacaaaagaaggttgaaaaaagggtaaattgtaggtcacacccgttgaccatgttttatttccatggattgtcaaagtcaaatgtggttttcatcatttgtcttttcgtctgcaaaatgacgtttctgcccttgcgcttctctcttagtaattgttgaaatgtacggtttagtttagtaggtttagttacgtacactgttccggttcagttaaagattttttgtttcacgttgacgcgattcggttccgttacaagtgagattatttccattattccgaagtgacatcaacatttaatgcccccaaaaagtttagatgtgactattgtcacaattaatgcaaaatcatcattacatcaaataatattaaaaaaattattgataataattaataaaaaaattgttgagataaagaagatgaacccaagaacaaagaattattgagaacggacattgctgctgaagaagtgttgatcttgtttttgtaccaagtttggagccaaaacaagcattgctcgtgtaagtaatgaagttcttttaagaagttttttgttatgtcatattaggatcttgattgtgttcgaactccatttttttatcagaaaatttgcaaaatctatatttgtttgtttaaaatagtcaaatgataattggtatttaggtttataaatgtgtagtatcgacattccatttgttttttatatgtatagtatttttcagttgcatttaatgtgtgtctcctgaatttatgatgcaggtgggttatggatattcccgtatttactatggtcggtgagtggaaatgcaaagaaggagaatggaaatttgaacctaaggaaggcatctttggtcgttgtgtacgcgttcaggaaaccatgacgtacacggactttgtccgtacactccgagaggctttcagtttgaagtccaccgagatcaatcccataattagctactggatgctgggagaaatgtcagtgctgatagatactaaacaccctcctgtatacattgacagtcagatgggtctcgaaacgtttttttttggttcgtggtgggtatctttctctcaacttgttcgtctctttcaataatacagtgaaggcgttcgggaatactgtctctaggtctcatggtgaagtttctgaaagtgaccgtgtgtttgatagtgctacaaatgttgatgaaaataatgaggatgcagaggagcaagccgatgttgaagacgatacaacagaagaggatgaagtggaggagggcaacgaagatgatgatgggtgtgatgattatcttggtgtggatggatctattgggggaagtaccctgtatcctaccacagacggtagtgaaggtattggcgaaaaatacgattacaacaagtggaacgatgtaatagtagaagaatatgtacaaggaaatcttgaggaagacgtcagtctcactcaacagactgctcaacatccaggggaattcagtcgtttattggaaacgtgtacgtacacgggtgttagtgtacctggcggagatacaggggaattcagtcgtctcttggaaacgtgtacgtacactggtcttaatgtacctgacaaagaaacaatttctccattgggttacggtacacgctgcgaagggcaaagggattccaatcttatttgtatagacgaagtcaccggggatgaagtgatcgacggtattggagcttcctcaactgggacactgaatgataatggtgtagttaccgcagctgaggcttaccaagtgtataatgaatttcctaagttacatggtggcgagttggcgaatctcggtaacgatgctgctcctgtgttcgatgacttactcaatttttgagctgatgagacacaggttgaaatcagcaccacaggcgaaactttgtttgttggaagtgtttttaagaatagaaaagtcttgcaacaaacaatgtctcttcaagcgataaagcaatgcttttgcttcaagcaacctcagtcatgtcctaaaacattgaagatggtgtgcgttgatgagacttgtccatggcaattgactgctcgcgtcgtgaaggattcagaaagtttcaaaatcacttcgtatgctacgacacatacgtgtaacatcgactctcggaagaactacaataaacatgctaattataagttcctcggggaagttgtgaggagcagatacagttctacgcagggtgggccgcgagctgtcgatttaccacagctgctcctaaatgatctgaatgtgcggatttcatattctaccgcttggagagcaaaagaggttgcagtggaaaatgtaaggggggatgagatagcaaattacaggtttttgccgacctatctgtatcttctccaattagctaatccgggtacaataacacacctacactatacaccagaagatgatggtaaacagcgcttcaagtatgtctttgtctctcttggcgcttctatcaaaggtctgatatatatgaggaaggtagttgtggtagatggaacgcagctagtcggaccttacaaaggatgtctccttattgtatgtgcccaagatgggaacttccaaatattcccaatagcttttggtgttgttgatggtgagaccgatgcttcttgggcatggttttttgaaaagttagctgagattgttcaagacagtgacgatttattgattgtctcggacagacattcatctatatacaaaggcctaagtgttgtttacccgagagcgcatcatggagcatgtgctgttcaccttgagcgaaacctctccacctattatggtaagtttggtgtgtctgctttatttttcagcgctgccaaagcttatagggtcagggatttcgagaaatattttgaactgttaagggaaaagagtgctaaatgcgaaaaatacctagaggacataggatttgagcattggacaagagctcactgtagaggagaacgctacaatatcatgtctggcaacaactctgagtccatgaatcatgtgttaacaaaagcaaaaaattatccgattgtttacatgatcgagttcattcgggatgtcctaatgcgatggttcgcatcgaggaggaagaaagatgctaggtgaagagctgtagaaacaagccgcccatataatcatacccagcatatagaatacaatggcgcatgcaagtgttgcatttgctcgtactagagcatgacgctgtaagagcctgatggctccattgatgtttcgatcattcgttagaacacgaataccttcgtaatacacggccgtgggattattagctgcaaaacaccgtaagaaaaatggtcgatgtcggccttcatcagcggatccggagggattgtggccccctccagcttggaagtcatcgggcgagttacacaaggtgagaatattggcatctttgaggacatccggacggtagacaatgtctcttccacgggtgccggatcgtaccagtggaccaaggttggaccagcattggtcagccaggttcttagctatcttcgagagtaaatcgtcgagaagagtcgggttaaccatgtttgatatgagatagtcagagatcgtcagtaatttcttcactttaataaccactactgtgaatttggttggggcaattacggttgaaatgaatgtcatacttgtgttggtaagcgttggctgtcaaatcaatttatcacttgagttatgttataaagttaatatacagtgtacgagacatatcgatatgtacgtacacatttacattatgtaattagaagtgaacgatgtgtacgacaatatgatagaggacactaaattaacttctgacaatctccaaattaaatgtagttgcaatcatatatctaagataggtttgttcataataattggttgcaaagaacaagaatattgttcttggacgattaaagcaagtgcacagtaccggcctcccgcttgtcgtgctcgtagatgtcaaccgagtatttctgacggtagaagaccatatctacttctcgaatggttatcaattccgaaaaagggtgtccaaacgcaagcaactccaagaacttcatcgtgtatggcccgcaatctcctgtagttgggttttgagcaacggtaggacaacgcacatactcaaaaggttcaactgagtacggagaaatcattacatcctagcacatcgctctgactaagtacgacatcatttcgcaaataggagtcattctcgccttcacagccgactcacgcgtgtgcgatattaaagcgtcatacacagttattagccgttcattaaggttgattcccaaagcaacccaatgttcactcttccagttcatcggagcatacacaacatcgacatccttcagccacttcatattgggttcacggtttatgtgaactccattagcaatgtcggacagtaatttaccccatttgaacccgttcttattgatacacttcttgaagtcgcccacccgcttggtaagtagatgcgtcagcatcatgtccaatacaatacatctgtttgctatcatctgttccccgttcttgtgccacatcaacattgccatcatttctaaatgctgaaatgttcaaaaaatatatcagtgtacgtacacttccacgaaaaatttaatcatctatgtacaatttataacaaggaatgtacgtatataaatgcaacataccgaactttcgacccattcaccaggtgttagaaggttcgcaaaaaactcgttgggcactttgcgaaacccgaaaagagtgtgaatcctgtaaatccagaaaaatatttgataacaaccttaagacttggaaaaatgatgattgagatattaaaataatccattttaatataatgtacttacacagagggtcctttaatgatattgctgaattcctctacttttgaaaggtcaaccatgtccaaggggttgtatgagacatttccagccctgataacaacctctatctgttgagttggtacatcgggcaccaagactgtttttgccttaaaaccatgaggatgggcatcatcctgttcatagacaagttgcttcttcactttttttgggacctttggagacgtttttttttcttcttttgcttcgacagcagcagcattgtctgattcatcctgttaacaaatatgattgtcaacaacagtttcatacgtttttctatgtttaaaataggtacatacattatttttaggaatatcggtcttgtctgcttcatctgaccctgggttaggatcctcagttcctacagacccctcaacaataccgtgctcttccatgactacctgtgcaagttaacgtacacaagtctatataatgtacacatataatcctatgtatgctatttcgaaaataggaattgaaacacacaaattgttacctccacatcagtagctgcagccaaatcaccaacggctttagtatccaactcccgtatgacctgcataatataaattttatacatttgaacagtaaatagtacattttatttgttgcaagaattagcttacattgttaactacttgaaatggtgacgggggatcactgtgggtcttctcaggtatttcaacttccatccctgtcactaatttggattctcctgccgcctcaacctgtagaatttatcatcggaaagaaactttttagtaatgtatgaaacaatatatatgtacacagaatatagtgacaaaaatgtacgtacacttgtgccaggtacgtgagctgtatctccatcagaaggctcataagtgtcttctgactcgctgccattagcttcagtcgatgcactggcatctcttgcttccctgaaacaaaaataatttgcaaagtcttatgggcgtacacatatggaacaagtgactaacacatacctgtgcagatgttgaaggtaaacctgatggattgtctaccatctctatgtcagcatcagctatttcatcgccccctgtatgggtaccaactaagccaggttcagcaacatcctttggtccattatcctgaaacataggctaccatagagttaagcgttagataagtggagaaattaatgtaatatatatgcatatagtcatgaaaatctgtatataacgattaccagaagatctacctctgaaactcttgcagacacattagatggaacttcttccatctcggtgtcaacagtagcttcttccacaggcctctctttctgtgtaacatagacagtcccagacattgaacctaagaagacagtcccagacattgaacctaagaagacagtcttaccaacaacaacatttcctctatcctgaaacatagtttaactaacttcttaagcgaatatgtacgtacaccatttaaacagattgttaagagtattactagacgacataccagatgggattgtgtggatccagcataaggaactattaaaaatccagtgtctaatatctcttcttcagcggccgaagaatccaatccatcatttgcagtaaaatcactttcattattagcgtcatactgtatcgaaacagacagtacaattatacatatggattataaaatatttagcaatgtacgtacatgacttacctgttcatcaacgaatccttgcatatcttccttattggaatcaggtagctcagtagtgtcaacagcaaaagaaacatttttcttcggctttgaaggttttcttcttccgccgacagcagtggtatgtactccagggacatccaaatcttcctctttcgaattacagccaacagaaagtgcaggagtgtccacatcatgagaaacacgagtcagccttgaagactttctcgttccagtgcttccttttgtagacatccttctcgatggcttcttcgcagtaaccggtgcccttatccatagaagtaggtggttcccgcgaatcatgggaaggtatggtttgttctggccttttgccttttggatcaagggcagcacgtatctggtcacggacaaagtctttcatatcttcatgcatttgatacatttggtcttccagctccttgaaagacctcctcatttcaacaataaacctctcaggcacaggctctccaaaacaatcctcagcattctcttctttatcacagtccatttcagatttctgttttttcatagtaggttctttagggctcgggcccggtgcatttcgtttcctcttaacatctacaatagaccagttgctgctattaattggttttcttctggatgcaataccaaaaaaatttgtaaacaacctttatacttatacttacctgtctcttctagttatggtgggcgcaactgctttggtactctagcatagcctccaacccattcatcctcctgccactggtgcccatctatcaacagtgcctcaatgtaatcaacccttggatcatcaacttcatcatcccatgaaagagatggaggacaaacattatcagctggtttcacaatatagttgacctcaacctacacaaataagtatgttaaccatagataatgtacatttacttattatgtacgtacatacacaatttaacacacctcatcagcagtctcacactccaaaatgcgagatgtccggattgctcgcagagaggcaagacgatggatagacctctcagcaaatgtcctgttaggtacatcatcaggtcctagcttagcaattgatgggattgtttcgaaagttaaaagctggagagctaatgggaagccatggagtgcataagaccctacaagtaaaccccttattagttgttgagcatcgtaaggagtttggaaatttgctatcctccccaaagtacgggtaaaggacacccttccccatgggtatttgcagaagaactccaggttcttagtcatctcgacagtcttcgaagtaggcctgttggggttactgtgggccgctaccacaccgtcaaccaaaataataagagatagtgccagttgcttccacccctccatgctttcctcctcctgcagccagctcaccaaatcagcaattgttggaaccgtgttcccaaacctctcatcaaacagagtcttccaaacactctcacactcaggtttcacactgataacatcatcaacgtctttcttcttgagatacttcccacattccagcctagttaggatactaaattctcttaatccaaatctgattggatgaccgccgaatacaatccacatctcattcaccttctttgtcactaactgacggcatattagtccaaggacaagcttagcattgaaagatgccttgtttttgggtattttaaaaagttccccaaatggagaatcgagaagaaactgcatctctggtttcccctttagtacatttgctatgtcagaaatgtactccggtttagagtacgcgttcatcttcgtctcggaaggataccggtctagagcaaagagtcttggtggtaactcttcaactgtaagatcttcagtcggagcaacacttggactacctgcaattaaaagtcatatactgttaagcaaaccgaagtagtgtatgtacacagacattttccagattataactcaaaatcatatttttggcggaaacagagatttccaattctacttctcaatttttcgtcctaaagatatgctaaattccgacaaattctaaccctttaatcaaataagctttacaattctgatacacccaaagacaacaaacggtaaattagagattctaacccagttcctccgttgcctttgtcgcagagcgttttctctgcggggaaactcttaatacccgcttctccttccctggaccatgctgcttcctcgggacttcgtcgttagctttattcccagccatagctaaagatgctatctcgccggaggttcaaatttcgccggaataaacagtaactttctcttggcttcgccgggaaaaacagtaactttcacttccccggatgtgggagttcagtggctcaattcaactacccaacaattcaaagttatgtcgaattttgaagcaatggatactgaatttcgtttcgctttctgattctctctcaaatctctccgttactctcttctcttcttcgttttttcgggtttcttcgtttcagtttttttttttgtctttttcaaaactgaaccgcatcaactaaaccgaaaccaactgctgtagggtttggtttacgtcgtcaacttaaccgatacgaactgctgcacagtttggtttgtgccattattaagttttcccagagtaatttggtccgaaattgaatgaaaagacaaaacgtgaaaaccagttctcactttgacaaacggtgaaagcaaatcttttttcgtccacttctgtgaaaatttcttttgaaaaaattgagaaagaaacaacaattttttgtggaccatttttgctgcaaaaaaaaaagagtggaactcatggaaggagttcacacaacaccggtttttttttttcttctggatattgataggtttggtatgtatggcgtcgcaacaaataacttgtgatagacccacgcttgttcaaagaggtttggagttgtcaatgcaaacaaaatgatttgcaatatttcattgaaattttagaaatattgtttttgaaaaatgagttattttttaatttttattttcatatgcgaaaatttaacaaaaatctaaaaagagattgacaagaaaaatcctttattagtgatcaaataccatgaaggcataacatcacatgatcgcataaagcattgacactaaaacagtgaaacacacacaaatccataaccatggtccatggaccttatttaacggaatcatcagagaaagaaactagaaaacacatctgtaattggtgaaaatgggcacggcatggactccgatctgatgaaccaaatcaccagctttgccatggaacccaacgatcttgtaaccgtcctcgttaagctcgaaatgttccccagcagtcattccaaacggctgagacgttctcttgttagtcttgaacgttagactcgtcaccacttcagcttcaactccgaaaattttgtcatagtaaccttctaccgaagtgatgtactcacttggataatcaagctcaaactacaaaagaaaagaagaggaggaacattaggtcaagaaatcaaattttgggtgaaactagaaacagactggagagaagaaagaaccgtttcagttccaagtaatgtttgcttcccatgacgatcaccgaggattgcttgagagcctttgttgtactcaaacgtaacgaaagctacaccatcgtttccttgacctacaagtatctttctaacaccatcaaaaacaccatcatcccaagaagctcctccatttccacctcttgcttgtagtttcttagatgtagaaggagtcgatggcgtagttgaatttgttgttggagcgaaataagcgccaagagcataaagaacatcactagctttcccatggaatcccacaagttttcctcctttaccgtctttaagttccaatttcttctcagtctccattccaaaaggttgtgaggttattcccttaaaggtcttgaagacaagagaagtgacgatttcactcttaaaaccaaagacattgtcgacagaaacttcaattgatgtgatgtaatcatcagactcaacctcaaactcctctgttcctaacactgtcatttttccatgctcccgtgtctctcttttcccatcttttctgtattcgaacttcacataagctacaccagaatcaccttgaccaatataaacctttcttacatgatcgaaagcaccatcgtcaaatattgttccaccatttcctcctagagcttccactttgttaggaggagctggagctggagcgggcgtgggtgcgggagctggaacgggcgcagaagcgggagcgggcgagggagctggagctggagcgggcgcgggcgcgggcgcgggagctggagtgggagcaggaagaggggcaaaatgtgcaccaagagcatcaatagcttcaccggatcgaccacaaaacccaacaagtttaaaacttgtttcttcgaacacaaatttactaccgaccacattcccaaaaacaggggaggttcttccttttgatgtcgtaaacttcagcgacgaaaggtaaccatcgattgttccctcgaccgatgtaatatgttcattaggataatccactacaaactacaaccaaattcaaaaatttatccagtcaaaagagaccaataaaatcttagtaaacaagaaacaacacaaatatttctatgaagatacctcttgtggagcttcttgtctcttcccatgagcatgtggtaccattctttctcctttcgcatactcaaacctgacataactcacaaacttaccatttcgcccaacaagcacttttctaacaccatcaaaagcaccatcgtcccaagcactccctccattcccaccttgcggtttaaagtgcttaagagaagagttcacagcaaagaagtgaggtccaatggcatcaagagcttcaccagaacgtccatggaaaccaagaagctttcctccatatttggactcgagcatgaattctttcccagctggattccctagtaatgtcgtgtgaccaaggattggagaggttcttccataagaggttttgaagagtaatgacttgatcaacgctgatccgtaaccgaaaacagtgtcgtagcttccaccaacggctgtgatatattcattcggataatccactgaaaactgcatttcattttccattaaaaacaaaaattttacgagtttcataagaaccaagtgaataataacaaagtcatggtttattcattacctcttttagctgcccgcgattagtcccgtgttcacgaatttcgaattttccgtccttttcgtattcaaccttgatataagttacattgttgaagtcttttccaacaattactttcttcacaccatcaaaaacaccatcgtcgaatgctccacccttgttaccacccatcgctcccaccttttcagacattatttctatcttttaacttcagaaaatacctgaaagatggaaacgttttcatagaaacacactaagaaacaaagaaccgaatggtctcctcatatgaaaaacagaataagaggaagcaacacaaactatgttttttttttacttatcacaactgtgaagcaaaaaacgttataaccctagataattaattactttttttgttgaatattatttctcaggttccatgattcaggaaatactttttcagatctttgtcttcttttgagtctttgacataattattatttttacatacttaacaagaggaaatcattagaaaaaatttctggattttgacaaattcatggtttacactatcattactttaatttgcctctgcaatttcctaacaaactaatcagttttgacgttataaagagaaaaagaagcctagcttaaagctattgttaagaaggaagaaatacaaaattggaaagaaaaaagaaaataatataataatttgtttataagttctttgaaatctagaagtagtcactagttagagaagaaacacaaaacataaaatattcaaaatacgttttttcgctgattaatactcaagaaaactcgagtaaaacaaaaaaagaagtgagactgagacatagtaacctgagtaaagagggtacgatgaggaatgagagagtaacttgcgagtttgtggatagtgatagcaaggaatagtaaaaaaattcttatataatgtgaaagtgaaaacctcacttagacaaagtctttatattctttgtgacaatgagaggagttataaattcttgaaaaggaaacggttacattcctttttaaacgtgagagaaatgcttcccacatggtccaactaacaaatataaagccaataaaccatacatttgttataccaaccaaaaagtaacaaaaatcaataggcacctattttttttaatatccatcaaaaaaatttatgcatcgcatatttttggaaatttgcaatataactaaaccagtctattaaaacctatatttcttggggtgaatttctgtctatcaatctggttgcgacacgtcgataaatctcgacgaaattgttctataagcaagacagcaaaagcttcgggtccctagaaaaaggattattacatggtcagactctatagcgcccatagtgagtgagcttcacggccactgttcaagccaagaagtatatgataccaatatattaaacacggccagtatatgttcgactaagaaatcatcaatcaaagtcaaacggacggcacaaggtaacccgatcaccggcctcatgggtcatggccatcaaaagcgtgtgatactggattttatggcccgtacaactagaaagatcttacccaagacattaagccagaacatagtggccctggttttaatgggttacaagcaagaaaaaaagaaaaaattaaaatcaagtgatatgaaggaagaagggttcgaacatttaaccctttgacgcttcaagtaagtgaatgtctaatttcgctgatgatgcttttggtgtgtaatttttttaaaatattaaccaacaacatttaacattttcagcatatattttctgttacttattttatgaataaacttttgcagcaaataaaacatttttcccattaggcgtttgaaatttaagaacatattttatgaaaaactaaaaatataaatactttaaaaatatggctttttctttgcagttttttttttgacatctttttttttgacatcaatttttgcagttttttagatgtaaaacatacacaaaaactaaccaagatctaaaaagaaattgaaaagaaacgtcctctatgaaaaatcaacaagtgacaagacaagacaccagcaaggcagaacaatagaaaattacatgttcgcataaatcattgacactaaaacatccccacacaggataatagaatgtaagaagcagatttacacgttgtttctttcgaaaaaaattaccagttaacaaatgatcaaaaatgttatttctttttttgttgtgatttttagtattggttatcgttcaaagtattcgtcgcaagaaattaaaactgcacaagttccatcagtggctcttccaagttatgatagaaagaccaaaaaagagataaaaaagaaacatcctttattaaaatcgacaagtgatgataagacacatgaatgcagaacattacatgttcgcatagaagcattgacgctaaaacacacaccctaatccataagcatgcatggtccatggaccttattttacggaatcatcagaagaaaaaaacctaaatagcaactctgtaattggtgaaaatgggcacgatatggactccgatctgatgaaccaaatcacccgcttttccatggaacccaacgaccttgtaaccgtcttctttaagctcgaaatgttccccagcagtcattccaaacggctgagacgttctcttgttagtcttgaacattagactcgtcaccacttcagcttcaacaccgaaaattttatcatagtaaccttccactgaagtgatgtactcacttggataatcaagctcaaactacaaaagacaaaaagaggaacattagatcaagaaatatttttttttggagaaactagaaacagactagagagaagaaagaaccgtttcagttccaagtaatgttttcttcccatgaccatcaccgaggattgcttgagagcctttgttgtactcaaacgtgacaaaagctacaccatcgtttccttgaccaacaagtatctttctaacaccatcaaaaacaccatcatcccaagaagctcctccattaccacctcttgcttgtagcttcttggtagtagatggagtagtcgaagttgtcgatggagcgaaataggcaccaagagcataaagaacatcactagctttcccatggaatccggcaagttttcctccgttaccatctttaagttcgaatttcttctcagtcaccattccaaaaggcggtgaggttgtacccttactagtcttgaacacaagagcagtgacgatttcgctgttataaccaaagactttgtcgacagaaacttcaattgatgtgatgtaatcatctgaatcaacctcaaactcctctgttcctaacaatgtcattttcccatggtctcttgtttctcttttcccatctttctcatattcgaatttgacataagctacaccggactcaccttgaccaacataaacctttcttacatgatcaaaaacaccatcgtcgaatgtttctccaccatttcctccttgagcttccactttgttgggagtagtagtcaaggaggaagagatgggtgcaaaatacgccccaacagaattgagatgagaatcagcaaacccatgaaagctaatgatcttgttgtcattaacttgaagtgaaaattgtgtaccatctcccaaaaattcatatccaaagtactgggaagtgtgtttgttggatttaaactgaattccttgaatgatattggtagagtcgtaccaaccctccatggaaataagatactcggctggatggctaatctcaatctgtcaaaatagaaaaaaaatgtcaatagtttattaaggatggacaaccggtttgttttaggtttcattgaaacagaaacaaaaacaatgctttcggtttggaataagttcagggtaaaaactgaaaaatagagttaatgattataggggaaaatgccaaaaacaatactaaaatcttttaaaaaccagcaaaaaaatatactgagattccacattaaaaaattgaatacccaacgtttaaaaaataaaatcaaagttatatcttaaactagcggttaagtgtgttagagatagacgattaagacggttacgaatctcactaattatcagctttcattatagtggatctatttctagtgaaaccatatttcactaatatggctttggtttcgattaaactatagattcggttctttcagttaaacatatatttttactactcttagctagaatacacattaacttggtatagtagcattaaagagagagaaagaaaaaaaagacaacataccgtagaaatagtacttctacccttcacaccatgaaaagatccttcctttggttgtccgttctttacataatcgaatctgatttgttcaattccaagaccaccagctgctacgtatatcttcgtcacaccatcgtgttcggctccatcatcccattctttgccttcttttcctccttgtgcttctaatttttggggtcctccggtcgacatctttcagagttttttcttctgaaattataaaagctattactttttactactagtatactcctgtaaatgcatttttttgatatgatatattgaatgcataatactaaagaaaactcgaaaaccagaaaaagaagagagacaaagagtaacctgatcagtacagcgaggatgagagttacttgcgaggttgtggattgcggaggcgaatggtgtgatatttattagagtatttataataaatgactatagatttgaaaagaatgtacaaactaaccttgagttacagtatcttgtcggaaacatgctggagaacacgtgtaattacgtaaatgtcctttgtaacatgttattttccgaaatacatgcgataacataatatcctctttttattttgttattttctcttattacatagtatttataaaaaacacatggtattttttggaaaaaacattctattcagtttaatatctctttttatcatgatattttgtagtaatacacgtttttttattaagatcacacgtgatttccttaaaaatatattcttattttttagtaatatatggtttttattaaaatcacatgtaattttttttttttaaagattctgttcatgtaaaagaatttcataataatattttttcttaaaaattcataacgttttttgaaataacatgtttttaaactaaatataacatgtgaaattttaatgttacatgctattttgaaaaattacacagatgtgtttcgtttactgttcatcttacaacaaatgaagggtagctttgttatttcttttcttccgacaacgtaggtccatggttattttgtaacaaaaaactttctctctgctagtttcttaatttatatgttttatttggttatctactaatattaccctatttattaagctatttttcgggataagttttttttttctttattttgttatgtttttggagataaatttacgttaatgttattataacttatttgtcaaaaacattatctcgcgtttacaatttgttctcatataagttttaatgttttgttttgaatatttttataaacagtttgtcattgtgacaatgataggggttgtaacgatcgaaaacggttacatttgtagtaaaatgctttccacgttgtgaaaaaaagaagagaaaaggccaagcaaccaatgaatttgttacaccaaacaaaatatgacaaaaatctatgtgcacctaacgataatatgccatcaaactttctgtatgactgactatataagtctatatttttcttaataaaagtaaatctcaattattttaattttatcaatattttagttattgtcaaatggatcaattagatagataccaaattgttagatcaaataagataattaattttacagaaaatgtttagataaatatagaaattttattattagttaaaagtaagacttctcaattggagtgttatctagagtaaacattgtgttattatatagtttaaaattatgtcattaagaaataaactacctttttcatacaaataaacaaattcattttaatatacataattccatatatgatcatatcattattttgatatatcaacagctacagttaacaattactatatatagtactaaccatcgcagtggctacacaagaaaaagctataactttaaaataaaaataaaaagggaaaaatttgctagctacacgaaatataagagaatgcatgatcacatatgtcaactatactattatatagtcacctacatgaagtagatgtatttcacggttacatgtctaaaccataaagcggccattatgcgcctattcacatgtattttcttgaaacgattagaattttgtaaagacgtacggctctaggagactgggaacaatagtagaaattcttgacgcgattaacctctggatgattttctcccctaatgtgatgaagttgctctaaaaatggcaattcggctcctatgacgattgttccgtcgaagattccaacttggtgaggcaagatcctttcatatttggtcacgagggagccatcgtgtggtgagtggttttggtagtgtttgttctctggtgtgagtagggtggctacttcttcaggcaaagttctcggagagcaactcagggctttggagctccggtggctcggtctttttcgagtagagactcgttagatcttagccaagttccatcgaatgcggacaccactaatcacataaggcgcaataatttattatctcccttgacctaattttagtttggtttgtctgtgggaaaagtttttaataaagatttattttcactcttatcatagaaaattgtaaaattgaagttttattataaaatatagatcgaaaatattttaaatgacatattgaaattagttttggataaagttttatttcgttacatagatgttcatagttgacaacatcggaatcgataagtattttaaagtagtaaaagatacgtgaagccatgcatgaacaaacttctgtagcttaggaagatatcattggagagaaatatactccaatagcatcaaaagaaccaccatctcttccatggaacccactgataacattacctttagtctccaacacaaatttggtaccaatgaccaatccaaatgtctgagagattctcccttttgacgttttgaaagtcaatgacgtaagaaccaaatagttaccctcactgatatggtcgtatgtaccctccacagatgtcatatattcattcggaaagtccacagcaaactgcaataaatacacaattagtgtatttgatatttcataccccaaaaaaaaacttaaaagcttagtatatttatttcatataccattcgaaatagaaacatttatttataaaaacctcgttcagtttattgtatataccgaccaagggctatagagaatttacctcctgcgtttctccattcttcatcccgtgataacgtgtcaccacttggccatcttggtcatagtcaatgttcatactccttatatgagtttcagtaaaagtaacatacacctttcttacaccgtcgaaattaggaccatcatcccaatattcgcctccggttatgccaccctggagttctgatttggtaggagcagtctttacatatgcaccaagagatcggaggctacgccaagcagatccatggaagccaacgatgacttttccatcgactccaagtgaaaacttagtacccttttgatatccaataaattctgaagtcttgaggttggttttgaattggagtgcttgcatcacaccggtcttccagtcgtagtaaccctcaacagatacaatttgttcatactggagatggtcaatctcaaactgcaaaccaaatatggcaaattacgagaagatgtaagtatttgatttattacatatataatcataataataatgaagttttggttgtaaactaaaatctaattttggctagatttttttttttttttttttaaagtgtataataccttttgaaaaaaaactctccacccattacttagctttatatttaccaaaatgaatatatgaattgaaacataccgtctgtgtgaaaccgtcggctgaaacaccatggactgatccattaaacgattgtccatccttgacatagtcgaatttgatgtactgaatgccttcatgatcacctcgtatgtaaacctttgctacattatcattcgcaccgtcatcccaccgtttccctcccttcccaccaattgcttcgatcttttgggccattgcaaccccatttgaatctttaaacatataattgatttaggttatattttgttttattatttcatagtcgttagtattattttatgttgggactatgaatattcaaaagaaaacaactgtttttttaatccaatcatcaactttgttctaaacagaaggaagtatcgttttaagttctttggaaattttatatcaaagccgaatttgaggtcatgataaaaaagcagaaatttcaattaacagaaaattattaatttggagctttatagggaattctagctgttctctttcatctaaaaacattaatggtctaagagacatagcgagcttaattacctataatggcagatgagagaaagataaaaagatagatgatgaacatgatcgataattatgctgttagtgtttgatgaatccataagttgaggatgaagatgcttatttatagacacagtttggctctttcacatttgcatattagtgtatgtataaaaatctgactagtggccattaggcattttaaaataatgttcctcaattatcaaatttttatcttcttgaaggtatttatagtgttttaacaaaaccttcagaaacaatctttgattaaaaatcctttaaccaattgaattaaaaactttaggatatttgaacaatgtgaactgagattgacctaaaaccattataagaaacaaaacaaaactttatgtgactatgaagtattatactttgatttattttgaactttatcattgaccagtcaactagaaatatcaaatagtaatttagatttcttctttcttaatttaattaatacctactcgagttttaatttaaatattgaaatagtgaaattgttatttatttttttaaagtactttattttcattttattttcagtagactaaatacatttttatcgtgatttcagatttcgagatgaagaaacttagatcatcattttgttatcacatgaagttgattgtattggagtgttgcgttagattgttttgctgacctggattagttaagatgagctagcatgagtttgcatgttggagaagatttaattctatacttccctttctgtcttcttactcttattcgactctgtggtcgagaagattcattgttatgcatttgtgttgtttcatataattacccaaaaacatctaagttttagacttcttagtgttcattatagtgtcattcaacatcttcaaaatacttgcagatggaaataaaaattataacgattttaatagagtggcttaacaatcccaaaaaaaacaattttcttaagccacacaattacggtaatcttgtcactgcgtcttctcacatccccaaaagtccaaaacgtatatctgaatcaatgcctaattatgaaagatataattcaaacctacttgcatttaattaatctgattcaatatcagatcgatctgattaataaataaggaccatgtaatctggtcaataggaaataggttcacatctctttgctttaattatagatctcaaaatgttgatatcttaagcctaaatgcttggagcatgaagtatgcccaaatcagttcatcagatacacatgtgacatgtatatgactatatctcttaacaaaaagtctcacaccaaaaccgcaaaacgtattatttgaatcgaatcatgattacgaaatatatatatactgaaaacctacttgtatttgattaattcaatctcagatcgtgtgttaaagaatacgaaagaccatgaattttgactttggactattagataattggttacttacttttcccgcgttcttcatgtgtttaattgtaagattgaagttcttagctcaaatgttgatatttaaacggtttagttctttctcgttttcttttatttctggcaatttaaactgtagggcgatttttaatactcagtgttagaaacaattttttagttttagttagagatgatacgttcacacttttaccttaaagagtataaatatattggtaaagctcatttggttaaattcaaaactaactggcactaaataaattggttaatgtcttttatatattcgtttagactcacttttttttgtaagaatatcttagactcacttgtatatgttaatattagttgtgcccttgttagcgtggaaccaaggctagttaacgttgttccagttataggactggcattaataccccaacggttactccatttcaattaaatggagatatgatgaacgttaaagttaattaatgtataatttaatcaattattttacatcaaatgggaaatacttttgatgtcacaatttgtttaaatttttgattttctcatttttactcattgagttttagcttgatatataaacatttacgcacaaaaacagaataatcttagagatgattttgttttttaacactttatccaatgttataaaatattttatataataccgaaatagagacccttattttattacatagatttgcaaactcgaaatacaatgtgaaattaaagaagatgaggaacatcatatagtaaatatttattaatagatgtgagcattataaaacaacatgataaaattggtgaagttgttggtaagtttttcagtggaaccatatacgtttagtagccttcatagcttaatattacgaagaaatcatatcggagagaaataaaccccaatagcatcgaaagcaccaccatttctcccatagaatccgacaattgcattaccttggctctccagcacaaatttggtaccagacacaaccccatatgtgggagatattctacctttcgatgttttgaaactcaaggacgtaatgaccaaaacgtaatgatcggggaataggattgagtcgtacgtaccctccactgatatcaaaaattcatttggatagtctatcgcaaactgcaatgaagaaaaataatgttagtaaacctacattgattttttttattttttttacaattaaaaatgaattttcacgtaaaatcagagcctaataagtctacatggttgtgatatataaacgtaagttttggcttattaattaaatataagcaattcaagtatgtgtccggactaagaatgttttaagttaagagttataagaacttaggacctcctctgtctctccctccttgttcccgtgggaacttgtcacaacttgtccgtctttttcgtagtcgatgttgatactccttatacaagtgttcatgtaagtaacatacacctttcttacgccatcataattaggaccatcatcccagtagtcgccgccccaaccacctacgagttctgacttagtaggaggaacttttgttaaatacgctccaatggaatttagggctttccccgcggatccatggaagccattgatcatctttccgtttaccccaccaagtgaaaactttgtattactctttgggtatccaatcacttcagaggtcttccggttggttttgaattcaagtgcttgcatcacaccggatttgtcaaagtaaccgtcaacagatacaatatgttcaccgttttgatagtcaatctcgaactgccaacaaaaatggttgatacgttaataggattttcgtagacaacaagctaaatatgtgacatgtggatccaaaacatcaacagaattcacctttgaatttcactcgccactacaattaaaacgatgtattaaagattctatatataataatatttatttttaaagcataccatttgtgtgaaaccactacccgaaacaccatggattgatccctctacagactgtccatctttgacataatcaaatttgatgtattgtatgccttcaagaccacctcgtatataaacttttgctacattatcatggccggctccatcatcccattccttgccccctttcccacccttagcctccaacttttgggccattgcaaacccatttgaatctttatacataaaaattgaatactattattgtgttatataatcttcttgtcattattaattttactgagaacattaactttctagccaagcatcaatgtgttaaagaaaatggaagaaagaaagttgtaattatccaactaacgtttggagccacatatacacaattatgtacataatttagattaaaatataggggaaaagtgtactttatgttctctctagcaaatatctgaaacatgaatggtgtgaatgaaaacggtgcataaggaagcttagttacctataatggctgaggagagaaagagaaatatatagatgaaaatcatgatcgatgtgctatggtgattgatgaagaagctgaaatcgaaatgcttatttatacaccaagttttagctctttcacaaatgcatattactagtatatttaactagtggcctctaaggcaatagattaatgtttctcagttctcaagtttcatcattttaagtagtttgttatatatactaatactatttcttaaagaaagttcactgaaccaatagactcgtaaacgtaatcttaatgaaagaacaatatggatgctaatgtttggatatcaaagtaagttaacctaaaggcgtacatgcagttgcggatttagaaataaaatttacatgcaggggataaaatactatactaattttaaagatacaaacaattatgttattattatttaaattctaaataggaaaaaataataatatttatccacatttcatataatagctaacgtgggatttgatcatgaatttaggaggggcaagttgcttcaatttaccatttgacctatatattttttttttcttaccaaaatgaatatactttcttttctaaatgtaaatctattgctcatcaaaaaggtttatttacaatctaacgaaagaaaatagaattgaatgatcgaaaataagaaaaaaagtgagcatcaaggagatgaagttttagctaatccccttgtactgaacaaacccgtaaggagtccctcgagttttgtttgattcgtggtattgaagggagctgataagactacaattacatttttgtcaatcttgtagatgggctgggatatggaggatggccatccttctagtgtcttcaatcattatattctctccatacatggtgtgcattggcaaacgatggtcggaaactaggattattccagaaatttgtcgatgcagatgtcaaaaaaatattgttaaaataatattggagaaagtttcaaccacatttttccatcgagagattttgtcaaaacgttgttcgaaaattccgatgagtttccaactaaacgtggtatctgtatcgagataggtttgtcggataggcatgcatcagaattttctgtttatttttgatgaaacttgaaaattttagtcggaaattcgtcggaaagttccaacaactttctaagactgtaaatatacagtcaaaaattatcgatgatatttaaaaaaaataaaaatttagagtaacccaagagccaaaatactgccaaataactcctaccagatcagtatgcataatgatgatatatcgttaccttagtggccattccagcttccaagcagtggcgtagctagctaatgaggagggggtcaacgaccccataacctttacaaaatttattttctaagcttacttaaaaataaataatttaatactattattcagttatataatatatgacctccataacatattattcgagctcgaccactgattccaagcatgattaaggttgtatttaacaaataaaaatattaacaagacattttaacacatatcacgaatatacatttataattaatttcccctctctagcttctttgtatcaattctttcatacaccacctccatggatagtaaacttcttgtattatccgtttacagtttaatgaaagttcgcagatgttacaaaacttacaaaatccgtaatcatgaatcgatttagacatacgtttccggtgatagttgtttaatgttagaaaaacggttttatatatgagggaatatggtttgaccaaattattaaatctgtatggtttaagacgaaatctcaaatagtcaaatctgattttgcattttctgatcggtctcatggaacgtggaaaccctaaaagagtgatcttattacttaaggatttgaccaacaaaaatgaaaccttgagatctacgacaatttaatgatcttcatgattccactttacggtgaggccaaacaaaaaggaatcaagttttgacttttgaggaaatttttatgaatttagtcaaccattataagactgcttaataagtttgatggaactccaaactcatgttttaccaaacggtttcatatggaatgttcctcggttaatagtttatatagtttaaggccccacaatgggtaaatgtcaaataattcgtccaaattaaattagatagtgaatcagtaacttaacctaaccaatagaaaatattagttattcaaaaagaaacaaaattaacctagcctgtgacaggaacagtggatttagaaagcttaatatcaagtactccagtactcttagaggtcaaggatagttcgattagttgaattatactagggtaaaaagttgttagttatcaacgagttgttggtctagtggtaaatctcccaaataaatatgattggttcaacgtaagttggaaatgatttcttctccaaaaaagttaaatttaattgaatatgggtcttccctgaaaaatacatagggcctttaggcttaaatttccagatatttagaagaaaaaaaaatgttagtttaggttcaactttaccaacatggttaatacttaataggaaatttagataagcaacagtatggtgtcggaaatataagaaagtaatgcatggaccggatatcagactgcttcaagattaagtgttttaattttgactttgaggaattgataaattaattgtgatgcataatggtagcgttttacaatttcttttttgcacatacagttttttgtaatagatccaaaccaatagctcttttattatagaaacattaaaaagatttgaataatcaaacgttgctttattacatgagatttcagaaaggaaagaaaacatcgcaagttaaaaacatctgaggcacatccacagacaacaagtaaaggaaagtaattaaaaataacagatacgagattgttattacagcaccatggaaccctattattttattatcttcataattatgaattaagaagtaaccatggggaagaatggttgaaacttctgtaatcttgaaacatgtacatatgctatatttgtgtctagagatgcatttttgttgaacatatgtattttttaagattaataatcacctgaagcatgtgtcagtgataaatggggtttagaatgtaattaacgtggagatgcctatacgagatatgccttcaccccaaaatatatatctgaatcgatttatctttacgaaagagatatataatacctacttgtatttagttaattcactctcagatctggtggatgaatataatgaaccatgaattttgacttttgacaatatattctcgctttttccggccgctttcttcatgtgttgaatatttgattgtaagatttgaagtttcttagctcaagattgatatttacttcttgtttgtttattaaagaatcttttgttttgggtttgaagtttacagcatgtaaatagcatgttatacatttatttaaaaaggttatgctaatttaataatcatcacattcagtaaactcagaagaagaaaaaacgggaaccgagttaggctattttttgttgaatcgtatgaaacaaagaatgctgccagtaatttttaacttttccagttgctatccatatctattgttcttttaactataatatatatatatatatatatatatatatatatatattctcaccttatcaaaactaagaattagattaattttaataacaaatgaaatttcaatataaatgtatatatgtttaaagttcttaagtgtaggtgatgaaaacattatatttgagtttctctctagaaaaaaaaaactatacactaatttaattagtttcctcggatctcatatgaggaattcaaagtcgcctaggtttttcggtccatctcaaactaaatctaattgtatgactggcaatagcctactggttatcgtatatttctcttctttggagttattattagtacatggattgatacatgcctttgaatattcttttagttatcatttttctttagacgtgtggttctttatgacttaatataagttttacactcattgcgagtcagcttgataaacaaacatatgcagaatcactgacaacaactcaaggtcttaactctttgttaaaaaatctaacaacaacataagtttaaaaaggaacaacgtcaccaacactaagcatcatgcattaagtagaaagtttaatactccatacaaagaaaaatatcacgtcaaaaacgttgcgaaaagtgccacggtttcattggagctttaaaagttttgtttgcatttaattcagaattataataatatttttatttttaaatactgaaatacaggtttcataattaaaccttgttttattacaagagattgtaaactcgaaagaaattactgattaaagaaacatcggagtaggtagtaaatcattgtagatatgagagccttaaaacaagatgaagttcgtgactatatttccatctaaccatatggttttatagcctttatagtctcgaattacgaaggaattggagagaagtaaactccgatagcgtcgaaagcaccaccatcccgcccatagaatccaacaatagcattaccttggctctccaacacaaatttggtacctgacacaaacccatatgtgggagagattctcccttttgatgttttgaaaatcaacgacctaatgaccaaaacgttatcatcggggagtatgttgtaggttccctccactgatatcaaatactcatttggatagtctatcacaaactgtaataaaggggaaaaaaacgttagtaaacctacaatgaaattataagaatacttaaaatctgatatagtatttaagtgatacattgactgtttgacttattgtcaataaatttgtaataaaaaacgcgtaaattaatcaaagcctagtgagtgtaattggtttttatatataaacaagttaaatatatcgatggactaattaagatttaagaatgttatgtttaagagataagaattcagtacctcctctgtatctccattcttcatcccgtggtaacgtgttacaacttggccgtccttttcatagtccacattgatactccttataagagtgctaatgtaagtgacagatatctttttcacgccatcataattagagccatcatcccaaggttcgcctccggttagaccacctacaagttgtgacttagtaggaggagctgttgttaaatatgctccaatggagtttaggactttcccagcagatccatggaagccaatcaccatcttgccattgactccaccgagtgaaaactttgtagtaccctttggatatccaatcacttcagaagtcttcaggttggttttgaattcaagtgcttgcatcgtaccagatttgtcgtagtagccatcaacagatacaatatattcactgttttgataatcaatctcaaactgcaaacaaaaatggtgattgtattaataaggactttgtacacagtagccaataacctaaatatatgtgatatgggaaaccacgacataataagatccaagtttgagtttcattggtcactagacttaaacatttatacattaaaacataccgtctgtgtgaaaccgctacccgaaacaccatggatagatgcatctatagtttttccatctttgacataatcaaatttgatgtattgtatgccttcaagaccacctcttatataaacctttgctacattgtcatggtcagctccatcgtcccactgcttgcctcccttcccaccaattgcatccaacttttgggcctttgccaacccagttgaatctttcaacataaaatttaaattagggtattgtgttttctaattatattcaatatactttctgtctcgaaaataaatattatataccaagacaccaccaattgtttttaaaagagaaggaatggcttgcctggaaattttatgcaaaatttataacaaacctatatttgatgttgccaaaaaacaaacaaaataaattcataccatattcaaaacttactatatatatagtgttatgttcatatgtaattattatctcattataacattatgtgatagtgttatatatattttagtgaagaagagggaataagactattggcgtgtgtaaatagtggatcataaggaagctgatctccttagtattaaacatcagtggtgtaaataaaaaagtgtggataaggagagcttagttacctataatggctgaggagagaaaaagaaatatatagatgataaccatgatcgctgtgctgtggtgattggtgaagaagccatggctgacgattcttatttatacacacagttctgggtctttcacatatggaaattactagtttataactagtggcctatgaggcattatagaaaaatgtttatcagttcttattttcgccttttaaaagtatttagctacacttacacgcatgcattaattttaaaataacgtcgattcaagcgatatagaaagaaactatttcttaaaaaacatggatttataatgcttggatatcaaattaatttacaagttgtgttttttttttatatacaggcttacatttaaccaaaacgtttttgagcttgaaaacaaatgaatatgttttgattaattgtgtaacatttaaattaaacttattaatatcgtacgtggacttatatgttttttagattttctatatgcacacatgcatgttctggaaaacactttcacaaatcctcatgatgagtttataacacttaattagttaattactcccctgaatatgtactccccttctgttcatacttgagtttatgacacttaactacttcttttttcgcctaacttcaccgtaaagtggaaccataacgatttaattatatataatagtattgtcgatttcgaggttcgatttatgggcagaagacgttgatttcacaaattagggaaaatcagaatcttaaattaatattaagaacccatagatttggtcaacatagtttctcatggctcatggggaatctgttttggtatagatgcttttagggttggttcgaaagtttttctttggataatgtgatatactatatatgaaaaattcggcatgaaaaactatttcgagggactagatggggaatatcacattagattggtgaaagtaaagctaagaaatagattttaagatcatttgatactaaaaactgtacaaagatgacttaaagtcataataaggccatctaaagacgagatccaaaccagagacttcacccatcctctattaactttgaacctcttcatggtatatctcactcttcatagacagttagaagcattaatatctaatgttttggccatgaaatggatgctgtttttttaatttagtttctgaatttggtttttagtttttcgattttagattttagttttagtttttgttattaaatttttgtttttaaaaaaaaagttttgctttttgagaaaaaataacgtagatgaagtagaactagatttcctaaataataggataaataaaaatctaacatcatgactggaagattactataaaatttgtttcctaattaattatagaaaaactttgaactatagtttcagtttcagtctaaggccgtttcttctccacttttatcagccgattcttctccacttttatcatgcaactttagattgtaatctatctagcttataaggtgttcttgagtattattaacaatttggtatgaaaatgagattttgaaaaacaaaaaccgcccacacaactgtggtctagtgttaaaggagaattgggaaaatgttggaaggaactaacctaagttcaatccaccttacaaacaaaaatcacatatgtttcgaaagtttgagtttgagctaaaagttcaagtaatttacctattattcagtaacatgcgatttggctacctctgacattagtcagaaagcatttcaaaatcggaaccgacggtgtggtgggcttttagagagaagtccactctaaaatactttggtacatttctactgaaactcactagataaatctataagtttatttaaaaaaaaaaaaaaaaaaaaaaaaaaaaaactacaaaacattctcaatgcctttgtattttttttttttttcccaatcaaggcctttgtcttactagatcgattgtcacgatgattagatggattgattgtttaggctcttaggctctctgccatcaacatgggctgaaattttctgttggaccaagttctcccaacatggatttgggccataaattgtccatattttttttctccttgtattttttattgacaaaggaacacatatcacgagttaatgacactgacatgcatctttagtagcattaaaatatcaaatttaataataaacatacagcgatacaaaactgagtcacacacacacaataagagccagtctatatgaattaaattaaattaattaattgattacctatctatgcatctggtgatgtttgtgatcgactccttcatcattctctgttcaatatttctccaagtcatcaaaattctcgccgtcaaatcaaatcataaatctctgcttctccaatttgttgagaaacatcacattccgtgtttgatcatcggacaatgaaataaacccactcaaaaagacagaatcaaactcctttttgttctctttctcttaaacccattaaccattttcgtatctgctaccaacttcctgtaatttttctcgggaaaaacaaaaaaacataaaacccaaatctttaagcgattttttcatggcgtttctggtgagtttacttgtttatgttgttcttttgacttaatttatctccttcaaataagacaaagattcgatttttatgttttgggttcttcccaaagctctgttttttgtactattagatatagaaaggggaaaaaaatcaaaactttttcgttttgatcagatctttagtttctgtagtgagtagattactgttgatccttggtggttatttgatcccatcatcaaaagtttgtctttttgattacaatctgttactttttgtagatggaggtcgatgaagaagaagagatatgatttagtcgttcttcaaattgagaatcttggggtggttgttttttattggtagtcatgattattaccacacacaaaagagatataaacttgttggtgcttcaattaggagcagctcttgctgtatcttttgctggatttctctttgcccgatttagaaagaatacaaaaagaattggacctactttgcctcctcttccacctcactcttctggtttgtgtttctgtcttattgctttttgtatagaagattttaattgatttatgcagtccctgagtctaatgagtaaagagggttttgtcaatttcagataatggatacagagactattccaacaaatccattgatgtaagttaacatctctcagtctcatgaacagtgtgtggtagaagttgctatttttagccttgacttatgatctgtagattgttgctataatggtgatcagtaatgtttgaagttactgtagatttgagaattgagaccattttaatggaattttgatcagattctgttttctgttttctttggtagagacgagatgagggcacggagaagacggatgaagagactttaattggtgtttcgccacgaagggaatgtgatcttgatgaaaaagatgtgtttcttttaccggagtttgaagaggaagctaaaaagttagatttgttggtttgtgatgactgtgaaacaccgaggtcagatataactgctcctttagcatttcctagcgaagaggaagctgatcatgagaatgagattaaccggttgagaaacacggtgagagcgctccgtgagagagagaggtgtcttgaggataagttgttagaatactacagccttaaggagcagcaaaagattgcaatggaactgagaagtagattgaagctaaaccagatggagactaaagttttcaattttaagatcaagaagttgcaagcagagaacgaaaaacttaaggctgaatgttttgagcattctaaagttttgttggagctggatatggctaagtctcaggttcaagtgcttaagaagaaactgaacatcaatactcaacaacacgtagcgcagatcttgtcgcttaaacaacgagtggcgaggctgcaagaagaagaaatcaaggctgtgttacctgatcttgaagctgataagatgatgcagaggttaagggatttggaaagtgagatcaacgagcttacggatactaacacgagattacagtttgagaattttgagctttctgagaagctggagtctgttcaaatcatagcaaattcaaaactggaggaaccagaggaggtataacctcaaatttttggacttcctacaaaatattgaatgctgatttcaaaacgtttgtttgttacagattgagacattacgcgaagattgtaaccgattgaggagtgaaaatgaagagttaaagaaggatgtcgagcagcttcaaggggatcgatgtactgacctcgagcagctcgtttatctcagatggataaatgcttgcttaagatatgagctaaggacttaccagcctcctgctggtaaaactgttgctagggatcttagtactactctaagtcctacttcagaggagaaagcaaagcaactgatcctcgaatacgcacatagcgaagataacactgattatgatcgatggtcatcttcgcaggaagagtcatcaatgatcactgactcaatgtttttagatgattcttctgttgacactttgtttgcaactaaaacaaaaaagacaggaaagaagaagctgatgcataagttaatgaagatcttacatggtaaagatactaaagacagcaagaagagagctggttcatcggaaccgagcagctcaaacactggtgttcattcaactcctaggcagcttagatcaacacattcaatggacttccaaatgttgatgcgtggcaaagacgaggaagaagacttcaagaatcacattgtgatgctgcgtcgtaagagtgaagcagcaggttcttccacttatggagaagaacactgtttggaaacagatcaaaacgggaagaaagagctgattaaattagcagatgcgcttacgaaatctcgttctacaaagaaactgcataagaaatctgtgtccttctttttctgaaagtaagtagaaacactaacttacttgttactgtaacacgcatcgcctaaagctacatgtatgtgtatatagatatagcttaaagtttgtaaatttgtgaatcaaaacataagaaaagagtggagagaatctgatatgaagcttgagagaaatgagtaacgcttggtgaggagcattgaaacttaatttatgacatgttattgtagatgtcgaaagacactcgcgtttatccaaacataggagacatgatacattacagagttgaacagagtttgggaagatattgtttgaggagatatgaaaaatgattagttggtaatgggtaggacatggacaccaatttgatgaagcatgttgttggctttccatgaaaccctaccattttatgaccttccttgtggagtacgaaatttgaaatcatatcgagtccaaaggctttagaggttcgtttgttggtcttgaagttaagcataagtaaaactttaacttcacttccatcaactttatcataactaccctccagtgatatcaagtattcactcggatactccatctcgaactgccaaaacaagtaaaaacaacttgatcacttcaaaaaataattggctaatgtttaggttaatacctacattaacgtataacagttacttgaatcggaacaacaatagttagtatctactcaacgagaaaaaatcaaagataacagtataaaacaaacgaatggtttattaaatagtttacatctaaatattagcgtacaattgtaacagtttcttctggagcaaaattagcaacaaatatgtagtgtatgctaaaatttaagttatcgaataaatgttatttattgatcaaatccacccaaaaagacatggttattagaaagttgaattcatgtgttctgaatcagagttagcatctactaatgtggttatgttaatacgtaaattaacgaataacagttccttgaatcggaacaaaaatagttagcatcaatccgaaagagaaattcaaaaagaacattattaaaaaataaatggtttattaaaatggttagcatctaaatgttagtgaacaacggtaatagcttcttcgggaacagggttagcaagaaatatttagtatatgctaatatttaactgaacgtataacatatgttggatcaaaacaaaaaaaaaaacaaaaaatattatgttgccgtctgacacaatataggggcacaaaggttattatactcagcagataacagttgaaaattcgaagacttaattttggagtcttccgagtatagacaatgataataccctttttttttgtcacaagtgtgttttatttagtataaaaaaaaataacatgactatattttacaaacattaaaacaagtaaacctaacaaaacaaaacaaaaccaaataaaaaaaactctaaactataggaaaagctaacacaacatattagacacgtggtaagccggaaacatgttagttgacatgtgcaaagttgaagatgtgggagtattagttgatcggaaagcttcaatttcggccaagatcgccggaaaattattcaatccacttatctcaatcttcgctcaaagaaacaaaacgaaattctattttagctttgatgagattatgactccacaaactaaatttgaaaatcttcttcatcttctttttcaatcaagcacttttcaatcttcaaagaaattatcaaatataggtttcctttcattcaaccctgatcttaggcaaagaagatgagcctaaaaccatgatgctgatatagactgcacaatttattcatgagaaagacaagaagcggcaacaaatagccgtaacatgagccggaccacaccggaaacagagccagaccacaccaaaaacaaagtcggttctaatcgggacaacgaaagccgataagcataccgaatggtggaacaaggattgagttttctctctcttaataatcctagagagagagagctcatcctttgtgaccaggctagtccaaacacttacaccaagagagacttgaaattctatttcttttttggatatcattctctcaatattgaatactacaacaatgttatttcatggttggatattgctatctcatataaaacgtggatcaaaccacaattttgtttagggtattgtgaaaacatgtattttctctaatgtttatagaaatgagtattttatctctctaaaagactaatttttcattccttcttctttttttaagaatttgtttacaaatgacggcgatgattgagctcgtgcaatgacaaaaattttgaagactgtgagaagcaagggcagtgactcatgaatcatgtcttgtgatgaaaaagacggcaagatcttgacttccgattagcgttggcggcgatggtgactcatgaatcatgtcttgtgatgaaaaagacggcaagatcttgacttccgattagcgttggcggcgatggtgaatttcagcgatgatggtgaattaagcgtgagaagcaagggtggtagtttgggtctccagatcctctgctagcatcgtcgtccaaacatcgcgaacaaatttggtttagaattactcttccaaatcctctgttattagttggtgacgacgatgatgaatttcgacaataatgaacaaatttgatttaaaattagtgatgaattagagattaattgattcgagcagtgtctaagattagatcaaaggattttttagatagtatccttagggtttggatttcttccattgaaaataatttatgagaatattacacgtagaggcaatatttcaaaactttggccacaatagaacactttaaaactattagtcactttaactcagtataattatccctttaccctgaaatcgttggtttaataaaacataacaaatttagccggttttctctcatccggttccggttgaatcacgtattatcagttactgtctgggttaaatcttcatttaccaacacgatcgtaaaaaaacggttacccagtaaaaaccctaatttactgtatctccacatcgccactgctcccaatccggcgactgctccgaatccggcgactcctccgtcgctgtccatcaatccaccactcaggcgagtttatactcgctgaataaaaaccaaatagtaatttcccccaaatctctgcaataatcgaattcgatttcgatttattgttctcgtaagccagattcattagcattccagttgattctcactgatcggaatactcaatggaaggtacaaatcgtttccaatcatcttattttggtccaattaactcagaagaagaaatcctcttctcactgaatgtttctgcaattttttttttgaatcaaaaaatgtttctcaattgtttgtagctaagcacagacgtttgtggttttagtagtttgtacaaatacttgttaatctaattgttatctcttgaactggtttcttgccaatgaacagggtcgacatctcaggaaccatcttctcagtgggattcaaaccttccaaatagactcttcgccaccgatcattatccgaggggaaggctgaacgtatactctagaccggatattctatcctttatcaagaaggtttttgatgggacagaggaattagattttatacttcagtcttgctttggtcctttattccatttgccagttagtagggttgcgacttcgggtaaggtcattcatgccttgttatgtagacagttgcttactaagaaaaagtatgagttttggacagtttttggtggacacccaatgagattttcactactagaatttgcttccgtgactggcttaccttgtggggagtttcctgacgagtatgaccctgaagattctccggtttatgatgatggcaagaagagctactggaatgagttaattggtccagacaagacggttacattaggggatatatctgccatgctaaccaagaaacgcagtaaactgtcttctgaccacaaactgaagctcgctttcctactcattgtagatggtgtcctcatagcatctaaccaaaccggtaggcctacatttaaatatgtagagatgttggcagatttagagaaattcctttcgtttccttggggtagagagtcgtttatgaagacgattgaagcgatgacacccgagaaacggattctcgctaagagcaccggtaaaagacagctcacaaacgatcctattcagaatttggtgaagcaactccagcagatcacattccgtcttaaaggtttcccgcatgccctgcagctcttagcttttcgaaacatacctggaatggtggatttaatgaagtttgatgacacctccttgacaatccttcattggaagaatttaactcatccaacacaactaattactcttcctcagattcactctttagaaagcaaccttaaggtttttttctaacccaaaagtttttatatggtctctataatattctctttctatatatccagtcttctttactaataataacattctatttttcaacagagacctgtggatccgcttataggtgaagatattaatgttgaccaaagttgggcagagtggaatgacgaggtgaaagacaggaaagtttcttacatgaatggtttgatactgacagctcatcaattcaaaaaaagtgattggccaggaggtgatgctacattgccatcaattaaaattccaaaggagaagtcttctgttgttcacaaaaagcatattgtggatcgtaagaagagactacgggtgaagtctgaccctcccaaatccaagcatagttattcaactcgttttaatcaagttgtaaggctatctgatgatgagaagtctaggttgatcgttgatctacaaaacatggtggaagagctatcaaatcgtgtaatgaagcttgaaaagaaaagaaaaactgtcaccttcaagcggtccagaaatttggctttcggttttgttccattatcttctagatcaaagcgcaagaagtcatcggaggtacctactcaatctcaagcctctgaggtaatcaagatttcaaacagtttataatatttgaaccttatcatctacttatacatttttcaagttttaacgcataacaaaacttttattttcctcatagaatccatctcattcacacacgctgtctgatgaacagaatgaggattttgatattgaggtctgctgttttaaccttatgtgtttaatgtttattctgttaccacatctatatgtacttaatcaatttttatcaatcttgctagcatcaatctgagcaaaaggatgattcatgggatgtttctcctcctctttctcacccttctacgatagtccaagatgatgaattcaagaagtttcaagatgaatccattgatagaacaactttgacaaacacggttagtgtaatatttaatttccaatatctctttggtagaattgtttacgtcaaaatattttgtttcaggtgattactgatgaccccatggatgtcaatcatactccacatgaatcacaggattctgaaaaggatgatgcaatagaggacaatccaatttatgacactggtgcaaaagatccaaatgacaatgaaccagatgatgagggaaaaatccaggtacttttataaatacaaacacaacacatcatacactttatttaacagtttataggatctgacacatttgactattctactttacaatcagtttgattcaagtgcaaacgtaagcaacaaaaaacaatcacctctcgaggaacacaatattatggaggtaagttaatacatcatttggtgcaacacatcggaaatggttggtgcatcacagaccgtaaacataataattgcacatctgcttagttattatggacaggattttgtggatacttacgagtgtacttcaacattcaggtcaatttggaggcgggtgaagcatctcaatcagtggtggagccgcaacccgatgaccctatggaggtatacattttcaactagttccttgatttattggacaccagtgagggatgcttcatcactcagtccttgtccaaaaaaacatttacaagccaattctccagactgtaattctccacagggcaatgcagcatctcagtgcattctaaaagatccaaatggccatgaagcagatgatgagggaaatatccaggtacaaaaatacaaacacaacacatcaaacactttattttacaggttatagattctcacaaaattgactactgtactttacaatcagtttgactcaagtgcaaacctaagccaaaaagaacaatctgttttctctaacaaacaaattaagacctctgttttctctaagtgcacttagatagtacagaaggccaacctcgcttgtaaccaaaactggaggagtcttctcctttgttgtgaacatatccttatccggtgcagcataactcaacaaaggatttacaccattaattccgaactctttcgaaatcgctgacttaaacgctcccagtgtcattccctcagaaattggaacaaccctagaaaacagtttgttacagatctccagtttccactctccattcgacgaacaaacccaatctccacaaattaccatacaaaactcatccatcaatccctaaccaaaacaaaacagagcattcacgttaattacctaatagtgtaattgagtatcgtaaacgtgttacgatttttaaggatattttttcattgtaccttcgtcgacatcgaaataatgactgcattacaaccgtctgtaatcgtcaagtaactcctttctttgtgtgaagatctcaaccgtctctttatgcactgagtggatacgttttttttagataccgctacaaacctaagcaagataaccggttaactaattgattgatcatattggacactcaacaatacacaagtatgaaacactcatcaattttacatgctttttttggatttattggacattatattgtggacataatattgtggatatatagaacacaatcagtataatggtggatatatagaacacaatcagtataatggaaagttaaaaatcagcaaacaaaaaataaatcaaaccaaaacacataaaacattgtgggaaaaattttgaataatcaaataaaatcttcaattcattttttgcatgtatacactcacagaggtgcaagtagagctgaacattttgggagaagcatcaatatgatagaagaccaaattattaggaatcctcttttccctacaacaaaaacagatacatcactaaccaatataaatcatggttttcttttttatattttttgggtttgtctaaaaaaagtccaagaaggaactaaggtcaaaaacatgaaagatataatttacatccctttacatcaaacataatcaatataacagtttaaacattcgacgatactggacaattatcagtgaacaaatatgataaaatagttggacatacagaagtggacattaatattttgcagtttatcttttattggacttgatatgttggatactagtttttttgccgaaacaatttcttaaattttttccatacgagtttcttgtttaatggtgctcaagtcaaaccccagcatggactctactgaggttgatacgatttatcatattttatgaacgcaactggaatgttctagcccattatgatttagatgctttatgtacatagttatctttatatttttcctgcaaacgatgcataacgcattagaaatggcaacaatcacctttttcatggtaaagcaaccaagaaaattatctgaaacaattgttttatcagctatgtcaagttatcaacaaaaaacaagggattcatttcatgtttcagtgggtaaagcaaccaggaaaattacctgaaacaattctttaatcaactcatgtgattaaataaagccgactaaagtctgggtgttggaaggaaacaacaatttcgagcaacaaaatatctctaccctccactctagttattctaaacctttcagataactacaacttccatcatattaagattttcaaagtctgtaaaaaaatggctattatgcggcgttggatgagagcgaatatattgtccattgatgcaacgactaaagaattatcatcggataagatctctaaagctgcaaacaacatcatgaaggtttgagatagtgtttttctgttgcaggttaattcgaatgtttcattttaagtgttcaaaccttaattgagatagtgttttggcataaaaaatggctattgcaggccgatactaattcagggggagattcctaatcgacgcaaataagcctctccaccaaatctctcttactctctgtcacactctttatcactctctgctatcgtagatcggagaatctcctctgagagctctaatctctcagtaatcttcaccgcgtgtccggatctaattttcctaattttccccgaagaatctaattttcctaattttccattatgtggaggagaatcgtttcatcgcatcttaaatccatctccgccgtcaggtcctgcgcggctccgtcagatttgattttcgatatagcctttagctatcagtgttacaatcaattatcactgtgagaattaacaaccatcgacatcgatattgtgagataatttcactcggcgaaggtaacttccttttctcatatgtaaatatcaactgtcgatttattagaagggaaccaaatcaaaacaaaacatttctaaccggttaagtaaatttttggtttagatgagtggggatataattgtccatttatttttcaaaaacaaggaaaagtgccttgtacgtgagaagtgcctcaaaaggaataaaagtttgtagaagtgcctaaacatgtccaattcccataatttattttgattgattgggttaattggagaagacgtgttggttagagagaattggttaaaagtgttggggttgacaaatatgacgtcaataaaacaagtacagcggtgagaagtgaggattgaggattttaggttgctcgaaacttttgtcgattgtgttattaaaacgagggacaaaaccgtcttatcccttgccaatatatgcccatttccattagttcattcttttttttttttttttttttccagaaactcattttaaaagttcctcttctctaattattgagagaaaatgtctctattcttacataagtccctataaaacgtaaatacttttattgtaaatcaaaatactattaaattatgttatgtaatatatctattttgtatatataattatatcactatcttaaatctgtaatatacaagatataaatatgatatatatttatgttatctccaaaaaataaggattacatatttatttttatatatcctttatcctataaagcacaagtcacctaaccaatcaaagtttccacataaatttctttttttaatatttaaattcaataaagataattctaaaatgaaaatgaaatcaagattgtgcaagtgaaaaaaaaactgataattaacaaaacaaaaaaaaactgctcaaaactcttcttttttgggcatcataattaattggacaaaatacataatttttattcttaattcactgacgaaaaatatctcaaaaaaaaaaaaactgtaccatttcctaaatccctaaatttgctcacactaactcaaactgagatcatggtacaatatataactgattcatcttctatttaagtccaatttaattcaacttcttctctattttatttcctttgtattcctctcaatctccatcgtttattttgtggtagcaatctcaattcttcaaaaaagaatcgaagagcagagctcttatatcctgaacatgggattttcatcccaaaaataaacctgatatatttcttagcatccaagttattcgtggatggaaaggtacaccaacattttgtcttaaaagagattttcatgtttatttctgtttcacaaatgctggattgtttacatctctgtgtgtttacaacatgtttattaagcttcaaagcacattgtaacttcttctttttttaatcttattaaaacaggtaaaactaaacattgcataatctgtattgtggacatgaagatggaatccaagcatcgcttcctccgtccaatcctgaatttttcttttcttatttgttgagtaagtttgaatttacaaattttcatatgtttatttgattatcttaaataaatatctttacattatatacttatcttaatgtttttacaattttgtattaattttataatgtttagtggacattgaggaagcaagttgaagaagatcaatgaacgaggagagtctgaaaccatgtgttgctcatatgtttattaaaggtcatatagctcgacctttgtccattcagaatttcatatgtttacaaacacacaaaaaaaaattgcatttttgttgtaaattatttgttgcacaaaattaatgtggtctaagtgtttttcatatttttgttgagtgtttgtaaatttataaatgggatactgcatattagaaaatgagttactttacctttaaccaattaatattgggacatgtatcaagatattaatcaattcacaaataatttgtagtttttaaccatatttttttaattaactttataaattttcaatttagaaattttaaagattatctatagacagaaaaatagttaggacttttagatagaatacaaatccacttctatatttcaaaccctttaaaaataaaaattttccatgatatgtctatgggttctctgacaatctcaatattagaaaatatatatttcagtggaaattatgcatcctaatgttttaagaaatctgattaatgattatcaataacaacaaaataaaataacatttcaaagtagtttgtttttttcccgtactagtttttacataaatcaaaaaataatcgatgtttaattatatatgcatgcatacccccatattcccacaccaattattttctcataaatatgaaccaacaataataattcaatagattcaaatcttctaaattaatatttcgaactttacaatttttaacaataattaaccaactatgcataaaatgctagaatagaaagtctttttttttttggtcaatcaagctagacagtcattctttaggaatcctaaaacataaatctgtaacgaacggcatagagtattaaactttcaaacctaatataaaaatggcttgttgcccaagacaaaaaacataattgctctttattatgtgaaaagttgaaatcggattgatacaacattaccttacgtacacaataatattgcataattgaaaaaccttattacacattaatattgcataattgaaaaagacattatagcataatcaaacttggtttaaggatatatatggtaactaggcaatagccgtgacatggactccaatctgatgaagcaaggtactagcttttccgtggaacccaacgatcttgtgcccatctttctcaagtataaagctgaacgcagattcgagtccaaatggtggagagttacgtttgttggtcttgaacctaagcatggttataactccagtttcagatccaattactttatcgtgacaaccttccacagctgtaatgtactcactcggatagtccagttcaaactgtgtagtagatgaaaactaaatgttaggaatttcacatttgagaaatgcaagagatcatgcttaatataaaagatgtaaatataatatccattcattttcaattggttttttgagataaaatgttagggtaaagagaaactgaactcttcgtatccgagcaatgtttcctttccatgtctttctgccagaatcacctcactagtgtaagtctcgtactcaaatttgactgcagcaatcccaacatcgccttgtcctacatatatcttcttcacatttttgaaagcaccatcgtcccaagaatctccaccgtcaccaccttggccttggagtttctctggaggaggaggagaaggtggaagtggagcgtaatacaccccgataccatcaatacaagagcctacccgtccatggaacccaacaatagcatcaccttgtctctccagcttgaatttgctaccagtcacttttccaatcgctggagaggctcttccttttgatgttttgaaagttaacgatgtaagaacaacacaattgtaaggttgggtatgagcgtaggttccctccacagatgtgatatattcatatggatgattgaccgtaaactgcaacaataatagtacaataattatcacaaaatcaaattagtaaatttggataccaacaacatttagatgttaattatattgaagaaaaacagaaaaaaataatacatttagatgttaaatctaagtatgtactcaaaaagtagaactaattaaactttgattcccgtccatgatagttggaaacactcatatatagtagataaatttttaatatcaattaaagatgaggaattattatgacaacctcatgttgtgttccggtcttcgccccgcgctcacgagtttccacttgaccggctttgtcatagtcgaaccttacatgcctaattgcagagccatcagttgtaacgtacacttttcttatgccgtcgtagtcaccaccatcatcaaaaccttttcctgtggttttagcaccttcgattgctgattggattgaaggaatcttgataaaatatgctccaagagagttgagatacttgtcagcaaatccatgaaacccaataatcttgctcctgctagcgctaagtgtaaacctagcaccctcattgtatccgattggatcataagtcttcttgttagttatgaactgaagacattgtatcacaccggtagatgcgttgtagtaaccctcaatagataacaaatattctttttccaaattgttgatctcaaactgtgtaaaaacaatataagaagtaataaaattatgagattataaccccaaaaaaatcgaataaaagaatataaattttgtatatttcccaaacacaattcttaccgtctctgtgaaaccacgaccagaagcaccatggattggtccaataacctttttcccagccttgacatactcaaacttgatgaactgaataccttcaagaccacctcgtacatatatctttgttacatcatgatagtcagatccatcatcccactggatccctacctttccacctttagcttccaccttgagggccatcacttacggttacgaatctgccatatataaattcatttttattacttaaggaaaaaacgcaaaatcattttgcatacacaaattaaagcaagagtaatgaaacactcacttcttgaagaaaactaagttttttgttaacaacatatattacgtgggttgacgtagtgttgaaagcttgaatctaagctaagtggtaacccaatctaaatattaatattaaccactaagctacatattttaatcaaactaattaactaagcatatttaagtactgcataactattataatatgtatatatttttacattcaaagtgtttcgatgctatatactttccaaattataagaagatagaacctcttatagtggattttagagagcgataaggagagctgaagaacaatgctgagtgatgtgcaggtactagtgaaggtgcctttttatacacagtttcattgttagaaatgattttttaaatatgaatcgtgatccacgagagaccaatattatataaagttttaatgttcttactgtctggataaggtttttgaatttatatcatccgtggtccaacgagactatataataatcttaattaagttaccatcttcttatttgctcgtgtgtcgtgagggaggccatacaatttaaacttccaacatctaaacatgtttatagtcttaccgtaacgtggaacaatagtacatcgtaacgtggaacaacatcgtaacgtggtgaacgtacgatctaacattattatttaacaacaggttttggcaaataaatctgtaacttatttaaaaagaatgtcattcgcattaattattatcaattaattaatatttataattattaatatttctttatttaatatatttatatcaattctaactatttttagaaaagaaagtcttaaaattttattaatattatattttattaaaaataaatattataattatctaaaatttataaaatatttagaatatttgacgaaaaacgtttagaatatatataatatataaaatttataaaattaaataactattttaaaaagaaaaattaaattgatttgaattataaatcttttaataaaaatattattagaaccataaaaaaaaaaaaaaaaaaaatctagattgcaactaaataatttaaatttaagttaactaagttcactacataatctttaggattttcatagagatggttaatagtagtatgaaagttgttttactaattagttgttggaaactcacgtcgacaaattgccaaaaaattcctggcatgtagtaacctaacaacaattaccgacgcatttgttatcagtactctaccaacaaattgttgatgaaattgtgttaccgacgattatataccaaaaaaatgaacttcataaaaaacaaatttagcttatatccttttttcgtggaatcttcaaaatggttcttgcttttggaaacaacttattgaaaacagatatataagtcacaatgagcttcactccaactccatacactttcttagaacatgaattattcaaaagttcaaacaaagaaaaaagaaacaaaatcaaaacagagggaaaaaaagaaagaggagaaacgaatcaaagttaatgaaaacataggaggagaatgtttcgttctaagtcatataaacatgatcaagggtgggtgatggggagtacgtggatcccaagttgatgaagcattttacttgatttcccatggaatccaacgatcttgtgacctctcttttggagcacaaagcttgggttatcatcgagtccataacatggagaggctcgcatgttggtcgtaaacatgagcatgattataacttcagtttcctcacttccaggtactatgtcataactaccttccactaatgtgaggtattcacccggataatccagctcgaactacaaataaaaattagaaaatcaagtataataatatcaagctcaattatataactaagttagggtacgtaattgaacaattaattaagaaaagtgaagtagtaatcacctcttcatgtttaatcaggttcttgttcccatgatgatctcccactactatctcgtgagtgtcattttcatacagaaacttgacagaaacgataccaatctcacctgtcccaatgcatatctttctaacaccttcgaaattaccgccatcgtcccacgaagctcctccatcaccaccttgtgcttctagcttttccgaagcaggagaaagaggcatcggaaaagaatatgcaccaagagccgtaagataactaggagtccaccatccatgaaatccgacaatagcacaatctttgttctcaaggacaaattcaactaaattagcagttctgtctccaaatctttgagaggttctcccttttgatgttttaaaagtcaatgatgctaccctatcagtactcatggtcccgaccacagacgtgataaattcatttggatagtcaaccacaaactgcaataaaaggagcttcagataagctatccaacaatatatgtatatatatggtcgagggatgtattttattttattttctgttaaacaacgaatatatagttataggaattctgacctctacttcttctccagggtaaccatcttgcattccgtggtcacgcttttctactttgccatcgttgtcataggttataccgaggcacgttatataaccaccaatctcgaaaacggaaagctttctaacagcctggaaagcaccatgatcccaaagtgtgcctagagcagtaccttgccatgccaattttgtaggagtaatcggagtgaaatatgcaccaagagaccttagattcttcccagcgtatccatgaaacccaacaatcttcatttcactggctgcaagtctaaacttcttacccgtgttggatcccattagttcagaggtcttgatattagtcttgaatcgaagtgcctgaatgactccagattcgtcatgatcattgtagtaaccctcaactgacaccagatattccttgtaaacatgttagatctcaaactaaaaaaaatacaattaacgtaaaatattattataagaaactttcacataagtggatgaaaaaagaattactctcatagtttgtcaaagtgagatatggttttcactgtttgtttttttaatcgttttcggaccaaaatacccttattcggtgcaaccaaaccacacagcagttggattcggtttagtttctgcggttcagttttgaaaaaaaaacatatttctaactaatattattccatgacatgaatacataccaagtgtatggaaccttttcctgagatagaaccatggattggcccatctttcagatgtccatacttgtcaacatacagaaacttgatgtactgaatgcctttcggaccacttcgtacgtgtatctttgtaaaacccgcatggtcgactccatcatcccacttcgtgcctactttgcccccaatcgcttctattcttgtaggagtaatccaagtaaaatatgctccaagagagtacaccctcctcccctcaaaagataatccgtgaaacccaatgatttttttcccctctattgctagtataaatttagtacacccgtcatgatatcccatcggttcagaaatccttaagttggttttaaattgaagtgcttggatcccagtgtcatctgtgtagtatccctcaacagattcaagatgttcatgttttagatggtttatctcaaactgcaaaaatttggtgaaaaaatgacaacaagaattcgagtaaagtatttgaaaaacaaaatgtaatctcttctaaattcgtataccgtctgcgtgtaagtattatccgattggccatggagggatccatcaatgggtttcccactattgatatagctgaaccgaatggactgtatgcctttaggagaatattgtacatatatctttgtcacatcatcattgtcagatttatcatcccacatatataagcctttctgcttgctcccttccgcttccaatcattcggtcatctcgaacagattagaatcttcacatatggatgggaattgtgtttcttagtcagtaattagcatatataggtttgggattttaattaaaaagggaaaaagtttatataccttttctagcagaggatcaacacaagttatttattgaaggaagaagatcaagattcttgttgaaaaggaagcagatgcaactataatctaatactaagtaacctttggtgatcttggatgctcattacgttggcaatataattcagataagatatagagctctgaaacattgatgtaaagaaatgtaccttagagagaaaacgttgacctatgatggtagaggaaagagagacatccgactgaactatggcggatctatatggaaaggattaaatgggtcttatttttcttgccgtctagatttatgattttatacaaattatgaaaactgttacataaacgattttcctacggacaattccttccgatctttattagatccacgacagacgacatctcattcttcttcttcatacgcttgatagacatcttcaatattttctttgcgtagaatcctggcgaacgactataattgtacatcgttgtagatctcctgcacacttgcctctattaatctgcaaatctgctaataaaacgcagtagttggaactcgaaccccagaccttttagtgtagaagcattaatgaactcttggtcaaacattaagcaaagggacttctacaaatgggcctttatttatacacaaattttagtcttttttacaatattatttggatgagattaaaaaatcacaaatggcgaaattataattcaccatattttcttattggttgaatagtttttaattatataagaaatgatgttttaaattcttttttacaacgcctcttttccaaatgatacaaaccaaaaataaaattcacaaaaaaacaatccaaaatttctttcgatgtttatggcggtgcctagggtgatttgacctagcgtatggtatacgacataagagaattatttttatcaaatttattttaaaatctttataaaaaattccaaacaccttttaaaaaatttagaaccgggtaacaaaaataagacattttaaaatatttataaaacctttaaaatcttcttaagaccttttaaaacaataccttttatataatgtgtaaaacaagaagaattgagttttataatcacttttatgaaacatttaaaaatattttaaaaccttgtaaaagcattagaatttggtagatttcacgttttcatctttttaagaatctcaacgtcgagtggacattttggatttctagaatcttatcatggattgagttgagggagacaaacaaaacgcagattctcttcaataatcagccaaagttcaagttctaaattaaagcaagtaaacacaagcttttgagtttaattcgttatataaaaacaaaaacggaagcaatagagaagaagagatgaaactgttgaaagaattgcatcatcactttcacatgcggtaactcttagtcaaagcagtgttttttgttgaatatttaagtagtgtttattgttgaaaataagaagtggtggttgctcatttagtcaacaaaagtaggctgcgaactctctataaattgagaggaattaaacgagagcaattatcccataacatacaatacaagagagagaagttgcaatatcatgcaacgtagaaatagagtgtgaggtttgagaaaaataaagagtggtgtgagatttgagtgtatttgttattaagttataaactttgtattgtgagtgatttacaaataaatattagagtgttttcttattttggtttatatatttgtggttaatttattaattgtgtatttacaatataccaattataattcaacccaatatttaaccaactattctctacagaaactcgggattatttccatttctccttttgaacaagaaaaacagcgtatttaattcaatagattaaacatggaaaattgttttctggaatagaactgaaaactggtcatcatttttgtataattaaaatgatttggggtaaatataaaaattgctgttttaaaagattaaatgaagtcgtacacaaaaaaaaaacaatacaaagccgtcccgcgattattgttttcgggattgtaaattcgactcaatagctaccattgaatcattttacaagactcctacttcggtggtcattaatatattataatgtcattttgtaagattaaataagtctgctttaaaatactaataaattcttattttaaaagactacacgaagtcgtgataaaaaaaacaaaaaaaacaaaaaaagcttacaaagtcttccccgcgaatatcgtttacaggatggtaaattcgattcacgaatcaaaaagatagacattttgcaaataatggaagtatggaaccctacttgcattgtattaagtttgttttattttgtcaacccttgcatttatttccttggctttgttaaagattataatgaaatataaatacaaatttcctgcatatatatagatgaccttgctggaggagatattgtaatagaaggaacagagactgctatcttgttttgtaagttgagggtaggacgtgcctctttatatatatagattagaaaaacaattgatacctatttgaaatataaaagaataggaaaaaagaatacatggttaaacattgtattttcagctatatgtattatatgacaacatatatgaacggtagattgtcctgtagttaacactataaacatacaattttggtatactgattaattgactcgggcgttgactaatattgaccaacgttgaccaacaaaaatattcaaaattttatttatttactttaatatttaaaaagttttatttgatgtattataatcaaaaaacatattttatattcaatacaaatatatttttatatatttgtatgcattaaatcttataagaactatttttttcaatttaaaactaaactaaaaatagaataaaaatcattatctatattattaattgggaagcattgtgtgaactacaacattgtaaaggtagtttaagactaactaaatgaatttttgcatgtgtaatttagtaacttaacaactactacaactaaataaatatcttggattttgtttttattttttaaaacgaattaaatcaataaaattaataactacccaatattttcggaaatcatttaaaaacatttctataacatatcaggctattttaattcgaattatatatatgtaaaattatttattttggtaatatattattagatgattcagaaacttcagtctaaattaataacaaattatcatttagtttggattttaaatcatttccttaacaaaactatgttaattgtttctaattagtacacataaaaacgattttaaattacgatttagcatattcaaaagataatttttggattttagttttgtaaatatctagaaaaaaaatttcagtatagattaaaatatttaacattttaattagaatttaaatgatataaacctttaaagtattttttaaacaggtaattttcattatttcaaaaatatataagctaaactgaattatataaaagaaaaaatatttttaaacgtattataatagttacaagcttttggaatattcattcttctaaattcgattatttcttttttttttaaacagtaaaacaaaatttaaatactaatattttaatgcaaatattcaaaatgagaaaatattgattcacaccaatattcttatttttttctttcaaatttgaatgactttttttggaacaaacagtaatatgattttttgacagatcattaattgtattcgaaatataataaataagtttgagtacaatctatctcttataaatgttatgcatatattcacattgcctcagaatcaatctataatatcgattctttaaaataatagatagatattcataagtaaattacttcatgttaccagaaactagaaactagcggggtgttgttcaatattataccacatataaaatcatggaattaacaatcaaaatatagttatacaatcttaaacaataaacaaaacaaatataacttaatttaatttttttatttttaactataatcaacaaatatatcagtttattaaaaaataaaaaaaataacccgtggtacactacgggtaaatccctacgatttcataaggttgcagtatcaatttatatatattttgacttttaatatatacaattattttaacaattatgagaaaagaaaacgttagtatttttagattaaataagaaattatataagcaatgaacaactttttacaacttacttaataacatgatctcatttgtataaatatttaaccatataaaaccaaatactactatactttaattataagaactacatcttattgaaaggtttacaataaaaattggttttatatactacaatatcataaatttataaatcccaaattagttttaaatatattaatccaagatgtaccacatgtcaatccctcgattttttatattacaataacaatattaaaaagtaacaaaataatatttaattatatagaatgaagttatatggtaaaacgagtttagattgatattaatacaggacgataatctacgagtgaaatcttagaattaacaattataacacaattatataatcttaaatactaaacaaaataaacaatatttacaaaacaactataacttaaaattcgaattttttgttacaaaaaaatcgattaacgatgtaccgcagagtaaatttcacattatatcatctaattgatcaaatttcaaacaaaaacaactgatttatatatacatcaactaacaaaaatacacaaatttccaaatatttctataatattctgcaaattgaaacaaatacaacaatctatttactatgcaaaatacaaataagacataaataatataaattaataaaaaaaattaggtattatattataaataacattatacacttttatatgcacattataatttatacactatagtatctttaactaaaaatatattccaatacatttcttaaaatatgaaactccgcacgtatatgcgattcagaatctagttaaaatttaaatttaaaccagaaaatcttattagaatcaattaagtaagaaaatttcttactttagattgtcaataaaaaccataaattcttgtttgatttatatctatacaaatgtttatataatttaatatttttcaaccacaaaaattatttcctacaataaaaattattagaataaaacgtaatacgaatttgattttacaaacgtttttgctaaaaaatcaaaattctttgattttctatctttatatatatttaaaggaaaatttgcaagttgtttggttgtttatgtgttattatgagaacttttcttaataatattatatagttataaaagtgaaatacatgatatacaaaaaacatatttagactagagagtatgtaaaaaactataatttttttatcatgcaaactttatattaaagagtcatatagtcaatttttcatattatttcatagtgaaattcatatgtattagatttgattccaatgatttttattgtaagaaataatttgtgtggttcaaaaatgacaatgtataaaataagcaattctcttatttagttgattttaataaataaaatccgattttcattttggatagtatcttaaaaaattattaatggtttttcctacactattaatttaattttgaaattgataaaaacaaactattataataattaatgcattaaaaatatatttatattgaatataaaattttatttttgagtatataacaccaaaagaaaatattttcttttttattattaaactagtttaaatatataaatatattttttttggttggtcaacgccggagttaactcaccggtttaccggaattgtatgtttattttatcaaccacatgatgttctatagtttatatatgtggtcatgtaatacatctattttgtgtagcccaagatacaatagtatagttgacatatatgaacatgtattttcctttactttgtgtagatatcaatcttttttttagaaattattgtatatgactcctggtttgcgagtctatatgccctctagtgtagtctttgctcagtgaagggtttacataatagtagtttttgtaacataacataaccattattaaaaataaattttcaatattttgggtattcagaaccaaactgaaaatagccaaaaccaaaccgaacctaatccaatattttaaattaaacagaaccaaagtgaatctacactaaaattttgaaataaccgaatggatcctaaaactcttttacccaaaataacagaaactgaatagatctatccggaaccggatgaatacccgaacgtccagacaaatatatattgtttcatttatgcccaattatattttcaatatacgattgatgatcaaattaaaaactcagtggtcttaaccgtttctgtcacacaaaacccttttgtttcctccaaaatataatcacataattgttaaagtgaaaaattggagttaagtgttttcgtaaaaaacttttcttattaaatgatattgaaattgatgctccaaaaaacataagagcaaatacgtaagtagaatacaagattaagagatataaagagcatgataaacttattgtagaaagtttcacaaaattgttaaagtgaaaaattgaagcttaattgttttagaaaaacattggtcttattaaatgatattaagagcacacacgtaagtagaatacaggattacgatacatgtattttttttatttttttatttttatttgttttagaggattacgatacattaaagagcatgataaagcttagtggagaaagtttcatttggtctcaaacatgaagatgatcaaacatcgtcgaaaccaccgttgtcttgggaagctcctctatcaccagcttgtgtgtatggctccccggcccgcttcagcaagagaagtcatcggaaaagaatatgctcctaaagcataaagaaaaaaatccgaagatgctccatggaacccaacaagagcacaacctttgctctcgagcaagaatgttttattagatgcctttcccagtattggagaggttctattatttgatgttttgaaagtcaacgacgttataagagtgccgccagggttgtctctataagtcccctccacagaagtgagaaactcatttggatagtccactgtaaactgcgacaaaatgagattttacatataagcagtgttcaagaacacacacacgcatatatatagataaaaacatatgtgttcgaccaatattcagagttgtaggaattataacctcttcttttgtaaaatcacccgttcccctcttccccccctgcacacgggtttcgattttgccgtccttaacgtaatcgaactcgatacaccttactataccatcattatgataaaaggacaccttttttacaccttcgaaagtaccatcatcccaaatgtcacttccttcacctatgtattctaatttagttagagtaagggttgtgatataagctccaagagcgtttaggttatcctgagcagatccatgaaacccaatgatctcatggccgttgcatccaagtgtgaacttagtacccttttcatcgtctcccattacttctgaagtctttatgttggttttgagttgcagtgattgaattacaccagaatcttcgtcgtagcaaccgtcaatagatagcagatattccttgtcgctatggttaatctcaaactacaaaaataaacattgcatattgcggtagtagaaaaccaagaggcttgtcatcaaatttaaatttaagttatgcggtcatacataccggttctagcgtgtatcctctacccgtctctgagccatggagttgctccttctccggatctccatccttgtcgacataattgaatttgatatattgtatgccttccttattaatacgtacttgaatctttgttacactatcatggtcacctccatcatcccactttgttcctccatttcccccttgcgcttccattcttgtaggagtgatgggagtgaaatatgcatcaagatctttaaggcgatactcagcagatccctgaaacccaatgattttatttccatgttttgccagtttaaatttttttaaaccccaatatgaatatcctatgatttcggaaaccctcaagttggttttgaattgaattgctccaatgaactcgccacttctgttggtgtagtaaccctcaacggattctagatattcgtttttgagattgtcaatctcaaactgtgtaaaagttggtgaaaacaaaagtcaatattaattatcctcattaacataaaataataaagggatatgtcataccatctgcagaaatcctccacccgaatatccatggaatggtccatttttcggttttccagacttgacatagtcaatcttgatgaaatctatgccggttttaccacctaccaaatatatctttgtcacatcatcatggtcaaatccatcgtcccacttaggcccttcgttttggatcatctctaacgcattcgaatcttgagacatggtgttgtattgctttgcttatagctaataatttgcatcaatacccaattgtgattcattaggtagaaaaatcaaaatggggggaaaacatttcggacaaggaacagacaggctaatatattgaaggaaggagaccatttgcaaaaatacagagaaggaagatcaagcttattgggtgaaaaggggcaaattccatatattaccttataagtaaaaacaggagatagccatgctctagattgtaattacgtttacaaaagaaaaatctaggaatacaaggcttaaacattaactaaataaaagcaaatatgcataaggagagggagagagagctgacctctaatggtgaagtggaagttgaagaatagatagtactgtggtggtctttaaccctatggatggaggctatttatatacaagttttgggtcttttataaatagagaatattgggtctttttatttatttttattaatttggtctttgataaatatgtaaaatacaactaggtattttattagagaaaattgttaaatgagaagtcattctccattggtgaaagttcgaaactctaatttggactatgtcaatcatgactttttaagagatatattggtgataatttgttagtaagagaaagtctcacatcggaagttggagaaattatctagtgatatataaacatttattgtcaattggttttgagttgaatgtccatgttaaaattacattttcatggtattaaagtcacccaatcgttggaccatcatgtggatgttgttcccacatatgtctacgctttaaatgtttatgcctgagcgtgagagagggtgttattgaaagtcccatatcgaaccacctcgtgaatgttgttcccacatatgcccgcgcttcaaaaccaatgattcctgaaagtaagaaaaattaaatagtaatatataaaaggtttaaaccactccactcgttcctaattgattttgagttgaagctcatgttaaagtcctaatctgtcatagcttcaaaacaaaaaaaattagaattgatcaaattggtttagcttccatccattgccgttttttaaaacctttttagacaatttcagccactatatgttttttactgctcgttttattttgtttgtttcattttttgtactttaaattgtttgatagttgttcagcttgattgatcagaatcagatatgtgaatgttattgttgcatacccttctcttttgtattggaaacccccaatcttgagttttattttaattaactgtatgattgccaaccaaaagaacaagaataaaaaggtggaccaaaatattttttattttaatataaaattattggatttttttccggtataattttaatgaggtccaaatctaataattactataaaactcttgcttctatagtcgttaatatagtatatatatatagccaacttaaaacattgagtttgttttaaaatgtttaaaatgtttcaatcattgtcgttaatatactatatatagagccaacttaaaacattaataattaatctaaaacccatgcagtgtatatgagaaagacatcttttccatattacgttttggacatattcacaccttgtccttgtggcttgtgtatatgagagagacatcttcccatttagggtatccaatcagatttatccattgcatttaatatgaaaaatataaagagagaaaatgagggatgaagtcatgaaggtgtctatacaatcttaaatggtattacttagaatagagtctatacaattttaaatatgaaatcatattctaaacgactatatgaagtcgtcccacgctatctcaaaaattgttttttttataaaattgtcatttagacaaataggcgtgcatcatgcatgtaatggaaccgacgtccattgcatttcattaaagaaacaaaaaatatgattttaaaactggaaaagtttttaaaaaaatctaaattttaaaaatggagaaaccaacaaaaatctatcattaacttgtgatccggtgaacgtttgaatcggttaagtatgattttacaaaattcatttaattcagaataaaatatagagtttagactatattcagcaattttttaaatatatttttagtttataaacttatttaatggtttagattttgaggaaaactttacaatgccgctttttttttctcaaacacaataccgtcttaagagaataaatagaatattaagagagacaaccgagatttgttgttttgaatacgcgatatttatccgtttatttttacctactactttaatatttgttacggttttagttcttagttggatttaaaaaaattaatcaccttgttattaatattaatgtagtatgactatttttattttatatttataaaaactatataattcctataatataaattatattaagtaaattttaaacaattggtcaatggtcgaatatggtcgacccaatgatccgtgactgagaaagtagtcctggtgggattcaaaaatattgtttattttaagctatattttttgagaataatatatataccctttaggcataaaagtgggcaaactcgttatgtttatcttctatcagttaaagtacaaccaaaagagggattaaaaacatgggattttattatttcttagaaaaacatgtctcataaaatgagattgataaagacaaaccaaaacaatacatagtagagtgcaagatatataggagatcactacaagaacgtgatcaaacaccgcccaaaccaccatcaccaccttgttcttccagtgctttcccatcatgagaaggaggcatcgggaaaaaatatgctccaagaccatgaatagaattataagaagaccgtccatggaacccaacaatagcacagccttggctctcaagcttaaattctgaaagatagttaccaaacacattaccaaatgtcggagaggttctaccttttgatgttttgaaagtcaacgatttaatcatcacatttccagtactaaagctgagtccagtattaacgacagtggcaatgccctccacggacgtaataacctcatttggatagtccaggacaaactgcaacagaaaagattattatgtataagccgttattcaagaacaaggatagatagatagagacaaatatttagagttgaggaattataacccctccttcttgtactgcggcaacaattttcggcccgtgctcacgggattcgactttgccgtcgtcatcataatcgaaccgaacacaccgcacgctatatccatcataatatatatgcaccttttttactccttggaaactaccatcatcccaaaggttacctgaagcaccattcttaggaagcttttcacgaaaactatcttcgtattccaatttagttagaggaagtgttgtgaaatatgctccgagagaatataggttcttgccagcatgtccatgaaacccaatgatcttattaacagtgcatccaattgtaaacttcacagcatcatcgtcatagtagcccataagttccgaagtcttcatgttggttttgaattgcagtgcttgaatgacaccggatgcatcatcatagtaaccatcaatagacatcagatattccttgtcgagatggttaatctcaaactacaacaaaacacgtaaaaacaatacatcaacaaccatttacaaaatcttttgtggactcaaatatcttgggagatttatttttatttcctagtcacacataccggctcaagtacgtaaccctgacccgaggtaggaccatgggtttcacttttgggatgcccatccttgtcaacataatcgaatatgatgtcttttatacctttatgatcacttcgtccatgaatctttgttacagcctcatagtcacctccatcatcccattcattgcctcctttgccccctttggcttccattcttgcaggagttatccaagtaacatatgctccaagagctctgaggttaacatcagcaaaaccgtgaaacccaatgatttttttgccctccattgctagcgtaaacttgtgaccagaatattcatagcccattatttcagagatcttcaagttggttttgaattgaatcgcatacattatatcgttatagtaatcaaagtaaccctcgacagataaaagatgttcattttttcgatgatcaatctcaaactgcgaaaacattggttagagaaaagaaaaaaatggtcaaaggtatccacatgaacacgaataaagggaattttaataagcatatttccaagtcataccatctgtgtgaaacctgtgtctgaataaccatggaatgatccatctaacaattctccggccttgacatagccaaacttgataaattctatgcctttagtaccacctcgtacatatatctttgtcacatcatcatgttcggatccatcatcccacatatattcgcttgactttctctcggaacctaccgattccaacttttgggtcatatcggatagatttgtatcttgagacataaaggcatattgtgttacttagtcagtaattcgcatcaaaagcaatatgtgtttcattacgttgggaattattaaaagataaaaccattttcaaaccgatgatcaaacaagatctagagtgaagcaagaaggccatttaaacgatcaaatttcatgggtgaataaagaagccgttaccactattatctattgtttacccaaaaaaacaattatctaattagaacttagaagacaatagaactctatagttttccagactatgctctttacgtttacaatagtttatataagaatatagtgctcaaaacattgataaaagttaaagcaaatctgtatagagagagggaggagagagagctctaacctttggtgttgcaggatagagaagatgaagaacagagagtattgttgtatgttggtctctataagctgatggatgaaaggtatttatttgtatacgaatatggagagagacttttttttggttaaaaatatttgttttgggtctttaaaaaatgtaagaattaaggtctttgctaaaatataatatacgacccgagcttcgccggtaaactgactaggtctttcataattgttataattcttaagttgaagacaaaaattagaagtagtttatttgaggaagagagagagaaaaagagtttagtctcggttaaatgtgaaaatattagaataggaaattgtttccacaaaattaattgacgaagaaaaataaaatgttttggaggataagaagacgaatcaattgattttattttattttatgttgagatgaatcttcgaagtattttacatgactcccctttgatgcatgtgtctcaattggcacttttcaaattatttatgactctcaccactagttactagttagttaatgtatattagaaactagataatgcccgcctaaataggcgagtgtaagatacaaaaataaattatttaggcgggtgtaatcataagttaaatttttaatgacacatgtaaaaatccgatcgtttgacttgacacgtggcacgatcctataaattagtaactttgaaaaccatactttatataataagatataagaccatcttaatattatacattacatatgatttaaaatattaatataaaattatattattatttaaagaagtcaatgtgtattagagtcatcttaatactgtacgattagaatactatttgctttggtatattatgtttccgaatatgtccatctgtatttattttaggtttggtcgtcagatataatgttcgtttgctatatgtaaacgataaattacgtggagatgtgtatttagtcgagtgattaaatctatttgattctgctttttttattgttggagttcgattccactaaaaaagcgataaatcatataaatcatataaatcatatttagcaaaattgtattttcaaatacttctaaagttgtaatagacaaatcatataagttacacaagattagtagtctagtaggggctatatatatacattttattggtgatatgtggatttcaagggtattatcactctatatacacagaatattacaaaattaagtccaagaaaaaattactgttgagttttctctttccatcatgaaaatacctttatactcttatatcatatttgcttttgacgttaaatattttgttaccttttaataataatgttatcatcttcccataattatacaatctttgaaatcaaatcgttggttcaatagctgataatttaattatatcgtcaactgtattattaacatgttaagtaggtttgtatcctaagtcttttcatccatacatcaaaactttatccaagtatccatatttcgctaacaatattatcctgataatacgttatatgctaactattctgatgcatgtattttttctacatgattattcagtcgcaagtcaacttttttgcttttcatgctaaatattttgttacctttaaataataatgttatcgcttcgcatatatatcagtctttgaaatctaaacattggttcaataactgagaatttttttatatcgtcaaatatattattaacatattaagttggtttgtactcaatgtcatttcatccatccatcaaactctatctatatttcgctaacaatattatctcgataatgcgtttatatgctaactatcctgatttttatcatatctccttgaaagagtatatttgtcatatagattttaattaaaaatgttacctaaataaatagttttcatatataaatttttaattatttgctggtgcatttatagatttttaactcacccttgttttatttcatgttagttaatcttactataagtcgttaacttggttcaacatgttgggtaggtgaatatacctaatgggctgtgccggcccattactaatttttaatccattttctggttttgttttttttgttggaaataagttggaaacccatatgagattagaaccactcttttcatactcatattataaacattatcaaaaactattacataaaggtaactcaatataagatgattaacacaaacaataataggaagaagagtgtccttatccaataagaatctcagaaatcatttgaaagtatgtctctcacacatgttcaaccaaaccctaaaaaggccctgccagcataaaagctgctacatgagctagattatccaaataacttataacttcatcgtagtcctccaagtaacaatttaaaatgcagctctctcttaaatcattgggtattttttctattgaaatgtttcagctgtactcgaattagtatgtgtgtgtgtgtgtgtataattttcacaattctagattagttccggtcaatactaacttctgatagctcttctctattggtactctatggtctccaccatccccattttagaaaatagttttagctaatttatatcgaatatataaaaaggtataatatacataaacgattaggacagcatatataatcttcaattagcattaataataaaacgttctttctccaaaaacattttacagtgattaaaatatattgaagcagacgaagattttagaatgcattaaagcggattcaaatattggctctacaacataatgtagtttgaaatattgtgttttatgttttatttggtatagttttaaacaatttagaaaatagttttagctaatattgtgttttgtgtttctatggtctccaccatccccattttagaaaatagttttagctaatttatatcgaatatataaaaaggtataatatacataaacgattaggacagcatatataatcttcaattagcattaataataaaacgttctttctccaaaaacattttacagtgattaaaatatattgaagcagacgaagattttagaatgcattaaagcggattcaaatattggctctacaacataatgtagtttgaaatattgtgttttatgttttatttggtatagttttaaacaatttattcggttttaaacttttattttaaattaagttgtgtttgatgaatattagtgtggtttcattggctcattttatacatatattcattatttttaagagattttaaaaacttataattatgtttttttctcaaaaatatactcgtaaaaactcggaaaatcttatagtcatcttaggaccggaccgaactttatagatgatgtttttgtatcaaacacatgtataattgtatacttgtcttaatcacttttatttcccaactaaggaaagaatttcttagaaccttgatcttcattctggatttttagaatctaaaaagatgaaaaatagtgacttactacagaagtttttattgactctgtcatatataagcttttttcttggtagtggtagagttgttgttttgatacgtaattggcttattgctatgactaggaactcaaacttgtgaatatattattaagaaaattaaaagatgtaaaaggaaattaaagaaaaaaagctggaaaccaaagcacttttctctcttttgctttagggaaagagccaaacagcttgcaatgtcctctttataacttcatgtttcatttcactaaaggtgtatatcaaaatatattacaacaagaaaaaatttcttagcatgttttcagtgcgttaatgtttatttaaagtgattctgcaaatattaaactaccgtaaacttcatataatcattatacaaaaattcgggcttttgtatgagattgtaaactcgaggtggttaaaaacaaaaatatatagagatgtaataaagtaatctgcaaataagaaaatgtaaacctcttgggtctattttggggtcattacaagcaattgattaaaaccctaataagattcaagccgtacgaaatggtagatactaatgaaaggacgatacggagaataatacacatgtacctatatatgtctttatttgagacaacaaaacagatacaaaatcaaatttaaagtcatatgataaaataagaataaatttttgcatatcgttataatgattgtcacttacaaaaataaattttgaaatttttagtatgtcatcaggctattcaataaaaatattattggattcatatctgtttttattgaaatataagtatttaaattatatatagtagataaagatattacagtcatcacatttaattaataaaaaattgcttataacttcatttcaaagtgttagatagttttaaatttactacttttaagttaaagctagagagatctcttgttgaagtgtgtaacataatggatagtgggaaaaaaaagttttcattagaaaatacaattactagtttaattgcaacaaattttggtgtcgttatgaaagtttgttgattcagagattgattaattttcattaggattaactttgctttcgtcactgcaaattccacataacaatacatattttactaatagaaccgatgatatttttttattcataatatccaattgtgttaggaatcgaaaataaaaaccccccaaaatatcattacatctttggattttaatcagcacaaaacgagagaaaaaaaagaaagaaagaaaaaagggtaaaaaaatatttaaggaagaagagaaatatgacgaagatacacacaattcggattaatatttagctgaactcaatcatttttttctgctgattcaagttcttataaaacttctttataaaatcatcagctgctttgtcaacgtgtccattagccacatcaccattttccggcgttaacggaaacggtgagtccgttactcttaacggtctaaccaatggagtctgtccaaaaccggggaaataaggagacaaagccaccgttaaatctgccggcgtgacgtttcctttctctccaacgccgttaagaagctcaagaacggctctagcggcggctacgtcgtcgtcaagcgtctgaggcgtttgaccacacgtgaagagattattgtgactctttttcctcatgaaagccatattagagaaagggaatgaatagtttggagtgttgctgcagctaaactcgtactcttgtcgcgatgacgcggtggctgaagtagcgtttagagcggctgaggcggtggaaccggcgtggacacgacgacgttggtggaacatgaggttcttgccacgtttgagagtggcgttgaagtcagcgatgagtttgttttttgagacgcctttgcggatcatgtacaagagaaaacgtacgatgttccatagcttcttgcttattggtacgttttgatccatatcaagattttttagagagaaaaagagagatttgtattattttattttttttggaatttgattacttatgagctaaggagaagaaatgtgaggggtttataaaggacgaaagagagagagagagagtggtactaaaacgtgcaaagattataaaaagatttgaaagacaaagcaaaagcttatgtattactattggagcataattattgcatccatgtaactttaaaagaaaaacaaatataatgaacaaggaccaattgttgtatcttagatttcatggttttaaagaagaagaaaaaacactagctatgtaggaattattgcagcctctgattaaaattagaaataatcaagattctagggtaagtactaagtagttttcttgcaaggttttatccgatattccgatatatataatttttaataaatgagaatcgggtaaaaatatataaccattcagtgtgttcacaatgagttaccatgaatgaaattgaactaatactcgaataaattaatattgaatcgaagtgaatcgtttgcatgcatctagcaagttagtgtcaacgtccgcatgcaatatgcatgaattgttctaagaatgaaattacgatagctatacaaaatctaatatattttttaggatatttagatgtaatcaagttaggtaggcttagggattctgattcatacggtatcaaatcgacatgcctactatgtcaatatgtcattatcatacgatcattaaaacaaacatctaatcacgaatttttctgaatacgtacaaacatgtaaccactggtaagactcagataatattactcaactcaaataatggaaaagtagaaacaaaaatacaatttaaggtggaagagagctataataaactcttaaatatcaacttttttttgtactttagattgcactatgtatgatagccataatatctatatacggattttataggtcttgctttatgtgttaaataattgctgcatccttttcttaatatctttatgaggatattgagtttcaaattaaaaacaaataactctttttctattattggcacacaatattcatcctaaactaatggccgacattaatgttgtttttcctttgattgaaattgaattatttccgtgttttgaaattttcatttcgtcaagttttcatagacatggaagtatggaaccaactttatggttcactcaagcaaaaatgaatagctcaaaattatagagttagcctataaacaccataaatatcgaattcttcagaacttccaaagataagtctagattttaatatctctctggttatttttctttataagaaaaaaaattctcaaccttatcctaaacaatccaatttgtcgctgtggaaacctacaccagatagagatggtcatggttgagtgtaatgattgtcatacattttaggaaaggaaaaaagataaattgtgtgatgggcaaaatttctttgtaaagaagtcgaataaaactttagaaagctaaaatgtactaataacaagaaaagaaaaagatcatcattatcactcttaatcaaactacaaattaagcaagcatttcttgagttttgaaacaaaacactgttttacgtgttcacagcaacatcaagaacaacaacaacaacaacaacaacatgaccgttttacaatacagccaaaaggcaaaagcttagtctgaaaatacaaaatacaataaatctcacacaaaggaccaattgatgaacacaaagcagatgcaatgagcattttcttcttcattgagtactttccaagcaactgctctctcatacgaaactggtctccccatgcttgagagacatatcccgccttgaaggcacgcgaagccctgaaaaaatagatcctagtaagtcgataaaactaaacatatgtgataagaatgaagatcagaaaatgtttctaagaacctgttgcatgatctgtgggaactcagagcaaagagtctttcttccattgtcatcaaatatcttctctaaagagatgtcttgaagagcaactaatgtagtctccagcatgtcaagtcccgcctggtttgcaaatgtgaagacgggcaaggcctaaccgatgttcaaatcccaaaacagatcagcgaatacacgagtcaagtactcctatcgaatacacatttatgtgtttaacattgtgtttgttaccttcattgagcagcagattatagcatcagtgtgatgccaaagattcttaagaatagattcattgccgtcactgtttgatttaagtagctcaacacccatgtagcccctattatcaatgggtaaatgagtcatcttagtaaactaaacattgttgatttggtgggaaaattagaacatatttgatagtttggtttatacctgtaactctggcaaatccaacgagcaagtgtttgggcttcaggagtacccaaaggagtgcgtagaccaacttgtgagctgatatgagaaggagaaagagccaatgctactctctgcaccgatgatatgatacctcgaacatactgcctagccatggatgctacatgttcttgcatatggctctcgataccaaactcaaatgctattgtcatcacagatcttgcacatgtggagtttcctgattgatcagttgaggcttttgttccagctgaaccaatttccagtgccgaagcaagatccaaggttcggtttgggctagatacttcctgcttttttggttcaagaaaagcttaagaatctgaataatagaagacttggacagaaaacataacttttatttacctttgcggaatcaagagggataatacgaaaaccagaaggaagcagaggtgcatcatccgcaaacgaagcatcgattggagcaaatataagttccgcacaggttcctacagcattttcatccattccgctacaaagctaataaccaaaaaaaaaattatttcaggtactagagaccaacattaaaaccttatgcaaaatagacaacctaaagtacttacttgaagaaggaagatatctcttggaacgattgcatcttcaggggaatgaccaagaccttccaatttgatgacttccataaactgaatgaaaaaaaaccaaccattattcaacttatattatggagataaaagaaaaacattaagttcatcgaagaaaattaaactaacctcttcatgctcaatagtatgagcaagtggaagtataacctgccctccaaatcctccaactcgggcactacaaggccctactttaactgctgctgctagatacgcatcaatgttgttgtcagcccattctgacctatgctccctcagaaaccgaagcaggatcgccggaggaacattctgtaggtgcaaaatcccataaaaagaaggtgaaaaagtgttgaaacaatcatcagttgatctataaaaaaaatggtgcactgacctgtaaaagcattgatgcttttgcgcataaaacaacattgcttacaggagcaaagccattggcaaatgtaagatttagacccattagcttgtctggagaagagtttacagtgattgtgacatcatccatgctatctcctatcactgaccatccttcatcagtgaaaccatttacagcttcattgaagcctctgtagggaaaaattttataagaagaggcaaatataaaggacacaaacccaccaataagaagaggcaaatcgtaattgtatataaacctgcttagcctctggctgagagctcttaaggcagcaggacgccgtccccacccattaacactactattagtctgagtaacctcctgagctatttgcttgagctgacgcagtgcctttgagacaaattcgatttgtatgcatcatttgagaacagtagtttcaatatcagaatgagctttagggaataaatgagtttaattaacataccgccattgttgtcttctgtgcaagtactttgggtgactcatagagcgggcgcaagacctcaggcacgctacaagcctatttaagtgaacaaatatccaaacagtttggttaacatttccaagaccattagaattggtgcagagtgaggctcgttacctccaaatccatatgatccactatgtgtatgattgagccaccaccatcacaaggccgtatcaagtacccactggaaagcatctctgctctcacaaaattctgaaccagtggcatactaggaccattttgagtgctcttaagagatctctcgcacacctataagatttcttaaaccttgtgaaatggatcaacatgaataagaacactgacagaaaagaaaagctacataccacaaggctgccatcttctaaaacagaggtgtaacgtaacagccagaaatcgcgtggtggggccaatgtagttggtgcatagagctgcaattacgaagaggatgatggttactattttcaactttagaaaaataattctaactgtgtagcacttatggtttaaaactaacctgcatataaagcagctcaacggttccaccattggcagttggcaacacgttcataacttcaacagctcgacattcgcggaaccacgaaggacgatccttgacaatctctgcaacctgtaaaatagtgaaaacagatgaatgttgttacatatgtagacacatgtagagtagtataagattgtataaatcagcgatgagaatgattctataaacgcacccttgtaggctcaagacccactaggccacaggcgcgtgctgccacaccagtgcaaccatgagaaatagcgatgattccaatggaatccggaccaggctgttacggaaaatacaaaaacaaccattgaggaaaaagcagaataactatatccaattaacaaaaacaaaactagaggaataaaataccttcattccaggcatctgaacccactcaacagcggttccagttgcctttgaaagaaactctgctaaagtttcttctgcaatggacaaaagtctgaaaacataacatgtatcaatgaatctcagaaaaatatgacaaaagtgtagtttttaactaacagagtaaccatattccaattaaagaaccaaccctgcaggactagcatctctctgaggattttgagatgccaattggtgctgaccactcgtcaccaccgattcacagcttgtgtctttagctgggagtgaaggctgaaaaaaaaagacaaatcgatacacataccattaaaaggatattattattcttaaagaaaacattctagtgattattaagataagaaaaatgaagatattgcaggagtagaatcctcacatttggagtatgttgacggaagtagctgttttcatggaccagctgtgacacttgcttctgcaacctgtcattctcctccatcaagagcttgttcattgccgtcaacttccgattcacagcttgaagccgtgaagcctctttcctttgtttctctctacatctaaagttcataacagaaacacaaaacaaagattagatcaagtagatagagagaacaccacagaaacttccattcactacaattcccaagcaaggaacattgttattaccttcggttctgaaaccacactttgatctgtttaggctcaatgttagagagaataggacactctctgatcaactgctgacggcgaatagaactcggtttaggacagtcatgataaagcctctcaagtgcttcaacttgttcaggtgtatacctcacatacttcccattatccaaacatcccaacttaccatccttgcaagacattgccattactcctcagcaaaactcttcttatttcacaatcacagaatctcacaaatgaccctactaccccctccagatgaataactaaatccttctaaacagaagataaccacaacatactaaacaaaggagacagagagcttcttagtccaccacaaactccacagcttgaacaactaccaaatctaagccatctcaaatcctaagcacttggagtagcttcacaaatcacattaccgcataaatatcgaattctgtttccttcaaaacacactagaggctttttttcttcatgcaatctcaaaagggcacacaaagacaaaacctatcctttatattactcctcggcttttatgagctaaataccaaaacacaagaaagaaaaacagactttaagattacaactttcccttttacaaacaccgaaaaaagattcgaccttttctctgaacacacacacctaaaaaaacaagaaagttacaaacttttttatatttgctcgtgactataacacagaatcaccgagttgactcagccattagaaaccccgattccacctcgaaacgaagccataatattatcagttctcaaacccatattctccttcttcgagctctcattgaaataaaaatgaaaactttagagaaaagaaaaaccctagaaatttattcgaagaaggaaagaggaaagaggaaagtagaagagaggatgaagaagagatgtatgtagaaaacgaatcatggagctactgtactgttttgttgtttttagatgttatctactttgtgtgttttttttcctctagctcgttcatggcaactttgatttttttttttggccttaaaataataatattattttaataatgtgatttgatagtgctgttgcgtttgtgaaattagctttttcgttggcattttcttttgtttttttttatgattggcacatttcaatttcataaaccaacaaacaacaacacctcgagggaaaaccaaatttctcttgtttactctacgaaaatggtctaaataggtataattgtcaaaaaaattgttccaaaaggttaaaaaaaggttaattaaagcttaaaacattctcaaatatataatcagtgaaaattgtaaacgagaaaaaggcagtcaaattgaagagaaaggcaatcaaatgcttatactagtgtaataaattttatttttttgctatttgtgaaaattacctattgttatactatagtttttttattatactatagtttttatatttataaataaaaaaattatggtcatgcaattttctttttttttttaatatttgaaaattcagactcaaaaacactcggttaaattcatcttttatggaaaagagattcatcccaatatgtttcgaactcagcacttccacctaaaagatttatcactgaactaacagcacattgatatggtcatgcaatttcttcgatctaatcatggaaaacaacatagataatgttaacgtttaatgttgtaatgtttgtgactaatctctaacggatgctaatcttatactcctacatttatgcccacaatatgaaattaatgaggtttataccaataaatattactacttctaagttttaactagtagtaaacgagtggtaaaagagtgaataggagggtaataaaggtaagaaggaatggggaaggtcagaggcgtataaaaaataacaaaaggcgtgggagagaggtctgcgtaggagacagagacaacatcattaccttctttgcatgcgtctcctccgtcttaaagctgaagcttcactttctttctttccttctttctttttctctattctcaaatttctttcttttattttgtcaactctctttcaaatattttaatttaactagtactattccttcattttcccaataatgcctgtaaaagaattgtattatactactgatttgaattgttcatcatgatgaattcaattcttctttaagtggtttcaattcaagtcttaactttttcaattaccaatatattttcattatagagtacgtacacacaaaaaagtgtagaattgactgttttaattaaacgttggaccgctatcttcatatcgggcctaaattcagcccagtccattatgtatcacggctgttgcaattggtggacttgtttcatataggctatataggtcactgatattcaatctgtccactgattgttctatttggaaaaatagaatgattaatttcgtttgtttttttactcataacaaaaaaagattgctatatttgcaggagatttttctactggttatagttgattgcttgcttcggttcatgcaactgccaaattagtgaagcaatctctctgctttttcaagatttagcttctggtgtatctacattatggcctgtatactttggaagatggatcagatctttcgtcagatgctaaatcttataaaagaaatgtttttccatagttatggaacgaatatcactgttcggcaagtcagaatcaagcggacccttgacccaaatgaaactaggaataaattcattattgtagtcaaaatggaggtgttcttgttgctttgcttcaagatccttttctctaatgatctcaaagctcgtcgacttgatgatctgatgttaggtgtttagacttagaggtttagcatagctgagatttaacatcaaatgttattctgatcaaattaacattgttaattgttatgggaaaaaaagacatttgttaaatgtagattgtagtaaacctaaatggataatgttgattacatataaacattcttaagaaatagtgacatgcttgcatctttccctacgtgaatctttctctctgcccgttatatattttaatcttcttgcagatacttgtccgaatatatatcatcaacctacaatttttttattttacatatgccacgaaattgatgttttgactttaatttgatttgtagtgtcttccacgttcctttttttctataacaaccaaaataagcatatgatttaagtggtaaactgcaccacgaaattatagcaacgaactacatagataatacataacatataaaatatcaaaatcaagaaaaagtcacaacgaccaacaaaattacataaattaaaaaaaagggtattggtgatcaaaactcaacgacaaaaaggagagagtgggttagttgaatgaccattttgttcgcatgtctgctctctcttctccaccttctttttatgctcccctattctcccgacgactcaaaagttcaaaacaataaacaccacatttatttattattaattatacaaaacaaactaaaattaattagtttatgatttaaagtttattcaggataatttattaaaaatttaatagcaatttttattatatagaaaacagaaaaatgatacaaatattcggattattttatgagtatacaaattttagttgcattaaatgaaactaagcaattagttggagatattagtggaattgatctaagggcagttaagtctcaattaattggtttatccaaaaaaccaagattaattagtgcaaaagacaagtgtcaatagtacagagattcataaatagaattagaaaccccaacaaaaatgtgaagcttccaaaaaaaaagtaagtatcaaaaaaacagaattttgtcttcgttcttctctgagattaaagctttctcttttgtaatggaagaatctcagggcatcaatggcgtcgatgattcatatcgtcatctcccaattctctacttaacctttttaacgatctggtctttctccgcttgttcttggacggttaacactttcaaaaatcgccactttcaggtcaataaatctcctattttttctctatcttatttcgataaattttggatttttcactcttgggtttatgaaacttcttctcaaattccaaatattactcaaaatttaatcaattttttttgcagaatggtacttgggatttattgttttaatcatgaattcagacgattctgtttttgatttgtctcttttatgtttttcattaaggaagaaacacaatttgattttggttctgtgtttttgtttagagcagacaaatagtttacaatggactcttgcttcagttccattaatcaaagccttacagctcacactatctttcctcttttggtaagtcctctttgtgaagttattgtttccattaatgttaccttgtcatattgagaaattatttctcagtaacctttttatcgaaagatcgttttcgaagtctctatagttgattaatctgttatttggtggcaggcattcatgttttcaccatcacatttgctctctatggatgtcttttggtgtatatgtgactggtgttctgtttcagacagcttcatttgtgtcttttttacttatctctcacggttattgcatcacttgtgaacggctctcgttgaccgaacgtagaactacagcttcacttggttgtgtcttttatttgactcttgttggatacagagcttctgttccttattttgcagtgagtttttacctttttcacctactcattaaagctaatcttttacttacttacaagatgatgaatgaaccaatctttttttgctcctccaggtgcttctgatacttaactacatgatctcattctatgttatattccatcacatatcgcaaaatctagcggtgttacgagaacagctgagttttatcgaagatgagaatgttcaagctatgcatgatgctgtatatgctaaatacatcatgttcaagtacgtttttcattaccctcaggtttgatggttgatggaagtagataatctgctaagagtttttatttatgtttatggtttcagaaaattccaaggagctatgcagattgtagcaatggcagaaactgtggtatgaccaaatctttcttgattgacatcatgttgaatttactgctacattgtttatactcacactcactttaaattatgcagatctacatgaacatggataactcctcacaaaactattggctcaggctactaattcgagaatgggctcagttctgcatttttctctatattgggtaagttatgatcccacttttcaagtacatttcgctgttcttgctttggtcaagaactaacaatgctccaaactatatactttggcagttggactttcaggtctcaggatatggcaccgcgtttctcggtaatgcctacactaaaaccgaaagagaatacaattattcctccgatttatagcatggtaagtgacataatgtaaacttccttttgccttgtaatatcttgcattaaccaaaacataaagcttattttgctttgcttatatgtgttttggttttgagtaatgttctacttatgctaaatctatataccaaaatatcaggaaatggacgcaaaatctttcaaagaattc

SEQ ID NO: 87 - DNA, 117737 bp, Arabidopsis thaliana
gaattcaattcacaaggtagctgtaacaacaagactccgtgaaatcaaagatcgggttcaatatcaaccataaaagcttaatgaaacaattctccagcagataacacaatagaaaaccaaatctcgcatcccaatgtctctaattctcagctgaaattaccaaatctagctcagaatctcatcgatctaccacttaaacgcgatctactaatcgttcaggtgtataagaccatttcgattcccaaagaaacagacacggaagacttagagtgtgagggagattataatctacctggagaccagctcgagaagaacgagtgataggcttcttcttgtccttatccttgtcgctaccgctgggtttccccataatcaaacctttagcacctttccccgacattttcccgccaaatatctcacagtaaaatccttggagattgaaagagaaaggagatcgcacaaccaaagataaaaagagagagaagaagatgagctcgaagaggagtctcccgatagacgttttccccagatagagagagacaagtcggtctgtcaaatgacgattttacccttataccccaacctgcgaaaaaagcccaagcccaatctaaagtcaaataatcataaatcacaaattcgtccctaaatttagttcaatattgaaaaagacacttgaaagaaaactattaaattttaacacccatgttttgattcaaaagaagagagggagatctttgtttgttttctctgtataatcattcagtctggaaacaaaacatagcaaatcatgaactaagacatatagaggctttttgtacgctcagtttagcttaagtatcagatggtttctctgcggtttttccttctttgttgatgtgaaagccttcaatcttctttgaaacttcatccacgctatgcttcactctcctcgagctagtttcgttctcttcgggatttgctggtgttgtttgccagattctgattgtcccgtcttcagatcccgaggcataggataaaccagtgggagtaaacctaacgcagtgtactggaccgtgatgtcccttgttgcatcctaagtttcagacacaaatgaaacaatcagaaaaccaaaacctcgcaggagcttaaagaaccatgcttcaaagatctattaagctcttcactcatggagtttataacagagtcagaaactccaattaagcttgaagctatctggaatttaacttggacgacaaaaaggtaatatgacagtgtctgatttggaatatgatagcatagatgttttgaaagtcacttaccaatctcttcgccagtgtagaaatcaaacactcggacccacatatcctctccaccagcaacaaatttttcaccagactttggctccaacgatgcagattcaatattgcagggcatgtcgtaactcttcactagtccaaaacttggaagaaaaagcaaggggcaaagatggggtttgagcaagatacaaaaggtaattagaaaatatttgattctcttcctagaatgagaacttactggttagcgtcccagaatttaacagttgacccatcagcagttgttatataccgtccatcttggctcacttcagcactggtgacaggagacttagtttctaacgtttgcacaattttcccactcctcacatcccataacctgtataagatagcagtagaggagacggaaaagcaaacaaaacgtctatcaaactatgcctttttatgtgcgacaatgtgtatttagtctgtgtcttgtttagttcataccttacaccgccaatatcagtacatgaacttaatattgtttgatcactgtgaagccatgtgagggttctgatagaaccaggagatttatcaacttctgtaggaggtgcatccaaccgattcatgtcaaaaacacgaagaattttctcaaaccctcctgtgagcaacgattttgtatcctagtgaaagaaaaatgtcattcaattagtgacgatgcataaaagcggatcgacaccatccacaaacaacaaatgtttaagaatagtccaatctgaagaacaatttcactatcacctaattaaacaaatcctcaaagctttttacttaaattccgtgcagttgcctgaataagagctattacataacaacctgcccacaaccgataatccaaaacacagagatacaaaagcttatgcctataaagacaaaacaggattaaagtatttcagtagataattccaattcttttagcctaccatcttacaaaaccccagttgaccaaatcgagaatctatatggagagagtaaataggttgaacgaacctctgagaaggcgcatgctcggacaatatgcttgtgctcaaaagaatgcagcacatcccctgttaacgcatcccaaagtttgctgaacaaaacaagataacaaaaaattggataaatgtgctgtatctaagaacataaaacatacgcaaataatgacttaatgaaccaaaaaaaattaaacacatacgctgaaaaatcggcagaagcagatgcagcacgtaatgcattgttatccagacaagaactccaaactgcacctttatgcccttcaaatgtaccaatccagtctccagtttccccatttctcaacattggatgcgaatctaaaccatcaagacatgagtattctcaaaactctatgaactacgaaataagtattactcagagaaaactcaaagacttttgtaagttctcaattcgatcaacatgaatttttgcacagttctagtaactaaattgaccaaaaaaatccaaacttttgtaagaaaccaaaagtattatcacctttgctagcgctgatgaggaagaaaccgtcaggagtaattggactgtagaacaaatcaacaacaggtcttgaatggccatgacacacttgtggaatcgtcaccttcttcttctccatctatcctaaaccctaattaagcgactctttgaaattaaaggaaagggttttcgatttcaaacgattcaaggtagactcagagtagctgaaaatctaattttttttgtagtaatttctacagaaatattgggagaaacaatcccgaatctataaaagttcgatcgatctacagttaattagagaaaccagtagcttacagtggaatgctgattcctgggaattctacagaaccaaagatgaattgaaagtataaaagttaaaaaaaaaaggggacaatttgtagaggaaagcgtaggaattgggtggtttttatttgtacaagccccgtatgcaaaacagtagcaagttttagggatttctacatctagacgggaaggagaagacctttatttgtattttttaatttagttcctatacgtttcatatgttgcaataagcgaccctatattttcgtaattgacaaaacaattcacaataccatttgtaaataatttatttagaaaaaaaaatcgtaaatcagtagtgtattttactgtacgttttttttttgtcagcatgattttgaaaataaagtaaaacaaagtatgattcttaaataaataaattaaaatttcgtttggtggtttaatgttttgttttttaaagtttataatgttatattcaataattggccaaatcccaaattggcccagggcttttactaaaggaaaatcggaaaggcattgccgtcaccggaggagcgcatctgatactggtgactaccggaggcagagaaccagtttggaggtttaatgttttaacatctaatttgaggtttgattctagaaaatgtgaattgtggagagaaaaacttacaagaatgaataatagatcacagacactttacattttgtggttcttcattgaacattataaaaagatcttaatagagaggaaagatgtatcaccactacattgaaacaacgagacgactatattaaaagattcgacacaaccaaattcacgatcatcgttaagaataagatctggagtggttttaattagtgttggcttttcagtgagaaatgtcacaaaatattatagttcgtctatgtggaatttgtaaaacaagaccgaattcaagttgtgaagtagaaaagctgtccgaattcaagttctgaagtagataaccgttgagaaaatgttatatttagacattttcagaccaaagtcaagttctgatgtagatttagagaacacaatgtcttaaatttgagataagataaaagagctaactagggaacacatgtctaaaaataacaagtggaaatccaacggttgattacagaagaaacagaaagggaactagagtttacaacacacaaagaccaaacacaagccaacggttcaaatgaaaaaggagcaccgatagaagatggtctgcatcctacaagaacactgaattaagaaaaaaaagattaattattcattaattgattcgtctccagatctgacccgaatccgtttcaatcctcgactcggccggtgatatcagacgcaagtcgagaagcaatggcggagtgatacattacgtcatggaacgtggaagcttctgcggttttcctcctcaactgcttagctttctcctccgtaaaacaaccgcgacgaaacttttgacccgacccggaaatatcggttttatccggattcacggtggagcatgagctttcgatgttgaggtaatctggatcggagggtaaaccgaagagaggagcccaccaagcagcagatttcttacggttttgatccgggttaagggatccggatccggaagatgctcggatcgtgggtagagcggagcaggtgataatcaaagccattgaaagtgaaaatgtagatagaaaagtaacgtgaagatttagggatttaaaggaagaagattgatgagagaatgagatagattttagggtcaaatttatatgattaacaaattgaaagtggatatggttcgttggatatgtaatcaacgtacaagctttttactgaattttgcttgtgtagggagatttaaaggtggacacgcatgcattggattgttaacctagggagatagataagtctacacgcttttttttctttgtcagattgcaatgtcttgatatgcactttctccgaaatacaattattttaaacgtgaaagagccatttgatttatgcaatttgcatacaaaacaatgatattttagaatggtgacagtggtcggtcgagaatgattatggacaaaatcgttttatttttttggtttaatcttcaatattgcccaacaaagcttgtgaatattaattagaaacttaaacaaaatagcagttggattttattggttctttatatacttatttctaaaaaaatatcaagatagatttttctttgcttgtataatttatcgttaaaaaatgtgataattcttgtagttaagaccacattttttgtttcttcctatagttatgattttaaaaaattcctagagttcagtaaatttcatccagttactgaaccttagattcgcatgtgcgagtgtctcacacgtgccaagtcaaatcgaaattgaacaattctcccacaaaggtgagtgataagctcgggacttatctcttaaactaaacaacgtaaaaacataagaaaaacagagtaaataaagtaatgcgccgatcgtcgacggagagtatgagatgagaagagaaattgatattgatattgtttgatatctactgtagatgattcgtcttgacaaagagtatagtgtacttcgatgttgctttcggagatcagaaacttagttttgactttttttttgtgttctccttgtatagggaaggaggctgcttgacatcgaccaccctgaaagtccttttggtacaaaggttagtcgatttgaagaacatgagtaaatataacgggttgactttattatctcaactgaatttcactgtgaagtttaaactttatccgtattctaagcataatgtcaagtttacatttgttccataaattgacagtgtacctaaatcaagcctagccacacagagtccagttaaattgaataatttgaattaggagaattggcctaatctagatgttcaacatgatctcggaacaacatgatcagatcttctgatgcttattgtctggtcattctctttgaattggttctgggttcttgctggtttttggacctatttggatcaacttgtatcctctgatctttaggtagttttttttagtccttttgtctaactttctcaactgagctccaattagcattagttcctgcggggttgagcatttctcttacaattaataatatggaagaactgccctggatgaatcagtaacttgattttgaaccatttgttgtggtaggtcatgtaagccatttttactatgatacttgactgctgactctatgatacattcatttgtagtaatgttgtttgaatggtgtgattctgttacctaaccattgatttcactggtcacgactccttatgtttattgatgttgacgaaaatttccacaactcaattgacttattatgtgtctaattcagtctctatatgctaagattaatgcaattttttaggattgcatactgtattataaggtataacataatcttgatatattggatgttcttcgttttcttgtattactctttctttgtgggctctttgcgaattgttttggagctctttgagtttactattatgaacttattttcgtaacctcttgatttccaaattctatcatctccaggaatctcctgctgtcgtacagtcctactttgacaagagaaatatcggatgccgtggtggtgaaggcggtaagttatcattttgaggtcatattctttaatagattttcttagtaattgatttgatagctgctggtcgttgtatccatttaccaatcatttgttgtgttcttatatctcctgaaactgcagaggatggacacgacgtcgtttggttctggctagataaaggaaagtcatttgaatgtccagtgtgctcccaatactttgaggtaagttaaacttggctttcaatactcttaatacttattagaatctaactaaatttcatgagactatgagagcacgaaaatggtggagatttcagattttattaacttggttcgacattgattatacagcacggaccaccagacggtcatggtgacgatgaagaccaccaccattgattccggtcttttcttaacggcgaaatgttttcttctattgtagtgagtggaataaatatttctcgttggtgaaaacacttaaatatgttttttttgatcctcgagaagacaccaccactttatttgcctcaggctctaaccctttttgctttcttgagacttttgtttttatgaatgattctcgagtcagaatcattcttctttttttgaattatataatatatagtttttggtgttcacggtgtgtatgttttgtggtaaaaagtaaaagcctagagaatgttcttcccccctttaatccaaattggcttgtcgtcgatgtcgacgtaccgatttttttcataaaagcaataaccagctaacacaacacagccgtcattagtacgtgtggcctcttaccatataaataaatgaaatcacacttttaatcaggaacctttaatacccaagtcttgatcgataagttgatgacttttagaaaacatttgatttcggataacaaaattttcaaaataagggagtaggaaataagggatatatgtgtgtataatataatggaataaaaagaaatcatatataatttgaaaacaataaaatattgtgcttggtgatttaataggcatcgttcagaatttccaacaacaacaacacctctaacatcgcaacgaagcgagcaaagatgccccgaaccaaacaaaaaaagaagaaactggatttccaaaattggtgagtactaactaaatcagcatccattttctttttaaaaattttattatagatttatagtaataccaaaaaaggaatatgaagaacaagaacatacgacgtttaacatcaaaagccgtttttatattctccaatacaaagatgtattcctaaagcttctcccctatatttttttaacaaatatttttccttttctacggctaaaaacaattgaacataaccaatgtttgtaatggttagatttagtcgaagcatgcgactagttttgggatcgtatatattttgataaatatatttccgtaaacccaccatatgtataacgtttagacataaatcaacgtaaccaaatgacccaatcaaactcataatcgtaaagtctttggccctagaccgaatactagtgccaccatacactaacattttttgtaatatggatagcgttcatctgatttgattatgtagaaatattagatatattatgagataaaattatatactaaaaagtgaaaaaatatttggtaattcttttttcatttacaatatcgttttatgacaccgtaccgtatgaacccaaaacaaaaccaagaaaatataaaaaatgcttgaagaatcaattctgccaaaaattcgaaaagtctaatatcaaaaacaatctcaagaaaacgattgttggagtttctattccctttctattttagacaaatcaccatacttcttttaaagatccacacagcttgctctcattactaaatctccttttcatacatactttcatttattttgttcatatgaatcttttgaaagtttttactttaactcggtaagatgtattggtctaatagcattgctacagacacacatttggtttctgtgcacagtgcactgtgtttgttttacttaaagagtgctttagtatgttagaagaattcaaatcttaatctaattaagctaatgaaatgggatgatacagaagagttagatcactagactactctagattaatataggattaatataaaacttatagattatatattgatttttttgtacgtgcttaaataataatattctttagctaagattagttttttttttaaattggtctaaaaactaattaagcataactatggtaggaactctagctagctaccttactttggttcacaaacgtctactcaataaagacaattgagcaatgagacatatacttcgcataacacattaatactcttaattaatgtaaatcacacacttaaaattcttaattaatctatcatgtgtcttaattagacacgcaacacacatttcaaaattttatacacaagcaacgtttgtaaaatttatcagtatgtcttgtaaaatttattttttcgataactcagatgattctaaaggcttcttaaaccgaaagactaatttgggacgcggagaaaccatgttaaattactcgaaccccgataagcaatactactcaaaccaggtgatgggaattagctccatttaccacttgaccaaagcaagatggttttcttgtaaattttacttggtattttcattattttttgtatttttcatttgctcatatggatattaatttttctcaatccatcacacgtatacattattatatccactaagttttgaaaaaaataaataaataaatatatatatatatatatatatatatatattttcaaattattttaaataaaatggataaactttttttaagcataaagtttaggctaaataacgcataaacttacaatggccttaattagccttttaaccatacgaacaagcaaacactatacacctttaaataccattaacgagttagcattgtagtgccgaaagcatctcttctctattttctcaacttcaatgcaatttcaacaaaatataataaatcatgttacaatataatattataaaagttaaactcatggacttttcttatctcggcttatcctttactccaacttaagttatatttttttcttaagataatggtgggggtatagagttgactaaagaaaaatattcactgtatacatataattaaattgcaaattgtttgacattcgctagaaaataaactaattaatcagataccgccattgtttaagcaaaaggttaatgttattttccactagtttttgttccctataaattaagtcaaccatttccataattattttcaggtaacaattactccaaaatgctactatcattcaatgattctaaatatgatagtagcattttggagtaatcattttcagacatttatacgtcaaaaaaataaatgtaaaagaggattaaaatatgcaatcattacgtttatttatctaactttctgtttgatatttcgataatttttatacacaatttcatatatgagtaatttgcagtaaaaatgtcacggtatttactttcaagtttgtttaattatataaaaaaaaagcacacaattcatttacggttttaccttctttttttattttggctctccttcaattttagaaaatttccttaatatatatattttggctctcttatagctatttagaaaaagtcattagtagagtaaacaatcactttcattactatttctgattttgataaaaataaattctggtactgaaccaccaacttcaaagtttatatcaatctataaaatagagaaaatggaaatgatgggtgattggggcatgaagagtggatactatatgtgacacatgcattgtggtgcatgtgctcagacccactcacctttcccattattcctttatcaggtcacctccttttatatttttgatttatcaattctgaggaaagaaaaattagatgtgtgataaattaattcttagaaaaatctaagagctaaattttactagtattttaatgtgtttaaaaggttttcgttgagttataaaaagctaatttttatattacgttttacttttgcacttcttttcaattttctttttaacatctattctttttacaaggtttaaactgcagttacagtataagatcttagcattagcgtttaatttttgtattaaaattttagaagcatacatttttttagaaagattttttgcctaggatacgttaaagtttatagttcacaattctagagtttagatattaaaaaaagtgaatcttcaaatgaggaagatgaataaagtttctttaaggtacacacattgattgttaaaaatttatgaattaaaaaaacttgtgaaagattcagaaaactaaagaaaattttcaaatttgtaagaatttattttatattattagtaacattgacttaatttccacagtttaaactaatgaaagtttataaaagcttctaaaaaactctttaaaaactttctaagtgtcaaaacgttttaatagttttaataaatttatattttgtattactataaactcgtgatgaacatattccaaaagttttaatctagcatgtggccgcttaatggtaaaatttggttgtatattgtagatgaaagaaactatagttgtggatttattattttaacaaaacgttgggtgaaatgggctcctcagtccctgactcaccggtactggaaaacccaaaagatttgaatctattggtgggcactgagcaataagcattatcaatggcaaaaagaacacagcaatgaacaaagcgttgaaattgatgaaaaagatttgtgtctttttcttcaatatcttcttcaccccacctgaaaaatccaggttggtctcttgtgtttttttccacacttgccatcatttcggtagatccaaatctttattatatatccaagtacccttagataaaacaaaaccattaattacaaatccatacttagtttttgtaggattttctcacaaagtagatttcggagctttctgatcaatgggtatcaatcaatcatctaatcttttttattttatctatgattgaataatgaagtttgtcttcttttacaattttggattatgccttaatgtttcaggtaaaaatatgtatagtatgagaaaaagttatttggtgtttctttatttttcccctccaccactctgcccacaaggcattgattctctctctgtttcttgttaccgctagctctctgctgtggttttttattttattttttcctatattccttgtgtttcccaaaagatttctttcttttgttgtttaaagaaaaatactgaattttcttttctttaatcttatttaagtaatccttttccatggatgctacgtctatagtttcctccttcattccctttctagtagttttggttagctgttgtacacattgaagcatcctatagtgaatgattcagattcacttcttttattttattccacattttcacatcaaccctttaattttggtgtataaatacacattgccttctcatatttttacgatcatcacttgtttgtattttgaaactttgaaagctcttaagaagacgaattacaaaaccttgagaggattcaatacactttcaacaaaaaatgagttactctcatcaaagcatgggttctggtttgtttcttttccccttcttgattgttcatgttaatgttatttgtacttgttatgatcaaatttttttaccgtatgataatttagatagattccacggattaatttgggttttggcctgaagtttcttttgttatttgaaaaaataaagaaattctttttgcttgaaacttgtttatgacactgtatttggtaaaatctttgaaggtagtagaaatgcaaggggatatgaatttggaaggacttatgttgtgaggcctaaaggaaagcatcaagccactctagtctggcttcatggtcttggtgacaatggctctaggttacactcttcacatggctctttcgattattatgctttttttttgtgtcttaaaagaatcaaactaacatcttgaagcataaactcctccgtggtgcttgctttccttgtcttaagtataaatatgttctagaaaaacacttcaacttttgcgtgtgtttatatggaagaaaaaaaagagttttcaaaagttgaattttggcatgttctctaataccaactttagagaacaaaatgtatgtgttgcttcttttttctctattgaaatttttgaagcatcatttgtagataaatgttgtagcgccgcaaataattaattgatattaacatactgaacttttcctgtcaaatgtcttctcttatgtgaatattaagtttagttcattaaagtttgtaactaaaaaaaaaaattgtatatacttttgagggaccactaaactagcctcacttaactagttctgttgctggtagacaattaacaagacaattatctcgtgtcatataaaaaagaatattccatgttttgtgtattaatcaaaataaaaatttgaaacatacatgcgtttctcacatttgtctctgttttgccacagttcatctcagctcatggacagcttgcatcttccaaatgtaagaatctatcatacatgttttgttataagtccaccattaaatgaaagtgcatctctattgaagtctttaataaaaacatatgtatgctatgcacagataaaatggatttgtccaaccgctccttcgcgtcctgttacaagtcttggtggatttacatgcactgcttgtaagatcagttctctcatttgaaaacttcaagaatcattctttgttgtctctaaagtaatactagaaactgaattaacggtagttacgtaatcagggtttgacgttggggaaatttctgaagatggtcatgatgatttggaaggtttagatgcctcagcttcacatattgctaaccttttgtcctctgaaccagcagatggtaagccaaaatcatcttaacttgaattttcgaaaatgtaatatgtattatcacatccatcatatctttagctcaatcattgacttgctcttctgattttgatagttaaagtaggcataggaggttttagcatgggagcagcaatatctctctactccgcgacttgttatgctcttggacgttatggaactggccatgcgtatcctataaacctacaagctgttgtaggactcagcggctggcttcctggttggaagtattactcttcaaaacctcctgttatacaaactttgtttcttttacttaatgttacctggtctttctttcttttttattttaactgatagaaggctaatataactttgtaggagcttaaggagcaaaatagaatgttcatttgaggctgcaaggcgtgctgcatcgttaccaattatacttacacatggaacttgtatgtgtacacaagctattttgtaaaatatattttctatttttttttcctttagtaatgactgcactaagctgatcttatctgaatttttttttgtgtgtcacagccgatgatgtggttccttataggtttggagagaaatctgcgcagtctcttggcatggctggatttcgactagccatgtttaaaccatacgaagggtaataaaacttcaatgaacgcgaaaataatttgatttaattatcatttgttggaacatacttataaagagttttgggtttatgccaacgtgcagacttggtcattataccgttcccagagaaatggatgaggtcgttcactggctcacaacgatgctcggacttgagggctcgcgctaaactttacagactgcgatgcatgtagctatatatgcgatatgtacgacacaagaacaaataataaccgggaatgaagaggaattggtggagaacagaaaactagtgtagacttgagatagtagaatgtataatggttgggtttcttgggggtatatatatgtcaaggttcgttattttgttgtatgttcttttgtccatgttggattcttggtcttgaataaaagggttttatatttatcttatttctttttggaattccaatacttcctaattgttgtaataaactgaaaatgcattttcagaaggtagaagactacctagctgaatataatttttatttttgtaattaaattttcaaaaatatcatatatatgaaagttggctaagtttgtaaaatttttctcacatcatcacatagaaagatattttatttgcacgccgtagaatgagaaaattcaccgcatttcgtattatttgggtaaatttcaaaccttagttatgatattaagaaaactagatacgtgcataggttttaaaatatacatatattatcttattaacttttcaaaaagtttttttttttaattggtccaaattaggacaagaaatttattataattttactacttatttagacatccatgcattgagaaaaatattgatagtttactaatttatggatactttactaccaaagtaattgttttggtagttttgtatttcaataaataattaaaaatatatctaattaattactactaaagttattctgttttatattaaattctgtctccaaaaaagttattaagatctgccattacaatgagatgatctaacttttattaataagattttttcatgcatccaattttcaatagcaagtttttttttaatgcacccaactttaattttaataataaaactttttcttcttaacacttctttcattataaatccacaataccttccccttacatattccatctctagtgcaatctataagtttttgaaagaaattaatattcaaaacatggcttctagtatgtgtttccttgttgattgttcatgctttttttgtagttatgttatatctctggttataatacatttttacaatatatacaggtagtggaattgcatgttgaaacactcaaatagtttaccctacaggaattcacaaggccactatagtctggcttcatgacatagggcagaaaggcatcgagtaacaccatcacattgctttattttgtaaattttgcatgattcattttttgcaggtatcaaaataacatattctagtaagttatacatatgttttggaaaatcttcaaacttaaagtctttcttaaaaaaaacaaatggaagtaaaaagaaactgaaaagtttttgaaagttgaatttggcatgttctacaaatattaattacacaaattctcgatttgccttggttgccctaataacgagtctttatatctctcactatatatatgtctattctttctgcagctcaactcagtttgtacgtaaattgaatcttccaaatgtaaagatccatgaacatgttaattttgccatgaatctgatgattttcgttttagccaaatggaaactttattgaagtttctaatacgaaattttgatttctacgtataggtaaaatggatttgtccggtcgcaccaacacgtcccgttacttcctggggtggaattgcaaccactgcttgtaagatatagttggctttaaacacttttttttgttaaagaacagactattaatattgtcttctaaaattattaattatatatatatttttaaattattaattattaacatttgtatttaaaatcattttgatgaattagggtgcgatgtcacaggaatttctgagaacatggaagatgatttggtttccataaactcaataactgcatttgtatttagccttttgcttgacgaaccacaaaatggtaacccgtaatgattaattatatatacgtcacatccatagtttatagtatgcatcaaatttctctatcaaatttgttaatcctattggcttgatagtcatgataggaataggaggtatcggcttgggtgcagcagtagctctctactgtgcgactatttatatctctggtaaaaaaatcagaaacctaagttttattgtagggatcaacggctggcttcctgcttggaggtaggctcttgaaaccctaatgtcatttattagctattactatttcagtatttcttaaggaaacttaaattgcaaacctttaaaacatggaaacctaactaaatcttgcagaaacttacttcacaatctctcatatgattatggggtcccaagtcttgctccatcagtatcaatcttacttacacatggaacttgtatgtgtatacattatctactttacgatttagatatcaattgcgagatgatgctgattcttgtcttttattttgtgtgtcacagctgatgatatagttcccttcccattcggacgcaaaagttcggacattcttcgcagggctggatttcaagtcacgttcataccaaaccaagggtctaaacatgaattagcttcactttgttttccgttaattaccaatagattttattgttctgaatctatatttggggtattccttgtgcaggtatcatcttccaatcgttccccaagtaatcaatgaggttcgcttatggatcacatcaaaactccaaccctaaagtcaatgctcgacactgcatagagaaaggaattggggagcaaaactatcatataatatatattttaaaatatttttgtcttattatctctttttctagttcataatcaattatataggcgatgtctctttgttaggagtctgaaaaatgtatatatttcttcggttaatgttataataaataaaagatttacttagatcttaacagattttttttttgtgaaaagtttttttttattaatatttattatacatttgaacttgaattatggcacagcgatgacattaacacaaaccattagattacaaattttcatgatatttaatgttttgaaagattaacagtatataacttgcttaatcaaactgaaaatacttttcttaaaagaaatagattcttgaagaaagtaaatctcatgagaagtttagatacattttacactcacaaaaaaatagaaattgatctaagtttcccaattggtctattcataaaaatgcaatcttcctaagctaagataataaaaaatatcgacaataatcctataattgaatatcgacgacggtttgtgattttccataggtctctcgaatgatcaaatggtctcttcctagctccttctttcgaacatttttggcttgaacaaagcttataacgcttgaaaacatcctaatcccgcataaggatctaaaacatgtacataatttaagacacgatagtaaagaatcaaagatggattccaacacgacaaatgactaaaaacaaatactacacaagggaaaaagataccaaaaaaaaaacacaaaatctgaagaatataaattgcctaaaagtaattaaaaaaaactaattaattttagatggaaagttgaaaccatacattatctaatttaaaacatttcttactcctaaatcatcaaaataaaataaaatagcaggagtatttaataaaagattttaccaattatagtttacaattattggtttagttagttgtagttgatgattttttatgtaaaaaagtaactttagtgatatttttttaagtatgtgtacagaaaccttaaatgtaataaatggagtataaaataacatatattgttttcatagaaaatcaaatcataaatcacaaaatcaaaataaaattaaaaagctgatgagaccttaatgtgatttaagttctgtcatgtgtcaaacatatagttattaattttaaataaatttaggttagtatttattaaaaacaaaatccagtgacttggtgggtttattatgtttatacgtgtattaattaaggttttcgacaaacaaaaacaaatactataaaatgacaaattctgattttgttttaatagatttttatatcatcttttgttaacattatctgaattagttaaggtgctatttaatttagggaaaagtttaaaattagataagaaatattatattgtaccaactacatttaaacaaaactaattaatcatccaaagatacaagttataaaacctttaataacaattttgatgaagtgtcaattatcctatagaggggggggggggggggggggggggttcccccttcgagtatgatctatagattattagattatgttacacccaaatctgttttctgttgttgtggttgcgcttttcattttgtaagccaattagacaattactaaatcaacaaaatattagtaattttaaaaaatagattatgcctccattaattaaattgtatttcacccaattagtatatgatttttgccatccacccaactttttaaggatgagattttgtcaacttttaatactaagatattttatgtcataaggctcctttggtgctttaacaaaaaagaaagaaaggaaacactcatttctattataaatacacaataccttcccttgctttctcttatatctttcatctctagtgcaagttaaaaactagttcttctcaccaaagcatggcttctagtatgatttattttccttggtgtaattgtttatgtttcttccatagttatctaagtgtttgacaattctgtaatatggtttatgtgtggaactcattagtgaatttgcgtataaataactctttaaacaggtagtaggaaccaaagtggcagaaaagttggagaaactatttattactctattccgcccacaggagttcataaagccacaatagtctggctacatgatgtcggattcacaggccactggtaacactctcgcgcacatagtatatattgtatctgtttattacacacatgatttggacgtactacaactttaactcttttcttgggttcttttttttttactaataatttgaatcttgtagttccgcaaatacttaattaaccgctctatggttttgatcttttgtttgtatataaattttgtagcgctgccaagaaatgatattgagttcatttcactaaagttttatatttacattattattattattactaaacaaaatgtaattattctccctatatatatatatatatgtctattatatatgcagctcagttccggctctcgaaagtttgagacatcccaatgtatggatctgttaacatacatgtttcgccatgcatgaacttgatttccttatagccaaaatttaattttttaattgaagtttctaatcaacatttatgatttggcatagataaaatggattgtcccgactgctcctatgcgtcccgttacctccataggcggggaggtaaccactgcatgtaagattagttgttgcttaaaatttcaattgccaaaaatgatttgatgtaataataggaatacgagaactgaaaactactaacatgttatttataaaacctttatgattaatcagggtgcgacatgacaaaaccttctgagaacatgctagatgattttgaaaatttaaattatacaaactcatttattacgagccttttctcttctgaaccagaccatggtaatttctaaataatcacttcttttataaatacacaattatttgattaatatgttaattttggttttggtagttatgaaaggagtaggaggaatcggcttgggtgcagcacaagctctatattatacgagttgttatgcgtttggatgggttcccattagcccacaaattgttataaggatcaatggttggcttcctggctggaggtagccttttcgagctcttagtatcacttttcacaaatttttaaaactaataataatggaaaacaaaactcaatcttgcaggagattagaatacaatatgtgtaacactaattttgggactgcaaatcgtgctgcaacatcaaatattttacttatgcatgggacttgtatgtgaaacaagttaaatataatagtattagataataattgcgatatcatacaaaataattaattctttcatatctttttttgttatagctgatgatgttattccctctgcatttggatacaaatgtgctgactcccttcgaatggctggatttccaaccttgttcaaacaatgcggagggtctaaacaacgattactttactttgttttgatttgattacaattttcataacacatatttctgaatctgagttataccatgtgtgcagggatcatgtaatgaatgagatccgtgtttggctcggaaaccttgggctttgaggatatggttaaaacatgcataaagaaatcaagaaattggggagcaaaattatcgtacaatatattataaaatattttattttagcttttcatttttatgtctatgctattcataatcaatatttaatgtaatgttcgttcgaaaaaaattatatttatatggtcatttggttaaataaataaacatgatgatgcgtcgaactgctgaatatatatatatatatatatatgtatcattataacatattatttgagattgcaaataattacatttcctttatgatgataacatattatttgagattgcacacaattaacatcacaattcacaattctctctctttttggtatacgttttcaacatgtatatttttccgttttttttttaaatagcttatgtatttctaaacgcttttaaaatatatatatatatatatatatatatatattaataaattcaaatgggagagttacacacattaaaagctgatgagagagacctcaatttagtttaaaggattaattgatgacaggttctttttcataaaatgtatttaagttttctcatgtgtcaaacttataattattgatattaaatcaatttaggttaatatttcttgaaaacaagcaagtgacttggtggccttattatatttatatgtgttttaattaatgtttccccaaaaataaataaaaattaacacaaaaagacggatttagatttattaagatttttatattatattttacatactttattaacattatatctgaattattcaaggtgccatttattttaggtaacaatttctaattagataataaaaattaatttatatgaaatagatttaaacaaaactaattagtcattataaagttataaacttataaaaccttaaaaataattttgatgaggtgtcaatttgcctatagagttttttcttttcttttattcataggatatatagatgattgaattatgttccacctatatatgttttagctttttgcgcttttgattttgtaaaccaattaaacatgcaaatactaaataaacaaaatatattattaaatgttttaactaaattatgcttccaatgaaacttttttatgaagattagttctaactaaattgtgttccaccaaatttagtataggatttctgccatctatccaacttttttaaaggtgtgattttgtcaaattttaatacttagagatcttttctgtcataaagctcctttgttttacagaaaaaaagaagaaggaaatactcatttcttttataaatacgcaatgtcttgggtttccttctcttctatctttcatctctagtgcaagttaaaaccttccgaaataataatataaaaaaaaaaaatattctcattagagcatggcttctggtttggtttttttcctccttgtgattattatcaaaatcgtttgataatattctctcaaatatatactctctatgtgtgtggaacgtaactcattagtgaatttacggataattactgtatatgcaggtagcataaacgtaagtggcttggaatttggacagattaatactgtttaccccacaggaattcataaagctactatagtctggctacatgacgtaggaaacacaggcttcaagtaacattctcacatgctatattgtttatcgttatatatgctcttttgttttgaacaatcaaagattctcattaaaattagaaatatgatttggaagtacttcaacttttaagttttttgttattaaacataaaaatagatatatacgtacttttaaagtcttttaatatgtgaaaagttgatttttgccatgatatgcaaatactaattttgtcagttcaacatttttttggatgaacatttctttgtatatataaaggttatggcgctgcaaagaataatgatttttctctattattttacattcctctgaacttttattttcttgtaagatattgagttcatttcactaaaattttacaatatatacattttttttttttttttgtattcgcaatagacttcccattatatgtatttttaactgtctattatgactgcagctcacttgagcctctgcaaaatttgcgtcttcccaatgtacgcatccactaacatacgtatctttaatgaacttaatttctttatagccaaaatgaaaacttagctgaagtttctaatcaacacttatgatttggtgtagataaaatggatttgtccgactgctcctagacgtcgtgttacttccttgggtggagagataaccaatgcatgtaagattagctagattaaaaatttggagacattaaatcattgaaaattaataagtatttgatatctctaaaatagtaccagaattagaaaactaatacttgacttcataaacctctatgatgaatcagggtgcgacatcgcaaaagtttctgagaacatgcaagatgattttggaactttaaattatgtaaatgaatatattactagccttttctctaatgaaccacaaaatggtaatcctgaaaatatctacactttttttttggtgatcaaatatatctacaattaacatgcatagtttatactatctacatcaattataaatatacacatatatgattaattaagtaatctgttaatgttggttttggtagtcataaaaggagtggcaggtctcggcttgggtgcagcacaagctctttattatacgagttgttatgcctttggatgggttcccataaacccacaaattgttatagggatcaatggttggcttcctggctggaggtaggatcttgaagctcttatatcactagtcacaaaattttaaaacttatattacatgtacctttaaataatggaaaatcaaactcaattttgcaggagattagaatacaatatgaataatactaattttgggaccgcaaatcgtgctgcagcatcaaaaatcttaattctgcatggaacgtgtatgtgcaagaatatatattatcatctatatatctaatttgttatctagatatataagaatcacgagatcatatatgctaaaattttgtttttgtttttgcaataaagatccttgctaattaattattgaatttttttgtgtcacagctgatgatgtagttccctcttcattcggatacagatgtgctgactcccttcgcatggctggatttccaaccttgttcaaacaatgtggagggtctaaacatcgattacttcactcttttttttttttttttgattactattttcttaacatacatcactgaatttgagttatataccatgtgtgcagggatcatgtaattaatgagatccgtgtctggctcacaaaccttgggctttgaggatatggttaatttctgcataaagaaaacaaatggggagcaaaactattatcgtacaatataataaagtgtttagttttgagctttcgttttttgtctttgttattcataatcaatagttaatgtattattcttcgttcgaaaccgttaaaaaggtgaattatatttctccattatatatcttagtaaaacaatttccttatctgaccagcaaattctcaaggaatcaaaattgcttcggaaatcctaatactggtatgcataaatcaaattaactttcaaacaaaactttgtgaaatttcctgaagtaacagtattgaaaaccgttacccccatacgaacgttacagagaaaactattttttaaagaaatgattgaataaataattgagaagtaacaggaatatgttttagtcaagtgaatagtgattaaatttgactccgtcttccagagtttgactctgttaaaacgtaatagagatggactaataaattaggtcgaaagatgtaaaataaaataaaaataaaaaaaagtaacgaaaacaagtgcatgttgcgaaaatttatgatgtaaatgtcttcgtattaggcaaagtttaaaacgaaaactttataaaataccaattatgtaatttccgtactaatcacccgaaataactagtgtccaatttataaaagaaaaccattacatgataatacgtagaagtacattcaaacccaataaacaacaacaaggatcggcataacctcacgaacgcaacaaacactaatcaaagcaaacaaacatgaaaaccacgaacacgaaacaaatatttatcctcttcacttcctctgtgtctcacgagtagtggtcgtagtagtagtacttggagctgaagaaacatgttctttgtttccttcatcagtgcgaagccctaaagtgtgcttcaccgcatcagtagctcccatagccatctgtttcacctgctcaccggtctggcccaagatcccactggtcttctccttacctgcttctgcagtctctttggtatattcagctgcatcgtgtgccttgttcttgattgcttctccagtttccgacatgtagcttcctgtcttgtctttggactcttgagctctctcttgagtcgtttgtgcagcttgagacgtcttgtctttagctgactgagctgtttcatgagccttttgttgggctgactgggctgtctcttgagttttgtccttagctgcttgtgttttgtcccccatcgttcccatagcttccccagttttctcctacagttcaagattggatttacattataaaaaatactaatcagctttttttttttttttctaaaatcaaataacacgaaacatcacaaaattgaaaataataactttcaaactcatttttgttttttcacatacaaacaatagttactttttaggttttgtttaagtttctaaaattaaatcatttaatgctgctatccaaaatgtattatagttatgcatataaatcgtttagtacctgagccttgcctctggtttcaccagctttgtaactctgttcttgatgagacgccattttcactcttcgaagaaattcgaaaccaaatttttctaaatgataaaagcttttttttttagatcttgtgttttttgtgtgtttggaactgtgagttgtctccgactcgttagtcagagttatttatagcaagtcttggtcggcgagagaacaagataggtgttgcagtttcgcgacaggtgtgtaggtacgtgccccgattaggttgatgtgacgaagtttcgaaacttggagttatgtgcgagtgttaaagttaggtttctcgttttcatgatgacctatatctatgtgacacgtcatggtaaaaacggagctacggaagatgttagacacgtggtgactcacgttatcttgatattggatattcatctactcaaggcatatattatgcaaccgccattactgcatagatatttacttttttctaaaaagaaccaatacacaattcttacatggattcgaagtaattttaatatagctataaattcttgaaaatcgatcggatgagtttttattgtattcgttattgatatattactgataatatattttttgacaacaataaaaagtcataaataattgtcaccggaaaaaaaggtttaagatcttcctattgcctgtcatcctacttcacttcttgaccaagcaacgttagggtaataaatcctcaaactattcacctccacaaaaaattagccatgtcaatcgtcaatggtatgttattttccacgtgttagtgtaatgcttagatttaggattttactaaaatatacactttctaattatataaataccattataatgcatatcaaatcccttcaagtattctacaagcttacaatcttaattaattaagacatttcacagaacaaccaagaagatgtcgtcgagccagcagttgagccacagcgccggagaagtcaccggtcaagttcaggtacatacaacacacaaaatagcgacatttgttttgcttatatgatctgaaatttgacaattttcgaaatctgatttttgtgatgaatgaaccatcaaatatatgtttatttatagctgaagaaggaagagtacttgaacaatgtatcacacgcaatgaaccagaatgctgatcatcacacccactcacagtcacagttacactcagagcatgatcagaacaatccttccctaatttctcaagcctctagtgtcatccaacaggttaacgattcttctcaaaaattttgttcattattattaattatagacaattatatgcattaattatgattttggagtgtagacgggtggacaagtgaagaacatggcacaaggagcagccgatgctgtgaagaacactctcgggatgagtccggctaccaacagccctagcagcccggctggcacgacccgctcgaacaagcccggttccaagattatctaaaaaggagttatttaagaaatattggctcaatcttttccaataaaacaaaaatgaatattgttttctgattgctttggttgttcaaatttctgaattttgtggtatagtactgtatgttggagacatttctacgtgtcttatataacccctagtaagggtttttatataataaattagtcatatacaataagattattgatttcttatataaggaaaacaaattaaatctcaaatatgtacgtatgaattgtcgatcacaaggtgttgtggttttagaagaatgaagaaatctcttatacaaagattaaaatattattaaacttaactgttcttgaaagttctcaactcttaaggattctacaaaaaatatgagattaccaccgtatgacagataacttaacttgtaattctagactcaatccggattactcattcggttttgatttatgatatgttttaaacttttaatcaattatttgttggaaaaaaacacgagattactacatgattaatcgatcaaatttttactttttttacatactcgattgaaatagaatcatgttattatagatataatattctaagtgtatattttctattgaataaatatttaatataaatacacatctataaaaaaaaattcaccaaaaaaaaatgtatatatatatatatatttaaagagatagagagagcttaaaataaacaatgagtcgatttatactttgaaaagctgttgttgtggtaataatgggctttgtggaccaagtaatgggccctaaaacccaaagcaaatccagtttgctccactctgattgtatcgaacaagtgaaccactgactgactctcatcaaattcgatttcatcgtcgtcactcgtcaatcgccaaatcaacaaaatcgtcttcctcgttcgtatcgttcactcagcttttttcccatcttcttcttcgcatcacatattcttcattactaatatatctcctactccagtcttcctccatgaattcctgtaagtttctctatcttgttgcctcatgaatgattttgttgttctcgtgaatccttgttttaatctgttcttcgttgatactcaaatgggtttgaacaagaagagttatttttgcaatgtgattagtgttgatgcatcttcgtttcaagataatgcgtttaaagcttgtactttataatgctattgtttctctacttgtttcaagactatgacttgcaatgataaattatacattgaaacatgtataggtcaaggtaaaagggatctatggaggagtgttgataactttttgattctgtttcaggtagcttaggagctcctaaagttagaatttttgcaacaaatttcagtagattaagatgtggaaacttgctgataccgaacaatcaaagactatttgttgaccaaagccctatgaagtatctgagtctgagaacgactctgcgatctgtgaaagctatccaattgtctactgtcccacctgcagaaacagaaggtatatagtaatctgtctgtgtatttctgtttcacttgattgtgttttactgtttgtcataaaatcctttagacaatgttcagatttgtggcttatgaagtggtatcgtttgcttgttttcttctttaacattcttcactacagctattgcagacgtaaaagattctgacgagaccaaatcaactgttgtgaatactcacctcatgcccaagtcctccgaggtaggtgttactttcctgtttaacctctcatattcaagaccaagtatgatgcacaactgttatataaccttaggggtttcaatttgggattgttttgagaaatcacaaaagttagaaagttgcatttcagtgcaatagcacgatactgtggttctttgttattatgatgctagagaaggaagaatgtgtgacctcgttgagctagcttagacatgagctatgtcaaatctaatcattatgttacattttcatcttctaggtggaagcactcatcagcgaaatcaccgattcctcatccattgcagagtttgaactcaaagtaagccccacttctgatttctgaactcataactatgttatttattgttgctcagatcatttacttgtctctgctaagttttttcataaaatcgtgtctatgatagaagtagttttactattgacttaagtttcatcttaaccatggtttattgtgaaagtaaaccatggttggtttagcttttctggtttggtcaatgtccttatatagcgtctgagagatatgtgagagttttatcgagtatttggtgagtaatctaggggagtgggaggagctccattaatcaaattcctcaaggtcttgtaattctcgattgataagctatgaaatatcagtttctataagcaaatcgtatcagtctaataattctggtttctcccatttgcatatttctaatagctgggaggtttccgcctgtatgtagcaaggaaattaactgacgaaagtagtccaccacctcagcaaattcagcctgtggttgctgcaagcgcaactcctgagggggttcacactaatggctcagctacttcttcgtcattggctatcacaaaaacatcatcttcttcggcagacagaccacaaacactcgctaacaaagctgctgatcagggtttagtgattctccaatctccaacggttagagactagatcatttctttgaaactgacatgaaatgattaaaattcatgatctctcaactggatggataattatttgttgcaggtcggttatttcaggagatccaagaccataaaagggaaacgcactcctacaatctgtaaagaggtacttcttctcctatgttttgaacaagtctttcaaaatatccatcttcaaggagcatttggaatctctcaattgattatatatttgcttttggttattctacagaaagacatagtgaaagaaggtcaagttctatgctacattgaacagctcggtggccaaatcccagttgaggtaacaatcgtaatccctttcggtttctttacttttttttgctttctcagtcttcttattgtgttctttctttcagtctgatgtttccggagagattgtcaaaatactccgcgaagatggcggtaagaccctatttgctatatgtctttgaatcggtactcatatagctatcaattctctctactgacttttgtttttttcttcttctgttttgtgattcggcagagcctgtaggatacaacgatgctctcatcacagtacttccctcatttcctggcatcaagaagcttcagtaagaactgattttggcttaattgtgtttgtgctttgtgtattttgcttcttagtttttctccacatagacaaaaataagctctactccaaaaaatctttgtccgtaccattacctttgttttaccaaaatttaattgaaacttttttgtttaccactgatattagaacatttcattcttatacatgatcgatgagaaaaccacaaaacaaatacacaataaagaaggaaaaaaatcaaacaaattcttcaaaaacaacctagcaagtaacttcaaacaaatacattaacatactcccaatttaaattccgcctctggtcttgacctagttcctgtccagtaactttagaactgttacaaaacaataagttaaaatgagaatcagttagatattcaaggatactaacctgtactgaataaaaaaaattgatcagtttaagaaatttgacctgagaaattaggaggagagttactcaagatgtacaaggcgtcacgccattcttgaggggttttcttggaggccatggctcggccaatggtgaccaaagctagaggaagaccgtcgcacctggctgcaacctcttgagccactttggctatgtctgggtggctctttatagtatcttctccaacattcttcttaaacaagtcccaagctcgttcccatgccaatttctctactttgatctttgtctgtgcactcatctccttacaaacttcttcggaacatgtcgtgaacactatcttcgaccggttctgcgcatccggtggcggaactccagctttcactgtaaaagaaaagcagatcatttatatcacaagtaatataaacactattgcttgcaccgtaagtaatctttataaacccttaccaagatcaactttctcccaaacatcatcaagaaacaaagcgaaccgtctcttactcaagatctcaaagatcttcgcagctttctcttcctcggacttactcgtccaagtcctatccaagaacccaatcttctccctaatcgtatcttgaatcttctgaagattcaggttcttggacacaaacacccacaaaacaaaatcaaacccatttgctttctgttgaagcaacctgttattaacctgagtcaaaacagtcgtctttccaacaccttccacaccatataatccaataataccagtgttctccatcgtcaaacacctccaaaccaaacccgaaaccgcctctaacccaatcgtctgctcatcgctatccttaatcgtcaatccgccgcccgcccctcctccaatgcctccagtgctctcagcaacaacttcaaacattcctctgctcttaatctcctgaacctctttcagcttcttgcaaatcttcttctccatcttgtggctcgacgatatcaaaccagaagaagaagacgaagaagacatcaagaaatactcctcagcttctttaataacagtgtcggcttgtcttagccatgtttggactttgtcaagccgcttcatctgttgctgctcctcacaaagcttgactcttttcatcacgttgtttccaagatctttgagctcctccgtcgcgattttcagcttctttgcattatcattcatcttcccaacatagatgcatctagtaaccaaactcttgaaatcttttcccatctttcaagattttcccaaagtagattatcgaaattgtgttactttgtgtgtgcatatatatgaatgtgttttattagactgacttgcacgttgtgattttttgccaatgtctagtgacggttgttggagaatttaaggttagttaactaaataaaaaacctagtttaaacagagtaatttggtgtgtgaatattttatttttgttttctttgccgtttatggaagtgattaatacatgttctgatgaaactcagcactacttctcgccaattagccatcaaataacaaagcaaaggagacttttgtttgtatactcaattaaaatatttattctattcattgatcacccttaggtcttagtggttatcatgttatgttaactctgacatctttgtaaatcttacttacaagttacaagttacttacaatcctgaaaaagacagattacagatatatatctttgattgcaacttaatttgtaatctgtcttttttaattagtccaaggtatactttgatcatctccatttcctttcctcggaatcctttgatctgtaacttcttcactggaaaagatttataacaacctttgtcctcgtggaaaattgaaaattcagtcacaagctttccctcatatcttcatcacatcgtgtaagagaccctgaaaacagagagaccgcctaaatgacatttttttttttttttcagagacttcattgtgcagttcactttctataatctatactatgaattgcgttactggtgtaggaagataatgccagcttgaggcagtttttcttatcatggagtagacaagccacttggttttctgttttcactacatgttgcacactcgaaccataagaaactttgttttgtttctaggtcggttatgacttattgatcagattatgtatatgagaatacattcttaagagaaatactcaacacattatatgacattatacatgttcaaaaaagaagaagactagtttctcgattggtttagtttgaaacagtttcaaggagacatgagcaatatttgttctttagagacttcattgtgtagtccacttcttacacaagtaaccacccactaggagctggacattgcaactggatgatttttcgtagtgttccatcatctccgcgatatattgagacacttcagggactctgagctgtgtaggaccattctcttccatatggatttttatctctctcaaacacggaaaatgttccaagaaatgttttatcgtgtgcatctctttggttgttccttgaaaccctttaatctctaacacttttacttgacaagatgtgagtgaacgacctttttcttcttgggaaacgcagtcacaagcattcctgcatttctctgtgacatggtgcaagagaccctgaaagcataataaaggagacaaataaggtattcaattcaaagtaagaactctatatgtgtacacgtttggcaaatgacttgttactatacctcaaggactagagtttctagatgtggacagttccttagaagaactggcattgcttgccatcctcgcctctcgttactctcaatagttaacgatttaaggttgttgaacagtggcatcgattcacaacacttagaaagtacctgaaaccaaaaccaaccacaattagacattttgcccttacatgtctcaaaacaagaactaccctaactgacctcgagagtattaggagacaagttgagatactgaacattccgtatgcctttcatgagcttccccacattaactaatcggagaacaacatcatcctcaacccaatagatatttggcgctcttgctcgctcgatctgatattcagttaccaaaaggctgatcctagcctcagataatttttccattttagctagagggtagtctttagcaacatggtcagagaaacagaaggaaacaagactaggtgtatcaagcgaaagagtgcctaaataatagttgaactttattgttagggtcttgatgctcgcatttgacacagtgacatccctatctctccagctaacagcaaacaagactaattcctcgagcgcaggcaaagcacgaaaaaaaaacttatcaacacataacttaaccgagtgtagaacgagagttttaagcattggtaagaatatgtccccagccaaccaatcaataccaagactgtttattttcagagttacaagattcctgctcttgaaacattttggagacagcggaaggaattctgctccatacaaaatgacaagcacatcaagttcggaaacaccacgagccaacacgttacttatccaagcattcactcggtgtgaagcaaagtcagttctaaacttgagggagaatttcttaatgggagaattaccctgcaatgccaatactctatcaacaaactccatgaagctctgctgaatttcgtacctttcctccttaccctcttcgggatggagaaagacagagtcatcaataacgagattagggacaaacgcgaggagattgcgccatctcttgcagagaatcgaagtcaaagcagcttcttttgtggttaggaaagaaaatatattgcaaagaacaccttctggtagactgctgacatgatccatcttctctgcaaaacacaaaacaacgcaaatagaaactttgaagtaagaaacaccaaaaaagaaagaaaatgagtaaaagcttcgacatctacctatatacttcaagacccaagttttagggatttcagtgagaaactgcaaatacccagtgaaaagtctcaagctttcttcagttggacaagttttgcaaatgcttcgtagaagccgaaacatcaaaattttctttcttctcttgtctctttatttgcatctggcgatcttttaactcaagccgtcccggtttaccgaatcttaaccgatcccatgaatattgatctaatcttgcgataaattaagtgggcctgataaattaagtgggctcacttataaatatacaaatccaatggctttgtgtttaaaactcaaattggctccattgctctgttgaatggcgattcgaacagtctcttctcttgttcgcgctctttaccaaacccctaaatctcaatcatttcgcatcttctctacacttctacacgatccaccatcaccagatctagtaaacgagatctcccgcgtcctgagcgaccaccggaaccctaaagacgatctcgaacacactcttgtcgcttactctccccgagtttcgtcaaatctagtcgaacaagtattgaaacgctgcaaaaatctcggctttcctgctcacagattctttctatgggcaagaagaatcccagattttgcacatagcttggaaagttatcacattttggttgagattttgggtagtagcaagcaattcgctttgctttgggactttttaatcgaagctagagagtataattactttgagattagttctaaagtgttttggattgtgtttagagcttatagtagagctaatttacctagtgaagcttgtagagcttttaatcgaatggttgagtttgggattaagccttgtgttgatgatcttgatcagcttttgcattcgctttgcgataagaaacatgtgaatcatgctcaagagtttttcggtaaagcgaaaggatttgggattgtacctagtgcgaagacgtatagcattttggttagaggttgggcaagaatccgagacgcgtcgggtgcacgtaaggtgtttgatgaaatgcttgagagaaattgtgttgtggatttgcttgcttacaatgctcttttagatgctttgtgtaaatctggtgatgttgatggaggttataagatgtttcaagaaatgggtaatcttggacttaaaccagacgcgtatagtttcgctatattcattcatgcgtactgtgatgcgggtgatgttcactcggcttataaggtacttgataggatgaaaaggtacgatcttgtacccaatgtgtacacgtttaaccatatcatcaaaacactctgcaagaacgagaaagttgatgatgcttatttactgttagacgagatgattcaaaaaggagctaatccggatacttggacttacaattcgataatggcgtaccactgcgatcactgcgaagtaaatcgagcaacaaagctgttatcgaggatggatagaaccaagtgtttaccagatagacacacttacaatatggttctcaagttgcttataagaatagggagatttgaccgcgctacagagatatgggaaggaatgagtgagagaaagttttatccaacggttgcgacttacactgtgatgattcatgggttggtgagaaagaaagggaagttagaggaagcttgtagatactttgagatgatgattgatgaagggataccaccgtattcgacaacggttgagatgttgaggaatcggttagtcggttggggacaaatggatgttgtggatgttttggcagggaagatggagagaagcagttcttgttcggttcaagatatggcggttgagatgagagggaagagaaggagattgggacgtagaagtgaaaatagtgaagatgatgatgatgattttgagcttgaaagagacactatatgagaatatacattttaacatttgaatcatttagagttacatgaattcaagattttggatgtgcaatgtttaatttgtttaagaacaatgtacagagtgtgtatctgggaattggaaattaataatttcaaccggtttggttaatcaaaaccctctcgatgattcagagggttccgagttttatattgttctccttcttcctctgtgttgtttcttctctggtgaaacagagttaattttggcaccgacgacggtagtgtgtgtggagctttttatagatagatctgagagacactttacaaatctgaagttgcaatttcataacctaatcaaatgattggatctccggtgaaaccactgttcgtcttcgtcttaactttctctcttctcctcgtcgttattcttctatccccgtcgccacatattctgcagattccgtttccttccggttcatcagtgtaagtattcgtctttactgcttcgaatcgtatcacacggttactgtattgagaagtagtcagatgtttgatcatatagaaacttaatcaagtaaaattgaattgtgtgtttctctgcttcaggggttcttctgatatatggagtgtgaagaggataatggaatggagaccttgcaaatggtggttacaaggacacctcactcgtatgcactcgtctcttatcatttattctaagttttcacttttagttctatgctgttgaaagattttgtgatgggtctaattctagaaagttctgttgatattagtaatttgctcacttgaatctggtttttttaatcctgtaccaaaagcttggttttggtcgttgaaaagagaagactttgcagttgggtagaatgtagattgcttgtagtgagtgttacttctctgaacttttgtgatcggtctttcattgcagacaactgctttggttttttgttcaaatcctgcagctctacctgctaaaactaatggatatatacgcgttgattgctatggcggcctgaatcagatgagacgcgatgtaagttttaaacaaaagatcgaccatttcatgaatcagtgcacatgttattcatcaggacttcaacttgtattatatctgccttaggaagtaaatcatatgatgatgtgatgctgcttgcagttgtgtgatggagttgggattgcccgtttgttgaatgctacacttgttctgccaaagtttgaggtagctgcctattggaatgagtcaaggtactcctactttctcttgaaacttagataacacaattccaagcgtgtgcttcgttaaattaatcaaggaagagactaatcagtgatatttgttgatgcagtggatttgcagatgtgtttgatgtagactactttattcaaaagatgagtggttatatcgaagttgttaaagaattgccaaaagatattgcatcaaaagaaccattcaaagtagactgcagcaaaaggaagggtcaatttgattacattgaaagtgttcttccactgttgttggaacatcattacatttcttttacaccagcaatgagccaacgcagggacaggtgccattctaatagactataaaagcctttgtctgtagttgttatttctaaaatatttcaagtatcttactcttctacgttgataaaatacattttcaggtatcccgaatatgcaagagccactctgtgtcaagcctgttattcggctatacaccttactagttccttggagaagaaggccgtcgagctttttgatgctattcccaaacccttcttgtcgcttcacctcagatttgaacctgacatggtagcgtacagccaatgtgaatacccaaacctctctccttcatctatcgctgccattgaagctgctcgtgctgataggaagccatggactggagaactagctcagacatggagaaagcgaggcaaatgccctctgactcctaatgaaacagtgttgatgcttcagtcacttaacatcccaacaagcacaaacatatacttagcagctggagacggtctaatggagatggaaggattcacatccgtttatacaaatgtgttcacaaagtctgttctacttaaccaagaggatttcaccagaatgcatggaaacacaaaagctgcattggattatcacgtgtccatcaatagtgacgcatatgtggctacgtactttggaaacatggataaaatagttgcagctatgcgaacatataaacagatgcataatacactgttcctgagcagaaaagcatttgcggagctcacttctcagggtcttgaaggtgcagagttgaagaaagctctctgggaagttcataaaagcgattttgccattggcagaggatttgctttgcccgactgcttctgtgaatttgagctgtaatgctgtttcttttcttaccacattcttgagctgacacaacttttgtaatgacaaaaatttgttcatgtactatggcattttgagagtcgatgagacgctcctgtctggaaatacaagaaactagtatacattctgaaatcagtttcttgtctttattcagcagcaaatcatctgtctttatcttacggagattctaccggttctttggtgtcagctttttcaaccattgcatgcaaaatagttgaagcctcgcatatcactggttgaggtaagtgttgctctaaaacctgcgaatacctaacagctacttcaagacccttctcacccagattgcagaagtccatgttcctccattgctttgagttcccaaccacacaaaaaccatgtaaaatagcagcaaatgaaacaggatcaggagagaagcctttcttcaccatcttatcctgaaacatgcatgcggtcttcaccattccatgtacacagagacaaacaagggcagaattgtaagcagcagcgtggtccgaccacccatctgatttcattctatggaaaaactcagaaaacagagaactttgtccatgattagaaccatccggttcagcaagaacttttccagatgttttcttcacaaatccctgaagtagacaattgaaggtaacttcattaggaacacatttgtttgtcatcattagctcccaatagtaaactgctttttcaagggtactactctctttagcaagacttcgaataagtgttgtgtaggtgacaacgttaggcacaaggtcccgcaattgcatctctttgaaagtctcttcagccattttgaagtctccttggcaacaaaaaccattgataagtgatgtgtatgttacaacgtttggcttacatttattcttctccatgtatcgaaaaatctttatggcagtagccatatcctgttgctttacatatccgtcaataattgtggaataagtaaacttatcgggtacaaggtgttcttcattcatcctattcatgcacgccaatgcctcatccaacattccagatctgcaaaacccttttatcatagcattgtggtgcacgacatcaaccttcacacccttttcgactgagagactgaaaactttccttgcctcatcaaaatcaccacttctgatgaatccatctatgagcgtggcataaacataagcatctggtaagatattccggtcaagcatctccgagaagaggagtttggcaggtaaaaacctaccggtcttgcacaatccactcatcaacatattgtagatggcggcatccggtgaaactcctctatctatcaatttaactttcatattaactgcatcatccatatggcctgaaacaacaagaccatggataagaattccatacgtaactatatctggtttgcatcctctttcagccatctgtagaagcaacttagaagcaatatcatactctttacttttgcaataggcttgtatcagaggggcatagcttaaattgtttggaatcaaccctttctttgatgcttcatccaaaaacccaacagcgacctcctttttcccttctttacacaagcgattaatcaaaatgttatatgttgctacatcaggcttgcagtcattagctattatccatcctatactctcagcaggatcaaccttataaccgtgcctatacttagcatcaatgatattattaaggaaccaaacactaacccttaaacccctttctttcacttcactcaaaagtcgatcactcgccacaaaatccccttccttgcagaacccgttaatcattgtaccaaaagtttccaaagtaggcataaatcccttcaacttcaactccttgaaaactaaatacgcattttcgatatcgcccagcttgcagtatccaccaatgattgtgttgtagaacacaatattcggaatacaacctttaccccatcgaccttcaatcagctttctacctacttctacctttccttcattacacatacccttgaccaatatacaagtactgtaattatcaacactatcacctctatcacacatttcgtcatacaccttccgtgcatctccaagtctcctacttttcaccaataaactcaacaacgagttacaagcaataacatcaggcacagaatcatataactcaacaacataatcataaatctccactgctttacttaaacttccagattcagcataagcgtgaagaacatgactcaatgcttcatgtgtaagcttcacattttcgtttctgagattacccaacacatcttcaatctcattgaagatcctatacctcgctaagagcttcagaaacgaagaacaagcgaacccattagaaaagaactcatctttcttctcactcgatagccaatcaaaaagcttaacgccgatttcaacatcctggattcgatcgaatacgaaaggtgaaatgtcgacaaagcggacttcttcatcagcgaagcaatcgtcgagaatttgagaccagttttgttgggttttgaggatggatacagtgtcgctgactagtttcttgatacggggagtaatcggaagatgagatcggaaggaattagatgcatgaggattggagagaggtttgatgcgagagagaagggttttagacattacagacgacggtgagtggtttcgtcgtcaacggcgtttgattcagaagtagagaggaatcagttaggggtggggaagaagagagagaaccggaataaaccaaaccaaaccaaaccgaaatcgaaccaactctgtttatgaaacactctcattacgttttcttttgaattataccgaatcgacttttaaagaaaagctaactaaatagcaccaaatggagttataaattgttttgttctataagttgataagaccgatggttggttattagttatcatcaattgattacgctgaatatctgaattttgtctgtgtatcatcaatcaattgattgcttggtcaggatctatcgtcgtagagccggtgagtcggagagtcgagttttctgggaggtttgtggcgggtttggtgagtcgacggtgaggtgcatcgtcggaaattggtttcttccgatggtggttttcaatccttcttctatgcctcaaagtcgtggaccttgaaaccaccggatctagtgcgaatggttctctgccactgggaatcaacaagttccgagcttccgttctattttctggtgacattttccgatctcttttttgtatctgtttccaagtttgtatggcccaaggcccagtccattgagatttaaaaaaaaaaaaaaaaaaaaaaactttttggatctattgaagatacatggcccggttaacattggttatcctgatctttgtttgatgttctaattaatcatgtatataagtaactacatatgtataagcttagagaaccaactctgtttatgaaccactctcaatttatggattcttcgcccattccacacacttgccttgcctaattctttttttaattaaatattaccatatttgaattccaatacataaactattatattaaaatatttttactaacgtaataggtcaattttttattttattttttgtgcaccacgtaataggtcaattaaactgtgaatcaccatgaccgtcaaataatcatatctattttactttgattacgtaaaatatctgaattttatttcttcacatcgtgtgtaaattctttttggatcagcaagattgttttgtcttttgtccatatgtgccacgtggaccaacgcgtctgtcaccgttagtcactgaatcttttgagccttacaaatcaaattatatgttgttatatagtccaataatttttttcataatttgaaaacttctcttaaaggatttgttttcactagtatctacaagtattgaaatttaagtgaacaaaacttcagtattttgttttaaaatcctggctccaatcatattaagcttaggttggtttgttgtaattagctaaagaaaagtaatgacaatatcgagttaataaacaaaataaaaatagggtggcataattctagtgaaaaaattgcagtataacgtttttttccacttgatgcattgaatcacaatcggagccgaagtgtttgtgaaattatctaaacgaggtaatgtcacactattatgatgggagtcccgtcaaatgacctcattatctattgggccatatgaaaaggttttcttatttcatacgatacagtatcgatcgtttccttatatacaagagaagacattagtcttacgacttaacctaattccaacatatggactaagttaatcgaggcccatatggcccaatattatcttcagtgggcccaccctgcttttagaagaaagaaacgaaaatgctcgtcgtttcaccctctatcaatcacgccggaaagcagttcgccggtgagtagagtaccggagttaaaaagttactatctttgtagataaacactaatttgttttcaaaattcgaaaatgttttgaagttccgaaataaaaacaaaaaaattccagtcgtaagaaaagttgtgactggttagtagtactcttgggcaatgccagattgccagctaagggagggagcaacggctcgaacatataccacaatctctctaaaaagcacatttgcagtcatctttcactcatttgcattcgtccaaaacaccgcaaaaaaaaaatattcactcatcggcaacaaagagagaaaagatgcctcctcggtctgtcccacaagccaagatgcaaaggtatttcgaaatcatgttcttcttcttcttcttctctggtttgaactctctctttcgttacttttccaaaaatcggtgttttttttctaatttcttagcatcctctgatttagtctctctgtttactgtgtgtttctctaactttactctttttgtttagttttttcaaaatgatatagtattccagtttctcttcactcatttttgcaatcatgttcgttttctacttttttctacatgttcatgtttgtttctgatacagctttattcttcctctgatttcgttagttcttccaaaaacctgcttttttctagattcttagcatcctctgatttagtagtcttctccgtttgttttcaggatccagaacgtctacttgcactacatgttctcttaatcaacgccattgtcatttcgttggtgttcacggcaatagctgccggtagggatgacaacgaaacaatttccgagtccaactccaacaactcaacaaccgctgctcctcctcctcacagaaacatgcccgaccggatatcggtttgttcctcttcgggatacttttcgtagtatatctcatggtgaaatcctaccaactttctcttgatgacatctggtttcctttcaagaagttcttagatgaaatttcattgtggcttggagttgtgtcccttgttgttctcctgctccttaccactacagtgtttacaatctacattgcagtcccttcagtcatattggcgatagtgggaaggttcatttttgggagaccctgctttctagaattcggctacatcaccttcctacagatatcaaaatggatttgttatctctggcttctaatcgttttgggatgtgcaaagcttagaaggaatttgtttacagggacttcagaggaatccagaatgttactaacagatagggttactaaatcggggaatgcaaaggattcttccctcgtgaagtggaacaagaggattgccgctgcgagagctcgcgcaaccgctgaatctgacagagtggccaaagagaaagccgatattgaagccgatgaggacgctgccgagacagccgaagtcgagctcggcttgatggtggctccggtcaatgcccaataaggcccactttagttttccctcgttctcttttttatgtcgcttgagttttaaataaggcccagtttagccaaaccataagacccaatctagttttttttccttcgtaatatcgttttgtgggcttgttttcttttttagttttggataaatggacttgagcttgtttcttcttgcattacatttatttacacatctgtttagtttagttatgcaaattccacctttgtttcatttgaaaataatcatagaaaattaaaacaatgttaccttaaagtgagattatagttgatctgaaaatgaatataaaggaatctggtttgttcgcttcggtgtccttttaagaatgaaattaaaaaagtcttatttactttacaaacttgagattatagattgccaaaccttctcaagtcttaccaccatattatagtttgaaatggatatcgtgatcatcaagcagaatcactaaatctccaaattcatttttttttttttgtattcaaccacacgtacgtacctatgagccactcttgaagaaaattgggtagggggttataatgtaaaaaaacagattttttgttataattaattggtaaaacatttttgggaaaaaagctaaaaaaactctcaactaattttaattttgaactttaatatccaattgttttagattggaaaataaaaatctaaagtaataaatcgatatatgaaaaaatataatttttttttgagtagttgaataaaacatgcgggttaacagacgttaattttgctaacaaaaactttaaaccgaggttaatggttaaccaaacgtggttaatttggctttgcgaaagactaaaatgtcctcgttcgttttccccaaaatcgattcgttttcaccaaatttcatttgggatcgcgaaagagaaatcccaatttctctctattctgatttcactctatcgttttgtctcctttgatagagtgagaggtgatgattgttagcgtttgatcgggtgaatctatgtttgagtctgttcgtaatctatcgaaaagatgaggtatgtggatttgtgtctgtcaattcgaatttttagggttcttaagcttctaaaatttttaggttttgtttgaaattggtatagggtttagggatcgattaggttttactttgtttaccaccactaactagttaattttatcttttccagtgatttcgagtgtttgaaactcaacataaactacagaggagatgtatctcttaaggaccaatcattcaattacactgaaggggtcgaagttaaagacttgttgatggatccagatctgatgacgtggtcaatcttcgagaatttttgcaaagaaaatggagttaatggtgaagtcgaagcgaactggtacaaacttccacaagagaacaatagttcaacaagagttatcggcgccgacaaagatgatgggattagggagttaagtcgtgaggctgtgataggcggtgaagttgatatatacattgacaatgacatctctgtacctgcacctttttctcttcgaaatcgtgatgatgatgatgaagtcaatgaggaaggagtagatgatgacgaagagattgatgaggagactacagctgaaacaaatggttataatcaaggattacaagatgatggaaaagatcctataaaagaaagaatgcacgataatcctaggtttgaagctttctatgaagaaattcataatggtacagaagctgcggaagctatggatgaagagagtaacaaagttccagaagatacagttgtcgaagaatctgatgatgaagatgaatttgagacgcaatgttgtgatgcagagcgtccagatcatgcaatgggcacagatgatgaatgggatgcgtatgaccaagcagaaagagtatcatcacgaaagaagttctcgaaggataaatctccttacctttggatgttgcagaactttaatagtggtgaagagttcaaagatcaactcttgaggtatgttctaacgataaattatgatgtgaagttgtgtagatggggtgcgacaaagttgacagctatatgcagtcatgacagttgcaattggaagatttactacttcgcacataagcgtacatggaaatggatagtgcaaacttattttgatgagcaccaccattctaagagtgggaaagcaagaatattaaaacaggggatgttcagagatgaagaaagaagacgaccttgtttgcggtggactgacatcaaagatgagataatgatgaggtacacactttctatgtctaagtggatatgtctaaaagcaagaatattggctttagatatggtgatagaaacacaaaaagtgtaatttgctaagttatgggattacgaggctgaactttagagttctaataagcatacccgcacagagatcgtgacaattcctaaagcgtgtgataaacaacagtttggcaagttttatgtttgttatgaggctttaagaagaacatgggttaattgttgtcggtctatcattggccttgatggggaatttttgaaatgaaaattaaagggtgagattctagcagctatggggagggatgcatataataggatctatcctatagcttgggctgtagttagggtggtggacaatgagtcatgtgcttggtttgtggagcacctgaagaatgatttgggtttaggtgtaggtaatttgatagtgatttcggataagcagaagggcttgctcaatctagtcgttgacttgcttcctcaagctgaacatatgcattgtgccagatacatctatgccaattggaagaaggtctacggggactactgtcatgagagttacttcagggccattgcatacagttcaacaaagggttcttacaattacaacatggaagctttgaaaagttatgatgcatttgcatatgaaaatttgcttaaaacagagccaaaaacatggtgtagagcttttttcagtgggcatgctagttgtgaggatgtttgcaacaacttgtcagagagtttcaacagaacaataagggatgatcggaagaagccggtgatgttaggcgacaaaccatgaaacgtatttctattagacgtgacaagactgctaaatgtaactcaaagttttcacctcatataataagaatacttgaagcaaatcgcaagtcagccaagttctgttctatcctcaaaagtagtgagcacatatatgaggtgatggaatgtagtgcaagcttcagagtcaacataccttgtccacatgcaatctttgtcatcaacgaacacaaccgtgatgcagaagagtaagtgcatccaaattcgattgttaatacttttgtactttgttgattgatataatttatctgtctttgtagctatgttgataagtatttactgacaagtgtttgacaatcgacctacaagaaaaaacattgagccagtgaatggagagatgttgtggaagcaaacaggaaaagacacaatttaagttttgatagaaggaagaagagaggacgtcctaagaagtttgttaggatgctagaaccaggtgaatcagtaactattccatcaaaggcatcaaaagcaggaggaaatgtgacttgtacaaactgtaagcaatcaggtcataacaaaggaacatgcaaaaatgtcatagtacaattacctcctccacgcaaaagagggagaccaagaaagagtctggtaagttatatgacatttttatgttagtgttttggctaaatttgaactatgtcggatctaagttgtaaaacttgtcataggataatgatgatccatagagcataaacaatgtaccaagaaggtgcagcaagctcaaagtcagtccagaccaactggtgctcaaacccagtccacacaaatttctcaacattcaagtgctcatgcagcaaatcaaaagggtacatgacgtgctagtggacgtcccccggaagtgtaaaatggtgaaggcaagactagtggcaagggtcgtgcaaagaatctgatgaacctcctaagccgcctgtctttttcatgtctttatggactaacaaagtctttgatgtttggcaacctaacaagcaatagtcctcgatcatgtcttttaaggttcttattgatgtaggatgatgtttaattaactatgtatgataatcattaatcatgtaggatggtattgtgtgatcctagtttgttttttttgttgggatctttattttttttcttaaacttaacaactcttttgatttaatagaatgactatttatgttaattttagattctattactttaagcaagacaacaacttacataccacaaaaaaaaaaaaaaaaaaaaattcaaacaataacaaaacactacttccccattgcaagcaccaagtaccatcccaatgacaataatgaagccttcccaagactacacaataaactgacgaagcatttttttttctctcattagctaccataacttcattttcaagcttctccttttcttgctcgtcgagtttcaccaacccacggttcatagttgtcgaaccactcaaatcttggcaactcatggccttaagagattctttaagtgccttgatttcctctttctgttgacgaatctcatcctggcttctaataagctcactttctgccaactatatgccttctcaacatctgcccaatcaaagaacccatgagcaccacatctgaaaaatctttttccaggattttcgttagtccacgctttcacaaccgtcgtagctctaccacaattgcaaagaggaccccaattcctgctcgccgaatttgcattagactcagagctatgactaaccatcgtaaataatataattgaaattaaggttgtaagctttcacgattgtaaactagtatttggggaaaacgaacgaggatattttagtctttcgcaaaaccaaattaaccacgtttggttaaccattaacctcggtttagaaatttcgttagcaaaattaacgtttattaatttacacatcttattcaactactcagataaaaatcatgttttttcatacatcgatttcttattttgggtttttatttttcaattaaaacaattgtgtattaaagttttaaattaaaattagttaggattttcttttagcttttttgatattattgttcatttgttctttgttattgtcgtaatcttgatatcattattgtttgtcgtagttttgatattattgttgttggttattgccgtaatcttgatattattgttgtttgttattatcgtaatcttgatatcattttgatatttactttgttttggataatctcttaactgcgtttctgacggaaaaaaataataagaaaacctaactaagtttttctttgctttttacaaattttgaatataaataataatgactataatataaatacagcacttgtatttattacgaaaccaactaaacgttttttgataaacatatttctgatttgttattgcagagagagagagatcatggaccctgtttattggttattaatcctcattgctgtttcgtttgtagtgggacaaatattggagtgttgttttccatacggggtgtcgacaaaagatacagacactgggctgacaaagaaaaataaagatacactcactggcggtgccgtggtgaaggtggtggtggtggtggtttaggaggatgtagttgtgtgtgtagtggtgccgtggtgaaggttgtggtggtggttgtggcagcggaggacgtggtgacggcttagctaggtttcccctctttactttttcttggttatttcaagatatttgtatcaatattggattttaatttcttcaaattttctgtttgaatttaatcgtttgattctgttggactagatattatctaaatttctacatctctttaaaaaaatctagataatattaacaataatattaagtaaggatatcaaaatagataaccgaactcaactcaacttataatcaaattagtttagggttaaatgagttatgggttgaccaacctattttgttaaatgggttgagttgttaaatgggtaactagtaatttaactaataattattataaaaaaataataaataattatcattattaataattattaattcattatcatcaaaacttaggatatttatggatttcactttttactagtttacatttttggcgtgaaaattacggatttacgttaatattattaacaaaccaaatataactttttttttttaaatgcatcttgattcattttcagaaaatttaaacattataatattggtgaaatcttagaatttacgaatttgagtcgataataatatgggacggtataccataggtgaaatcctagatttaacaatcaaaacataaatatacaatcttaaacacaaaacaaaacaaacaatatcaacaaaacaaatacaacttaaattttttttttttaagaaacacatctcgattcttttataagaagtataaatattataaacatataaactttctagtacgggtaaaataaaatattattattttttaaattaattatattgagatcttattttgttgggcttaaatattagaaaataattccacttaagcaatcaaaaacattatgttcatttaattaatataaacgtaaagcattaataataataggactcggacccctgcgatattgatataatcctattttcactgattttatttatgttttaggtataggattttgagtctttatgttatttctcgagtctttttagtgtcttttcaagtattctatgcagtgggacaacaatggagatgtggagatattttggagtaaaaactaaagaaaagaaagctaaggacgattttggactcaggaatcaagaggagtacataaacgaaaaagataattgtcgatattataacggaaagttgtaataaagaggcacaacgaaagaaaataaccctaaatattttacataaagttgcgataaaaagacacaaatggaaaaataaccatatataaaaaagttacgataaaaagatacgaatgtaaaaaagtaatcatcaatattttaacagacacaattgtttacgataaaatacagttctacgagaagttgcaataaaaagacagtaacagtaaaaataaccgtcaatattaaacaaaagttacgataaaaagatacgaatgtaaaataataactgtcaatatttttacagacacaactgtttacgaagaaaaacacgaatgtaaaaaagtaaccatcaatttttaacagacaaacaatttacgatgaaaatacagttttacgagaagttacgataaaaagacattaacgaaaaaaataactgtcaatgttaaccaaaagttacgataaaaagatacgaatgcaaaaacataaccgtcgatattgtaacagatacaactgtttatgatgaaaatacacgaatgtaaaaaaataacggccaatgagaagacacgaatgtaaataaataaccgtcaatattttaacagatacaagtgtttacgatgaaaagacaataatgtaaaaaagtaaccgtcaacaatttaacagatacaactgtttacgatgaaaatacacaaatgtcaaaaaataactttcaatattttaagagacactactattcaaaagtgtaaataacatttattattaatagattaaaaaaaataaagagagagccagcttttaagtttgatcataggttgtttttattattttatttttttagatttggaccatttttttatttatgcgtgttatccttgggtaggaaccatggtaatcttctttgtatcgtttcaattttatcggatgaccccgaaggaaccgatcataggattaacttatcttaatattttaggtaaactcattctccagtctccacaactaaaaattaactttccactgtttataatttagtttgacaggaaaaagaagattctactctttaaaattatctaaccacaaaaacgagtatttaaattgtttgtctttttctttttttccattgaaataacaagactttaagggtttgcactctgcagagtccactcctttccaaaagactcaatcctttgacgttataacgagtaaacccaatgcacctatgagaatatactgcaagaagagaagatacaaatgtagcggtcacaaaaccggaaacaaaaagcgaaaaatattcatttttgattggatcaaagagtgaaaatgtaccttgatgataggcttttctgtcatgataatagtcacccatccaacataaggcaagaacctaaatcagacaaaaaggtaaaacaattatgagtcacggaagagctttgatttaagtattgcacaggtattgagagtattgtgactcaagtatactaattacccgacagcacgacccattatatgatgtcgatgaagccaaagctgtccttcagcatacagaagtctgtcatctccatagttattgtcacctggtaacataaattgaaatgtgaatgtgtgtatccacgagtaacactaaaaaacaactcacagtacctttcgttagaacatcaacttctcctgtattttccctttcgtgaacctataatgtgataaacgcccaagaatcagttaggtttctacaccaatcttttacaacatacgtaccaagagataataagaggaagtctagaaaaatgttaccttaatgacacgatggacaatgggaatatcacgaccctgaggagaagcatgatgcaaagaaaaaccgattaagaggaagacccacgaattaaaggagagaaaatgagacaaagagaaatgggaaacttacatcaacattgaaaacaacaatttcacctgctcgaatcgggtctttactcatgtgcaagaacaatatatccccctataagatatcacattcaatacaattttgagttaacaaacagaaatatgctgaccctcaaatagattattagtagctgattcatccacaaagagagagtaaaggcgctgtaaaatcttatgtatcccgaaaacctaagtccaattaccctcttaaaaccgggttccatgcttccagagagaacaaccaccaccggagattcgcttccagtgacacacatcaaagctttccatatgatcaaagcagatgtgacaatcatccctaccagaattcaacacagagagcaatttatcattcacttaagacacaacttctgtcatataactcatattgaaaacaaataattcaaccaccaataaacaatcaggtgtctaatcttgttagctaagaacaaaaaaaaaggtcacaaactttaacaataacatttcccctcaaaagactatatacttcaaaatcgcatgtaagactagtaaacgatctaatgaaacaccatcaacttcattaattctaataaccaaaggggtctctaattttctggaaagatctcaactttattcaaataacaaaacgccactcgaactgtaaaatcggtcacggaaatccaaattggactgaattcgatgagacgaaaacacagaagcagaatcatattgaaaaccaataatccaaccaccaataaatcatcaggtgtctaatcatgttagctcagaacaaaaacaaaaagtctcaaactttaacatttcgcaagtaagactagtaatatactcggaattagacctaatttttcaggaaaacaatcacaaatggaacaccatcgacttcatcaattctaattaaccaaaaaggtctctaatttactgcaaattttcaactttggagcagcgaagttcatacattagtgaaaccttaaagccaattcatcgatataaggacacagaaatccaaatcggactgagttcgattagatgaagaacggagaacgaacctagactgatggcctgagtgaaaagctgacgaatctgaatagatttgatagaatctacagtttctccgatccaacccatcttgaaccttcgattatttcgattctcgcacgaagtgttataattcagatcgaagtgacgaactttgtctcaaaagcgtttgcagtgaagaagaagagtttctctcagagtcagctttaaggcacgacgagcgttttctctcaagatcggtaccaaataaggaaaccggtttacaaattaggaccggtttaagaaaattctttagtgacgtggtttaaatctttggttggctgcattttgatgacgtggttggctactttttaatgacgtggcatatcctttacccctaggatcaatccttatttacggaaaaaccacttctcaaggaaactaaaatcaaagctaagccaaactcagtggctctccggtgaagctttgagatggcgatccttattccggcgagtttcgggcgattaacaattacgtcgcgtgcacaagttagagtgagagtttctgcttctgctaaccaacgcactattcgtcgcgattcagtggattgggttaaggaaacttcaagctttttcgaagaagataaaaggccgatcatgttgttcgacggtaatcacgtttagttgattctttaatttcagtgtatcgacatcaattagtaaaatttcatttatattgttttagttgtacgatttttttcaaaattttcacttatgctatagttttatcatacgcatataactatataagttttgggtctgtagaatgtatcaacgtagtgaagtcgatgtttatctcaatcttagtactcttgttcttatgtgataggtgtttgtaatctctgtaatggaggtgtgaaatttgttagagaccatgatcgaaacaggttagtgttcatttgaactacaagtttcattttttcactggagagtcaataaagaactgaaatggaagggaaaaaactatgcaattgttttcaggagcataaggtttgaagcattacagagtgaagcgggcaagaaactgttattgcggtcaggaagagctcctgacgatatatcgagtgtcgtactagtcgaaaacgataggtacattgacagtaacatttatgttttgatatgtaactgtaaaaatctttgcagggcatcaattgagtgatatattttgttttttcaggtcttacataaagtcagaagcagttttgaagatcatgaaatacattgacttaccatttccacagcttgcgttcttcttgcagtttgctcctctgtaagttctcgcttaaggtttaaatagcagaaggaaacgccgcgatgtgattgatcttaataagcatttttcttttgacatgttgcaggtttgtgagagactttttgtatgaaaatgttgcaaacaatcgatatgcaatgtttggtcgatctgattcatgtgagctctaagaatacatatgtgatcctactttgccacaaaaaaaaaaactagatatgtaatcctacagattaatataagcttttatacagatgtatagtttacaacagccattaaacaatagatacatatgtactacttttcgaatcatgtactcgtcaaatgtataacctttccgacgttgatatttgtgttatatatatggaaaaaaacttgggattgtgtgaaattgtcttttttcagagaatgtctcactggtctgctggctacaagctgctaattgaaatctctgaatggcatgctctgtatggtatgttctctaagaagcttagtgtatcccgcaatgaatctgcagaaatttcaaggaaaatttcaattatttacaggtaagggatgaaacttttcacaacactgagggttttgtttatgtgttgatggagaattcggctacttttgaacaatggttcattaaatctctttcgttaacttaccccgcaagaaggatagctagagatgtaaatctgaagatgtgttgataacacttgtgttttgatttcttgtgtttcatgtcataaccaggaggaatgtattttgggttcacgtatccgtactgcggacggagaagaaggacgaacccgaggaagaaaccagctaggaatcctccaaaatgagcagaattgtccacacgtggtaagaatccgacgcttagattcagtacaatgatcaggattaatgtcataagtgcggtgcactacaaaaaagtttgagatcagctttcaataatgcaccatattgaaaatgaataatctttttaccttattttcatagattgtccagtttgtgatgagctctgagagcattgcaccgagtaatccgaacaaagcaccagatgctccgactgatacccgttctccttgggaatctgttaagcaagacaccaggcttcctccaagcccggagatcacatacaaagctccgattctcactgtaacaccaaactcttaaatcagatcacagaaaattcaggagacggaaaatagaggggtttaaagggtcttactgaatccaaattcttgttcaaggcgcattccgatacacatgaggctgatcatgttagccatcaagtgaaggaaaccaccatgaagccatatgcaagagatgagacgccatctctcaccttcctccacaagtctcctttcgagagctccgagttttctcagcctgaatcaacaacaaagatgcattctgtaagtattgaaccagtttttaatagattccttgttctaaccggagagaaaaaaaccattatggaatcaagaaatccttccttacgtgggaatagaaggaccgagtagcatattctccttaatcggttgaaacgaaagccttccaaggacatcaaataagagacactcatctgatcttgcagggcaatcgttcacatacatggtggtagcgaatgtgacgaagttggctgctaaaatgagaggcacaagccacgcaacccatggcacgggaatgggcgggcgaaaatgtggtcgcgctggtggtggtggtccgttttcgatatctggtggaatcggcggtctcttccccatttctggaaaagagtatcacgcgcgtttgctcgttagctttttggttgaggtttgaggattagattggaccgataaacttggggaaaattgtgaagctgagagagagatccggactatcttgtggccaaagtaagagcttttactttctctctctccctcgctctctctctttttttaattacattaggcagttatgttcggtaaatctgtttggtaccaaacagattcctatcaaaaccaggttggaaattaaaaaaaaaaaaaccattgatatacctggaaatgtaattctcatgtgtatgttgtctgcaataattaaaatgcttgccaacattaatctatttttagttatttttttctgtgaccgatttacaatcattaaggaatttttgagagcgattttagtatcatcgttaatcagtaatctcggtcatttggacacgtagcaatagtcttaaactcaaagccagttttttgtttttttttgcttcatcttctattaatatcacaaaaacattcagcagctacacacacaaagtagcttccttctcggatcaaacctgaattcttccaaacaagcttctctctcaatctctgagaaattttgcaggtagtttcgttttctctcttcttcctcttctctgcagatctttttcctttttaaaacgtttatcttggagatcacatatcgtctggtttctggtattcttgttgtgaagcaagtgggtgtataaaatgtttatgaaactcataaatactttggttaaagtttaaacattcgttatatgattgcagtatgtaatttctcagtgttttgcttgcctctcaaactgtttctgtgattcgattttgttttgatggagatcagttacttgagatttagagtttcttctgtttcctcggacactgattacggttaatgactttagcttgtagattcgtctctccctgcacataaatttactttacatttttaaacgaaaaatattgtttacaggatctgtaaaatgtgaatttacgtattttggtaatctaatgtatgagttttactaatattgttatgatgttacaggcgggaagaaaaaatggaagagtgtttgttacatggaagattgcacgcgacaatctacgaagttgatcatctccatgctgaaggaggtagatcaggtttcttaggatcggtattgtcttttgtctctctctcatttataagttgtttagagatacaacaacaaaaggtttccttcaatctgtctttaatgttctgtttttaatctttccagatactagcaaatgtagaagaaacaatcggtgttggcaaaggagaaactcagctttacgctacaatcgatcttgagaaagcaagagttggaagaacgaggaaaataacaaaggagccaaaaaacccaaagtggtttgagtcttttcatatttactgtggtcacatggctaaacatgttattttcactgttaaggatgctaatccgattggcgcgacgttgatcggaagaggttatattcctgtggaagatattttgcatggagaagaagttgatagatgggttgatatcttagataatgagaaaaacccaattgctggaggatcaaagatccatgtgaaactccaatatttcggtgttgaaaaggataaaaactggaatcgtggtatcaaaagtgctaagtttccaggagttccttacacattcttctctcagaggagaggctgcaaagtttctttgtatcaagatgctcatatccctggaaactttgtcccgaaaatccctcttgcgggagggaaaaactacgagccacatcgatgttgggaggatattttcgatgcaattactaatgctaaacacttgatttacattactggttggtctgtttacactgagatttctttagtgagggactcgaggaggccaaaacaaggaggagatgtgactgttggtgagctactcaagaagaaagctagtgaaggtgttaaggttattttgcttgtttgggatgacagaacatcagttgatttgctgaaaaaagatggacttatggctactcatgatgaggaaactgagaattttttcagaggaaccgacgtgaactgtattttgtgtcctcgtaaccctgatgatggtggaagcattgtccaaaacttgcaaatctcaactatgttcactcatcaccaaaagattgttgttgtagacagtgaaatgccgagtggaggatcaagatccagaagaatagtgagttttgttggtggtcttgatctttgtgatggaagatatgacactccgtttcactccttgtttagaacgttggacactgcccatcacgatgacttccatcaaccgaatttcactggcgctgcgataaccaaaggtggtcctagagagccatggcatgatattcattgtcgtcttgaaggacctattgcttgggatgtcttgtataattttgagcagagatggagtagacaaggcggtaaagatattttggttaaaatgagagaactcggagatattatcatcccgccttctcccgttctgttctcagaggatcatgacgtgtggaatgttcagttgtttagatccattgatggtggagcagctgctggatttcctgactcccctgaagctgcagcggaagcaggtcttgtgagtggaaaagataatataattgataggagtattcaagatgcttacattcacgcgattagacgagctaaagacttcatctatatcgaaaaccagtacttccttggaagctcttttgcttggagcgcggatggaatcaaaccagaggaaatcaatgctctgcatctgattccgaaggagctatctttgaagattgttagcaaaatcaaagcaggagagaagtttaaggtctatgttgttgttccaatgtggcctgaagggattcctgagagtggatcagtccaagctatattagattggcagaaaagaacaatggagatgatgtacaaagatgtaatcaaggcacttagagaaaatggacttgagggagaggatccgcgagattatctgacattcttctgcctcggtaaccgagaggtcaagaaagatggagagtatgagccttcagagaaacctgaaccggacactgactatatccgagcacaagaagcacgccgcttcatgatctatgttcacactaaaatgatgataggtgagtgttttataacatttacataatttataacttttcaatactaaccaaatgattcaacatcaaaattttcgcagttgacgatgagtacattataatcggatcagcaaatatcaaccagaggtcaatggatggtgcaagagactcagagatagcaatgggaggctatcaaccatatcatctctcaacaagacaaccagctcgaggtcaaatccatggattccgcatgtctttatggtatgaacatttaggaatgctcgatgaaacattcctcgatccatcgagccaagaatgtatccagaaagtcaaccgtgttgctgataagtattgggatctttactcaagtgagtcacttgaacatgatcttcctggtcatctacttcgctacccgatcggtattgctagtgaagggaacatcactgagcttcccggatgtgaattctttcccgacacaaaagctcgtatcctcggtgtcaaatctgattacatgcctccaattcttacaacctaagctcagtggcagtaattatgggtaataaataacattttatcctctttcttttgctgaataagttacaaaaccattagccctatcctatttagagcctaataagttattttttcttggttttggtttttcattcggctactgacgattcagaaagaagagaatatttagtagttgtttcgtttgtccgttttgatacttgttttgttgctaattactgttaaactcaatgaatttatctattaatcatattttatgctatgtgaaacttgtaagggtgaaatagatcgttttccaaaaatataaactgagatcatcattaaaatatataatgatttttttatatataaaaaacattgttgagatcaacatcatgtatgagtgaaacttggtaagaaccattgaactttggagaataaatccgttctggtttcttgaggaatcctgatgaataaaccttgaaaaccccgaaggacaaggatcgatccctagctctataccatctttcaaccttgaggacatttcctgttatggtgactacaagttgtgtggcacgaatgctccatgacttactttgtagacgaagtcgtctacctatccgaaagagttccactcgaacacaagattgaaatgtttgttgtggagtctctccacgaggtatctgaaggctcatactcccaaacatttggttccacgaggtaccatctttcaatctgaagtttgggggatttggttccacgaggtatctgaaggctcatacccccaaacatttgaacatgcatattaaaattacgaaaatcatattaatattcatagatatatcatatatgcatgttctgatgggttagtccggtctcgttctgacacaatcggttcaactaaaattgatttacaatgtttggagactgtcaaatcttgaaatgttatggatcagtctatctctttggttaaccactatatgcaaaaggaacaaagacaggtttaatggatttattcgatcctacttggcccgtttccggtaagatgggtactatacatgtatcagattggacctcacctgattatgattttttccaaaagctcagaaaaataaatccgattttgacataactggattagggaagtccacaaatttttggcgtaccagaaacatcactaatcttggataagtgtgaacatataaaaggaagaaatttagttaacatgtgtggttgacgttatttagtccatcaaagtcaagcaaccatgtgacgatctctttcttctttacgttctatcaaaactttaagaccttaacttcttgtgatgtctctctcttaagtagtttgtgtttaaaatacaactagccgtaaaatgatagcttcttgaatctatacgaataatttaattttgcaatttatgtatcacaaattatatactataatatactataagtatataatttgtgatacataaattgcaaaattaaattattcgtatagaaaaacgactaaaagaaaaactctcatcgaaattacaaactccttttttgttaaccgaggaatctcaaaccaaaacaagactaaaccttgtaactttttttttttttttgttaaagaaatagtattagaatcgtgatttgaattgcagtgggaaaactccaactcctctaacgcgttagatacttagaatgaatccttcaaccactaaaaagtctcgaccatcatgagttggttacaattacaaaaattttatttaactctaattaattccaacagtttctccacaaattacttatatataatcattcatgttgaaagttatgtagaacaaggaaacaaatatagataagaaagtctttttttttgggtaaaagaaagagaaagagaagttggtctagtcttctatatcacagtcaaacaattgaagaagtttcgaaagagttacatgttggcttctataattggctagttagtactcttttcaatctcatgcaaaacatgttcgtaccgtatttgattaggtttttatgtacaaaacgcggcaatattaggttttgaaacaagacacgtggcaaaagcccatgttcacgtaaacaccaaggttctggatcatgttgaatgatagagatttgtggaagagattcattgaactctttagaatctctctcactcaatgccttgtccttcttatatttctcttcatcacaatttttatctccctgatttttagttatttgtattaaacgcgtaaacatgcaaacatatttttttcaaaaagaaaacaaaaactttcaaacataaataaatataaatactctccataatttactactaatattatcttgtattgtttatacagctgtgaatttttcatattcccctttgattttttcaaaaatagacaacaatctggcaatcattcataagaaatgattgaaaagtaaaattaaaccacgtgcataaaccaatttttaatttaatagatacgttcaagttctgaattaatatttagttaaagttatttccttaccttttaaaagataaacacaaataatttgcaccaaagtatagtatttaacaactattaagaaagatagtgcttctgcattttttactttaatttttgtttctaaataagtgtggttaaaagaccataatttgcaaaaagcaatggatgttgtatgtatcactcttgtcctagctttcttaccaatcttttaaactatgattgtcaacatgaagcttagtaaattttttggaaggaaaaataattaaattaactatgattttttattttttaaacaattttttggtaaaatttctactcttatctctactacttaaatgtattgatcaatgaaaacaattatataatgttttagtgctattctaaggtatttcatatttaattatggtgggaaatttgatcatatttgttgacaaaagttataaaatatttctctttatcttactcttattcataacaactctagacactgaatctagttataaatatggtcagagactaaagacagtcaagattcaactatgaaagaagttttttttcccaatttccacttgatttttgagcctgtgacttaaaccaaacaccaatctttttacacaccaactccctctttaactttttccaacagagtacagcacacaaaataacttccaacttttctattattgtcagaaaacattttttgctaatttctcacaaactcatttctcaaataaataaaaaactttcttcttaaattcttattgacaagagagatctctcaccgttcaacttcaaacagtactctcttgtggtacaagtacgaaaaatctctctgcaacataacacatgcttctctttttttcaacacacacatattcatcattcatcagaaactttctctttctctctttctcttctgaatcttttatctttcaaacactatgacttgtatactaagctgttctcatggcgtcgtgatcgcaaccgccatggttttctcaagcactgctctgtttcttgcgatttcccgccaattttctggaaatcagacatcagatcaacaaatcctccgttcttgtctttcttcaggtacccttttccgatctttcttctccgatcatcctccggctaagaataatttttgatgcagaggaaaagaagaaacagaggaagaataagaagaagaaagtgaaatttgcagagaatgtgaaagagacgaaaggtaacggtgaagagtatcgtaagaagagtcttcggcgaattgtaccggaacagatgattaaacctgagaaaaccggttcggtttgtagaaacgacatgcctgctaaccggattgcattgtacaatgggattcttagagacagagatcatcgaattcagtgctcctattgactttttttccttttcttctttaccagcaactatgaaaatgtagaaatgaaaagaaaagtaattataattaattattgtagataatcacaattagcttttcggatgattctctgtatgtaattttaggtgattgacatgtgaaaaatactaaatagagtttttagcgacaagaaaagagtaagaaatttaaaagactctttctacatttgattattataacttttctcccacatgaaaaaacatatttttatatgtttaaaaggttaaaaatcagcgaaattatgtttttaatcaagattaagacttaagaaaagaaaaaaaaatactgttatcagaaaaattaaattaatgctatcaaatttgagaatctttgtatagagatatgattttatgtttgtggaaccatcaagatattataaaattcttgttaagagtccaaaattctagttataacgtcgaaaacttcacgatcaagtgttatcactctaaagtcttaccaaatactgtttttttgtcgtttataacatataaaaatttaataaaagttttacaatattattatggcttttttatatatctaatcaatgttttgcataaagtgaagaatagtgtaagcatgattgtatatatttcgaatattcgaccaacgactagacaagtagacatgcacacataatcagtgatacaactttagtctttagcataacatttaccatataaaaagattagggcttcaacagataacacatgagacatgtgaatgatcaattgttagtaattagtattctttacaaaatcgagtgtttcttgtatatattgaggcagaaaaatacaagactcctggacaagaagccatattttgaccaataccaatttttaactcaagtctagccacatgtggggtttggtgaaccggaacaaaccataatgggtcactgtgtagtctgtaaacgaaacaaaccggcggtccaaattgctaaccgccaaaaccacgtgacggtccaatcgaaaattatacgtttcttgtctaatattttgactaaattattgtaattaactatgctaaatttcaaaactaatcggcttcatattcatatatcactgatttttttaagttatgtataccaaactaaataaaaatcgttcacagtgttttggaagtaatttggacaatcttgttcgaaacttattgacacaatcgggagaaataatgtattactaattagctatttctttttttctcaccagaagcttacctactaaccgtaacctaacttacaattagtttttgaagtatttaatttggttaaatgtaaaggagaataaaacaaaaacactgagagggcacttaaaagccaacaacggtccaaagatggataaggtcggtccaaaagctaataattcgacaatactctggacacatgggcttttttggtcgtaaccggtcccatttctgttcttagagaaaatcagaaacggtttttaaataacaaagtagattgtagttgcaaaccgaaagcatggttcgtgcctttgcactattattttcatttcatccctttaattaatagcttgtcatcaaaatgaaaggcaaaacttttactaatttgtgttatttgtgagcgtacaaatagaggatccaaaccggttatatctatatttcagttctgataaataagatgaaagaataacttttcaatcggcatggaggaatcttttgatcgctttggaagcaatcttgatagttggcgtttttgttgtgacggcttgtttatggaaatgggctttgacatgcggggtaattgtagttgcttgacacatagcctacttgattatgatttttgaatttgtcattcgtggtcagagtcggtccaaagactaatcatgtttaaagctcaacaaaatttgatgtccatttacaacaaataaaaatagaaaattgttttaatattttcgattaccaaggatcgaaccaatcactttctaccttcaaagcacagaaaaccaatagattataagacgtttcataaaatttgatgtcttttaaaatatatataaaatttgctgtctaaagcatctatttgctgtttacaaaaaaaaaaaaaaaagcatctatttgctgggttttatgttccggccggccttcaagacaccgcaagcttgtggatagcgatggttttcatcatcatgctgtggtttatattcatctcaaagtaggctttgacatgcggggtaattgtagttgcttgacacatagcctacttgattatgatttttgaatttgtcattcgtggtcagagtcggtccaaagactaatcatgtttaaagctcaacaaaatttgatgtccatttacaacaaataaaaatagaaaactgttttaatattttcgattaccaaggatcgaaccaatcactttctaccttcaaagcacagaaaaccaatagattataagacgttccataaaatttgatgtcctttaaaatacatataaaatttgctgtctaaagcatctatttgctgtttacaaaaaaaaaaaaaaaaaaaagcatctattcgctgggttttatgttccggccggccttcaagacaccgcaagcttgtggatggcgatggttttcatcatcatgctgtggtttatattcatctcaaagtaggctgcaaaagagcgggagaacggtctattccactccaaacttagttactttatcgtatccatacatagaactttgaagtatgcttttaactatatgaactaacttataatttgaatttactacataaacaatcaaaatatggctgaaaccaacaaatcaatagatgccgttagttaaaccgttaatgtagctgactaggatgccacatggatagactttacaaaaacgaatctaaacaacttaaaagacgtcgtatctgtgacatctactgtctcttgaactattgtgttcaagggacagtagatgtcacaggttcgatatgtttagattcgtttagattcagtttacttctaagaaaaatataatatttttttttaaaaacatatatttcatcaagcaaacctgaaatagccaaaaagatttttttttaaaaagccaaaataaaaaaggaagaaaaagggttccataacaagaaaagagaagaaaattaaaaggctagtgactaaagatacattttcataataaaagaataaaagaatttaaaaaatgtatatgagcaaatcataagcaaaatataagtattaaacaatatcaaataggtttaaattaattttattacacagaataaaataattagtaatcatcaataatactaaaaacatatagtagtacaaataaaaacatagtagtacaaactcacggaggaaacgggtgtctaacgtaattaatttttcgattcaaaccaatgattcatcgcctaagatttttgtgccggtctagcgacacaacccacatatttttttcaaagttgatttataaagttctatgagttgtaaaacattattaccttagcaaagagagacctgcggaagaatctggatgttgtacaaatattcaaatttcctatattaccacctcgtttacaatttattaatggttatgatatatatgtttgtgactcagttgcttgttaagtatgaaccgtcaataattaaaaagtcattttagtagaaaaacaaaaaaaatgtataattgtataacaagttagcaacccacatatgttgcagagttgatttataaaaaaagattggggacagagttaccattagaagtttggatcgaaacaattgtttttttttgtttttgataaaatattgatcgacacaattgtttgacattcatttaatgttcttaacacaaaaccaaaatccatatgactatatttatattaattatgttgttagttttgttgaaataagttatccaaaaacaaatttcaagaataatttgaaagattttgggtctttctactttctaggaattgcaaggtcaaggcggttggtcttgtgtcatgattttcttcgttttaactattcaaagaaaacaaatattgataataaaataaccttgttgtgattatctagaaaaagggctgtagaagaaacaagaagcatctctgttttatgttcccaaatgaaccagaaactcttagaaacttctaacacctcttagaaaccaaccttttagcataaaccctaatcccatctttataaaccaaacacttcttgcctttttcttgcaaactcacaaaaaagaagacaagaagacaaaaattaagaaatttaccgatttgaaaacaatggctctagctcgtctggctttgagaaaccttcaacaaaaactgtctcctagtttgatgggtcaatcttgtgaaagaggtttggtcggaaatcgacataatccaatgaagctaaacagattcatggctacttcggctggtgaacaagaggataagatgaacacagaagtgagtgtgtctgagaagaaatctcctcgacagaatttcccccggagacgtggccgaaaaagcctctggcgtaacaccgacgatcatggctacttcactcccaccctaaatggtacgtttgtcattttagttcattattgatatacctatttagcagaaaatttcaatagtgtcacaataataatattttcgaaataaattatataaaaaaaattcaacatttaagtgtaaaatatatcccataaaagaaaaattaagaagaaaatttgaaattctagaatcataaaaatacatcaaattttaaatttacattttcattgcattaaatctcatgaaacataattaatgtaaacctctatttttgcttgaattgaattttttcttcttcttaaaacagagttctttcctccgactataggaaatactctgatacaagcaacagagaatatgaacagaattttcgacaacttcaacgtgaatccattccaactaatgggtcaagtgaaagagcaagacgactgttacaagctcagatacgaggttccagggctaaccaaagaagacgtgaagatcacggtaaatgatggaatcttgacgattaaaggagatcacaaggcggaggaagagaaaggctcacctgaggaagacgagtactggtcttcaaagagttatggttactacaacacgagcttatcgttgcctgatgatgctaaggttgaggacattaaggcggagctcaagaatggtgtgcttaatcttgtgattcctaggacggagaagccaaagaagaatgttcaggagatttctgttgagtagaagagatacggtgtcgtttttgtgttctttgatggactaagcaaattaatgttgtaccttttttatgtttatgcgaatggaatcagttattaagttgctaattaacttagttcatttgcgcaaacaaaagaagctagaaaatacattatagactaattgaacaagcaaagaatgaaccagttttgtgtttgtaatgagaatggaataaattgttattcagcatagttaattttcgcaaaagaaagaagccaaaattaattaaaagaagcagcaaatgttgtgtcccttttatgttttctatgcgaatggctcaatggagtaaattgctaattcacgtcatgaacacaaaaatgttgatatattaaacaagaagtccatttttgtacctcatatcaaaattttatttgtaaattttgtattaataattgtggatttgctatactatactatgaaatatttttctttatagacaagttatgttatacattaaattatttatttattaataagtacagtattttagtgtattgtcagagttcagtttctttaaagaaaacacaatattttttttttttgtcgtcaagaaaacacaatatttatgttaaacaaaaatgcatgatatttcaatagtttgtggaaaattatagaaaatatttcattttccttcttttagtttggtattaagaaggaaaaaaccaaaaacatttttttgataatgtatacataaattaaaattaaaataatgagaaaacaaaacaaggtccaaaataccttgtgaagaaaatggcgacggcgtttgccaacacgacttcaagctccaacctttacctccatcgctgccgtaaaaaccatcctcttccatctccgtcgttcttttcaccgttccggtcgtctccacttccttctcagacccttttcctcgtccccactccaaaacctgtacgacgcatcgcggtcgctcctctcggccctccaacgccgcctagtcccgacccacctccgcctaaaaacacgactgagctcacaagttcgtctttcccttcttacccttaaaacttcaatgtttcaactctgagttctgattttgtttactgccaattctatttttcaatctttcctaattcgatgaaattgcattacggaattcgaattaggagaatgaaggtggtttaactgctattgattcgtagataaagatgttaatcttagtcctcaagatcgattactgttcattgctaaagttttgatctttgtgacaatttatagacttttactcttgttaagcattaaggatttataaatctcctccttttacaacttgtgaatgtcttccaaaagttccaccattttcttttccctacaggtttagtcattggttgcaatacgagagcaatcttcttaacaatttggattcatagttgttgtttggtatcacattttgtgtaggtcttgtgggagtagcgtcgatgattcaagaccgtgtaaagatctttctttcagtactaatttggatctctctcttcttttgggcttcggctttacaaggaagaggcagcaaaggtaatggtaaagggaagaagggttcacgcttcaaatagtattagttagattggtgtggtgatgatgatgatgattgatgaaaactcctctacacgtttgtgtatatatacagaggaaatattcttccaagtaaagcaaatttcttgtcagactacagttttatactagaaactagattgttctcttcttacgatatctctagcttagagctatagagattactctactgtgatgaaactaaagtagtttgcatttaagtcaaaatgccaaatcaatatcattgtttattgaaagctgtttcagattgtaaatgactagatgtgtttggtgtgtgcttgattcagccaaacggtaaaccgcaccgtttctttgatttgaatgtttgttgtataaaatgggcctttagatatgttatataacttgtttgggcttcaacatactcttttattgggcctctctatataatataatatttccaaagttgtatttaattattatttgatttatatttaaaacagtggttgtttattcatgatatgaaaaaagaaataactggatttaggtaaaccttattcaatactgggacaatgaattaaccagctcatgattagttggacctgttttggttaaaggctggtagtaagtttagaaacagaaatttatgataagagcctaacattttgttctgaccacactgagtaatttaacaatctatctaaattaagattttatgctatgtttaatttatatttgttctgattatagcaaataaatttccatatctagagatcttcttcatacacaataaaaaaaactagtatttgaacttttgtatgtattaaaaattgcaagattttgtaagtacagattcaccaaggtgaggtgtgtgattaggaaactttgattagttgtcatgtgtcatcaacaggccatgaaaaggaaatctttgaaattcaaaaaacaataccttttgatgaaattattactatataaatactatatgtgactatgtgtggatatgcacaatcattcccactaatagtttaataaagtgtataatttttttcaaattaaaacagctaaacacacacaaccacattcaaaaaggggttaagcattgaagaatattctaagaaaatttgtttctcttcttacagaagtaaaagcgactctctctctcattaagcatcaaaggagtttcgtttttcttgctttgctgttacattcttcaggaaaaaggcgttacctttactctctctgcatcaacgaggaagcgtgtagagctaaaggagctgaatttgagagatttttttgttttgtttctgggtttgttcaaagatgcaaatttttagttgtttctgctgtggaaaaggatttgatcggtatgtatggagttttaatcttgattttcaacttgatttgctggtttatgggttttatctagtttctccattgttttgttcttcagaaatttgttcttgctttgatccgttttgctattcttctttattagggttttgagatttatatcatttctcgagcctattcatgttcaaaatttatttcttggtgtaaagtttggaactttcgaacaataatctactgtttgataagcttaagttgcagatttgataaacccaagaagaaagtaatgttaatttggtttgatgtgacaactttacacaggcaaaagaaggtgaaaacggagccatcgtggaggatcttttcactcaaggaacttcacgcagcaacaaacagttttaattacgataacaagctcggtgaaggcagatttggcagtgtgtattggggtcagctatgggatggatctcaagtaatgattatcttgaacttacttgatatatagaaatctcttcttttccgggtcagcattgtattgacttagtttgtcgaatcacaatgtgtagatgtggtctctttgatcttcatactgtaatgagcttttgtttttgtctgtagattgcagtcaagagattgaaggcatggagtagcagagaagagatagattttgctgtagaagtcgagattcttgctcgtatccgtcacaagaatctattgagtgtacgaggttactgtgcagaaggacaagaacgactcattgtatatgattacatgccaaatttgagcttggtctctcatcttcatggtcaacattcatctgagtcgcttcttgattggactaggcggatgaatattgctgtatcttctgctcaggcgattgcgtaagttttcgggatcaagaaaagttcatataaattagcaacatctactgttgactgatttattcgtttccattttttttacagctacttgcatcattttgcaacacctagaatagtccatggagatgtgagagcaagcaatgtgctgctagattctgagtttgaagctcgggttacagatttcggatacgataagctgatgccagatgatggagctaacaaaagcaccaagggtaataacattgggtatctctcaccagaatgtatcgaatctggaaaagaatcagacatgggagatgtgtatagtttcggtgttcttttgctggagcttgtaactggtaagagacctacagagagggtaaacttaacaacaaagaggggtattaccgaatgggttttacctcttgtttacgaaagaaagtttggtgaaattgtggatcaaaggctgaatgggaagtatgtggaagaagagctgaaaaggatagttttggttggtctcatgtgtgctcagagggagtcagagaagagaccaacaatgtctgaagttgtggagatgctaatgattgaatcaaaggagaaaatggctcagcttgaagctaatccactcttcaatggaaacaatgatggtgaagttatagatgaaagctcagagatcatttctgaagtgagagatcatcaataacaagaacaagaatgttattcaaattcacgcattcttgttttcttttgctagaatctggtttttggttgtgcttgtttttagaagagtgtttgtgcttgtttttagaatagcgaagttgggttttaaaagtttattgtgtattttttttcagcttaagattggattttgatcattgatatttgagcttgtaagagagtgtagtggtacatatttggtatttatgagaaagtttttctgataaaagcaaactacaacatttgattacataaaccttgagtaaacctgatgaagattcagttggaccctgggtcaagcacgggaagtcggcaatgcaaactgattgatttatcggtttgacgagttccgggaaccatgaactggaagatcactgtcaagcaagcaccttgaggagcaatcccatagaaagtagaatctggtttagttaagtgacattgaaggctctttgaaaaatgttttacactcacttgcacagactgagcatctcctctagcaatagctctctctgaacgagcctgagcacttaagttcctatcttcaacaggagcctgagatttctcaccaataaccgaaagcctctggaactcaataccaagcctaatcaaagtcgttgagacttgcacttgcagatcaccgtgcttgcttatcgtgacattaagaacatcaccaacatgtctcatatgatcaacaaagttctgtaactgattcgagtcttgaacttgaacaagagtcggaggaaggtcttgagccgagtcaagagcagtctgcagctcgataacttgagaccgagataacggtttcgtaatcggaacatcttgaataactgcagacttgtatcctttcgtttcaaacgtgaggaaaggcatcggttgtgtacagttaggagggagctttttgacaagcttgatctgcagtctgtttgaagctaatccaccactgaactcagtacaaatactaacactgctcttcaccgctcgatacagaagagcaacatctaaggagaaagcgatacggtcctcgttctggctcgagatacggtaatcatcaaagagaacatctttgcgaaactgagcaatgcattgaactccatcaccattgagaaggttatggaggaagaacaagtgttctttagtgagaagaagatgacaattcttccccattttgtcaaacgctggaagaaacctcttctctaagagattcacaccattttcagtcagaaacgccttgaacttcatttcactgttacaaagaaacaagacgatgagtgaatctttagtagaaatcactctacgaactcaaattttggcacagatttcggagaaaaagcgattcttcaaaactaaaagaccagattcaatcaaacacaagactattcaaatttaggttaaattcgaatgcaatcaaaacatcggattgtatgaaattgaaataattaaacgattggagaatcgtgaattgttagaatcgtttcaagtatacagttcataaactcaccggaatcaatagtttgtaatattctgaccggagatcaccggaatcgtctgctggatgaaggaaactgtagctgcgttgaagaaatcaaacaatctatatcaaaattcatgagcacagtagagaaagatgacagattcagagaatttaggaattcaccaactaagaaattttctgaatttttgcgccaaaaacaactctgagattgaaggagagggaaactggtagatttttatttcttctgaaattttgtgtaccaagcccattaccattagtgtcatatgcatacatgctcaaaagcccataggggtaaaatgggaaactggttataactttttaaagaaaaaaaacttaagtttgaagaacttttgaatgatcaaatttatttaccaagctgcctatttgcattatttttggcttcattaatctgttattacagctctatgtcaagatataaaattttacagcaaacaaaaattaaaataagctccttttctttatatacatacagatatagtttcagaaattcttctataaacactagtcttgtttttcttctacactatgaactttatccaaagactcttgaagaacttgcattgcgactttataatgatccaaagataccgctccttcttcaactacctgaagagagtttttatacaactggtcaaaccattgaacccggtccgtaccatcgacaaaaccagtcaagccgttatcagcgaagtggaggcgtttgtagtcttttctccaccgaggtagaatataccgtaaagggatttcttcaacgccgttgaaattgagaacacatagagcatgtctgcataagtatccgtagaagttgaagcagctacaaatgcaacgtacttcgccaactgatctgttgtacagaacttcgaaatcgcggatttctcttctgctggattcgcctcggacccgttctttcacaaggaagatcacgaaaggtccatcgacatggacctgcgttgtgctgaaacatgagtacatttcttctacctctatttggaatttcttgaacatgtctctcgtgtagattctcgagagctgtgtctcgaaagaacactttgttttaagctccgcggtgttcaaggtttgagactctatgtcgctgagagtttcttccctgtgcttcttctgaagagctagctcgtacttatcgagaaactctttcaatggtgtttgcttgtgaacatacctctcgaaaaatggtttcagggtttctccaggatgagcagcggcgattcctgcaaaaaaagtgtctttgagataaaccggagcccatttagctctctcttcatacaaggaacggagccattcattctcgataaccccaaaattgtgaaccatgaacccccaagctgcttcaaactcaacaacttttaaggtttcgtaaactgctttcgtaaatgccttcctcacggcatcataattatgcagcccccctaatttctctggaattttcctcattatatgtgtcagactgaatctctgatgagatcttgggaacacttgagagatggcagcctctaaaggcttgcatctgtctgtgacaatagtttgaggagaacgcttcatgacactgagccatactttaagcaaccaatggtaagactccattgtctctccagcaagaaaaccacaactaagcaatgtagttttcccatggtgattcactccggtaaatgtcaccagtggaatctcgaattttcctgatatataagaactgtcgatgaagatgacatcgccaaagtaactgcaggaaactttagagaaagcatctgcccagaatacattccgtagttgaccttcatcattcacatccatcaagtaaaaaaagtttggatttgtcaattgcatacggcaaaagtagttgtaaatggctgcagaatctcctctcttaaggttcagcaaatcaggtgacccagtagaattctgaaacttcttgttaagagtcgagtttgggttcacattgctcccattatccaccacacaagctcggtacagcttaatcgtcttagcgtctgagactggactagatacacacttcctcttccttttaaccgatttatataacttacaaccgagtaaatggttatgatcaagtgtaacttcaactacccgccacctcttagaatcaacctgtctcattcttatcatagcaggacaaccagttcgagtttcctttctaacacgattcacatcgttaatcctcttaaaaccttgactactacaacaaagcaccgcaccatacttctctttactacgccgcttaaaccacgaattcttcactcttacacgaaacccaacttcactagcataacagttataatagttataagcatcatcatacgactcaaactccattccaaccgcaggtgcatcgaattcttttctctcatcaacaagtaaaccactctgttcatcaaaccctcccattgtttcttcttcactctttctttcttcgttttgacaaaatccaacatcaatctcatgctcactactacaaactagagcttcttctcctatccgtaaagtatctgacattggatcatctctttcacgaacctcgtcgttctctaaatatgcagatgcttggacctgtaataacaaaaagctataaactttgattctagcaaaccctatttactcaattgaggcatcaaacttgtgaaggagctgaacaaaaatgataatcaacccaatgaaatcaaatgtaacatcatcacaacccttgtgcgaatcgattcataatcttcacaaaatccagaattgaaaagaggagttttagagttaaacacatacatcttcatcaacggactcacttctctccattggaggtttggttcctcttccttcttcaattcgcgggtaaattttgatgaaagcacttgactttattcgattgaaggagaacactcgtgaaattgatcggtccgggatagatccggacgggtcttacacggaaagatccgacccgagagtgatcttgcgcgggtattgacctttgaaagcggttaggtagtttaacttcttcttctgacggtgaggtggtcttttggggctcgactggtgactctagcattttcaccaacatagagacaccttaggcttagggttttcacacacaggttcaaagcacgtgctgcaaacgtcgtcgttcgcacttaaacatatcatttttgtttttccttcacttaagacacttaaacgacaattacactgaaacggagggaatgctatgaaatgaaatccaaaattgcattacatagattccctgaaatgaaatctatgagtctatgacattagtaaaacgcacaaacttgtgaatgtgatatttatgagcttataaaacagcatatataaaaaaaaaatatatcaatttctagattttacccacaatcttaatttatgtcatcattaaccactaatttttcaatattttctctctctttcgaggcgcatatataaatacaggaaatacgcttttttacttaccaatcaaaaatgtctttgctctctcctcttcctctgctccactcattctcctccaccgtcgccacaaaatccaccgcctctagaatcactgccacgccgtcgaaaatccgcttctctgtcataaacgccacgtcggagaatggaaacagcggtggtagtaaaaacgatcgtgatgaggatccatcttttaacccatttggtttcgttacagacaacccgtctagccggagtgcaattcagttaccagagtctccggcggaagacggcaatgtcggccaaatgctctacgtaaatttcacatatttactcagttcaattttgaactgtgattgaaattgaaaagatgcatggttcatatttgcttctattgatttcaaattccattttttatcatagtgttatatttttgttgattgttatgttgtgggtttagaggactgaagataaaggtaaagagtatggctcaactatcaaatctgggaagcttagatggtttgtgagagagactggtaaagacttaagttttgtgtttgttttttggattcaagaagagtttttgatcactgattaagcattttcctattttccggtaggatcaaaggagagtcgtcgaggaaccattgtatttgttcatggagctcctactcagtcttttagctacagaactgtcatgtctgaggtgctacactgaatcttgaatcatgtgtctatatgggaaacaattgtttctaatgaaagactcttatgatttccaatgaatcatgtgtatgtatatgaagcttgagtggatcttttgtgtgttcccaacaatgtaatagttgtcagatgctggatttcattgctttgcacctgactggataggattcggattcagtgacaaaccgcagcctggatacggttttaattacacaggttcgttgatggtacatttaatagtttgtgaactgcaaaatcagtgtacatggttctttgttctaataagttttaaatcttctcagaaaaagagtaccatgaggcgtttgataaactgcttgaagtgctagaggtcaaatctcctttctttcttgttgttcaggttcggatgtgtgttcttatcccatttgtgtataatatgttaataattcatcaagactgaatatatatcttatttctgcatttgttgtggtctcccaagggatttcttgtaggttcatatggtttaacttgggctttgaaaaatccaagcaaggttgagaaactcgcgatccttaatagtccgctgaccgtttcatccccagttcccggattatttaagcagctgaggttcaactcttttgccattttgaccactctaaatgcttgcaatactctgtgaaagcaccaatctatttgtatctcttggctttcctcattttttttctgatgcaggattcccctgtttggtgaattcacctgccaaaatgctatcttggccgagcggttcattgaaggaggtagcccgtatgtatcaaattaaccatcatcttcattatagagatgagacattatatactggctattctcctagctcagcctcaaaatgcatgtgtttggtgatgttgatagaggcttctactgacaattgtcttactctatatctgttttgatagctacgtcctgaagaatgagaaagctgatgtgtatcgtctaccatatttgtcaagcggagggcctggctttggtacgtctctaaaccaaattcaatgaatggagcatgatacacaccttactcttgattcttatgatggtttaatctattatctaagagacttctcatcctgagattctgatgaattagccttgctcgagactgcgaagaagatcaactttggagacacattgagtcaaattgcaaatgggttttcatcaggcaggtaagtgcatttcaactttttacaaattcacacggctacagataggtcttttactttgctgaggttttgatccttcacagctgggataaacctacgcttctggcttggggaatagctgataaatatctgcctcagtctatagcagaggaatttgagaaacagaacccccaaaatgttaagcttcgactcatcgaaggtgctgggcatttgcctcaagaagactggtatgagaatacacatactgttctggtctgctttgattcttataagactctctgaattttgaactttgtatacaggccagagaaagtagttgctgccctccgagcatttttctgacttccaaatacaacaaaaaaggacagaggtaatcacaaagccttgtaacagcctaaataactaataatagtagaatatcacatagccttgtaggcatcccacatttccaacatactttcttacaaaaaaaatgggataactgttagctgcccacaaaaactatcatcttggaaacataggttctcaactttttcttccttttggcttcttaccagcttggctagtagctttctcttcagacttcctctttattgcaggctttgtaccacggcctttgggtttcacaacttcttcttcagcctcgctatcatctccatcatcgtcgctctcttctgtttttgtcttcgatgcaggcttcttaccacgaccacctctgggtttctgtcctttcttcgatttagcactctcatcttctttctcagtttcttgttcatcttcttccccatctccatcgtcttctttgggtttcacacctcgtttagccggtctaaccttggctgctttctctgcgtctttcccataaagtttctgcagttctggaacataagctgttgtctacaaaagaagaaaaccagacacagaaacattagttcagttcactacatgaaccaatcacccacattataacagtgcctaacaatgcatacatatacttacccttccaccagcagtaatgaaatcaatcttcttccctgcaataaccaaaacagtattcattacctaccacataaatcagatacatcacgattcactctcataacgtttaaaccattattatggggattaacaactgcagttggaagttgagagaacaacagatccaacagttttatgaacttttgcaggtagataaagagtttgagtgtgaaatgtgggattcaaaccatcaacaaaggcctttcctggcttcttttccctattatgaaaaatccagtaactaggaaactgactactgtctgcatcaacttccacagctttttctatcacctgcaaaaccccaaattctgcttcatcaaatttatagatagatggtgggaaagcttaccattaactttccctgcttttttcccccaccgaaaatgaaacaaccattcaacaggaaactctttgctatcagcattgacttgaactgcatgttgaatgacctacaaatgcgggttttttttttctctctaaatcccaataaacaatgcatcatatgcatatatattaacagagcctttgtaatcccatgttttttaggtactgttttggtggggtgtttagagtcttacctctttgatggatgtgtgcaaagcttcacattgctctttggagaggctagaagcagtctgcaacgggtggattctggcctgcgaaaaaaataaactagaattaatcgtacagcatgtaaacccgtttcttctgtcgtcaaatgtacagaaaacaaaagtggatactttgtgaatcaaatgagtggttacatagatgctttacttcatttcaaatgtaaatgtgtaaagatcacttacttggtacagcacttcatcagcgatccaattcccaatacctgaaatatatccctgcaaaagggaagatatacataatcatctaaatgcgagctttttatataaagaaaaggaacaaaactttgccaaataaaagaagatcatttctgcagcatctataatgtcatatatagccaagttctagatattgtgatagaagtggtaaggacaagaaagagctgaaagatgcataaaagtgagagaaaatgaaatttgatctctgaacctgatcaagtaggagaggttttatggttattttctttttagctaagctttctgcaaattcatcaactgtcataggctccaacaatgcatcaggaccaagctctgatattggactcacagaagtaggctgcaatagcaaacataaataaaactatcactaagtatccacagagaagcttaataaaataaaaaaagcaacttcagagttatgcatttatacatttgctagaagtcgaactttggcaaatctcctcttatcagtaaatgaaagctccagaccatcatcaagctttaaaaaaaaagcatacctcattgtgattgaaacacatttttgggttcacgatcagtaataaaaagataacaaattgctttacctcgacgaagaactttgaatacttagatggccactcctctgagtcctttacagcagacctgcataaacaatgtaatacatatcaatatttgttctataaatcttacacttaacaaagcaaatgtaataatggtacttcataaacctcacctcttatacttagtaactgcaacgcctttgatataaatagcaccagccatacctgaagaaaacacataaaccaaaatcaaaatttcgaagaaacaataaagccaaacactttcactctttttttcataaatcaaagcaaaaacagtcctgcattttaacagatgttcgattttgatgaaattattcaatcaagtcctgaatttggataaaatggaaaagtaaaaccctgaaattagattcctcaagaacacacattaaagcaaaaccaaaaccatttataagttcaacgaaacaataaagccaaacactttcactcctttgataatgaatcacagcaaaaaaggtctagcattgaactatgaacagtcctgcatttcgtcaaatttccaattttgacgtaattgatttgattccatctaaagttctgatttttaagatgtaaaaccctaattctgtttcagagagaacttaccgaattgaaaagaaggaaatggcggggaatctaattcgagccagaggtttttgccctttctacgagcagagatgatggtttttccgaggattgaggtctggaaatcggacggcgagattccatggatcactttgttgtcgtcggcgataatgactcgcttaatcttttttccaagacaattttcttctattgctctcctcgccgcctcgacctctggaagctccggcatggtttttctcgtcggcgaaattagggttttggtctctccggttccccttcgattcgcgccttttattgcttcgtttagttgttccgctttagttgtactctctctaaattttattttattttaatccaagcataaatcttcttttgaaaattaatagacacaatttttgtaaaataattgtatccaaaaaaaatttaaacgaaaatatcattgaatgaagaaacgtaaacataatttcaaaaaaaaaaaatatcaaatataataagtaacaaaatatttcaaaaaaaaaaatatctctttaaactgtgaatttttatttctgtaaatttctgaatatataattttcgctaaccatgttgataatttatttatgaaataatttatcatatattcatatatatcagcatggtttgtatttgtatttgtatttttctaatacaaaacaagacgtggttcggacttcgaagtctttagtgtaaaacggcacaatgtctttttgtttggtaggagaattggtttagcaataatagcacattaaaccctaattgttttcttctttggtaaccaaaaccctatttatcgaacacaatatattcaatccttttcttcgccgttacgatatcttcccatctcctccactctcattcttcacgcttttatctttgtccaatatttcacagatcagttttctgattattcttttgagtgtcagtttaagttttcgtagaccacgcaccggctacatgtttagtgtcaataaaagaacgcaagccttctctgtctttcttttctttttctccgttcctaaagttatcagatatttgaacaagcagagatcattaaaagaggaagaaaaaagattggaagagtttcaactacttttatcaaaattaaaagatgttcatctaccccttgacctaattgtggagatactcaaaaaactcccgacaaaatctttgatgaggttccgatgtgtctcaaagccatggtcattcattataagcaaacgtagagacttcgttgagtcgatcatggctcggtctttgagacagccgcctcataagcttccggtcttcatcttccaccaatgtgatcctggaactttcttcaccgtgtcgtctacattctctcaaagcacaaaacccaaagtatcaataatgcctggacgaaaccactataatgcgttcaggtatcaatacgttcgaggctttatatgttgttcttcatcagtatatgatttggttaccatatacaaccctaccacgaggcaatgtcttcctttacccaagatcgaatcaatggtactctcaccaaagagacacaaacactgttactttggatacgaccatgtcatgaatgaatacaaagtgttggccatggttaatgactcgcaagagttgacgcaaacttttcatgttttcacattgggtagagattgtcctcaatggagaaaaatccgaggcaatattgattacgaactcatttcagtcagccgggcgggggtatgcattgacggaactatttactacgtagcagttagaagaaaagataatgagaattatggtgaacttttcatgatgagtttcgacgtaaagtcggaaagattttatcatgtccgcactcctgaaacattgtggagtcccaagtgtactgagcgaggtctttttaaccaccaagggaagttaggatgcataagtagcaacgaaaacaatataagtatgtggattatggagaatgctgagaagcaagaatggtccaacattacttttggcttgcttgaataccctggaggtgatttcagaactttctcaggtatcactcctgctggtgagatatttagtatgtgttatcctttttataatatgccattgtgtgttcattattataacgtgaagcaaaaaagctatagaagagttgaaatcgaaagtactaggctaaagacaagaaaacaacctagagatattattcgcgtatttgccattcatgattttgtcgagaatacaatgtggttgtaagacttatttgtattattttaaaccttttaatacaaatcgttcctttattttttattttttctttgttaaacagctaggttatagttatctgatcaggaaaaagttactatggagtaaatcaaatatatatattgtatacgttgaatatgattaagtcataaatgcaatgatgatgattcattatagcgccaggtctttatgtaaaatatatagtgtctctcttaatggtgttaatttgagtatttcctcgtaaatattgatgaaaatggtgagacttggatagtctgtctgtgtagtatatatttgaaataacgacccaattaagaactaaaaagatatttcaatatctactaccaaacacctaatgtcttatttgatttttatgtctatagtgttctattaaatggtaaaaagattgacacctaaacttgatttttccgaggactgagatttcattaattactttgctgatgttcaatttgggccatatttaaactatcaactatcaagtggaaaaattgttgatgttggggatgcgtcaatctttatatctttaaagtatctttatctataccaagttaccaacacatggctagtcttgtattttctgatacaaacgagaagttgttaagaattgtaaaacggcacgatgtctttttttttggtcggaaactgttgagattacttgtggttttgggaatatttctctaattgtttcaaatttatgtagagtatttaagaaattatttccttcttccaaagggattaggaggagttttctatggtgttagaccgagggagttctcttggaagttcttttactctgttcttgttatatatgtaatcgttaattatttcggtttttaacaaagagactcctgagattacttgtggttttgggattctttaattttccctaagagtaacttactttttctttcttttaagaacaaaaccctaaagtcctaaactcggccgtcacgatatctacatctttcacaattcttgtgagtttccagttatgtttcctagattaccgtcacgttttatttgtttacaaaagaaggagaaaaacagaggtcatgagaaaaggaaatgaagagaagaattaccgtgaagaagaatatttgcaactccctctggatctcattgtggagatactaaagaaactcccgttaaagtcacttgtgaggttccgatgcgtctcaaagcaattttcaacgattatctgcagcctaagagacttcatcgagtcggtggttactcgacatttagctcagccggggcagcagcttcccctgttggcggtcttccaccattgtgtgcctgaaactttcttcactgtctcgtctagtttctcccaaagcctcaaacccgcagtatcagtctatggacacgacaagtatttgtttgtatatcgatacatcagaggcttgatctcttgttcttcgatttttctaaattggttcagatatacaaccctaccacgaaacgatccgttggtttacctgagatcggacccccagtaacagggttccggaaatgtaactgtctttttggatacgatcctgtcatggatcaatacaaagtgttgtccatggtttttgatttccgagagcttacgcaaacttttcatgttttcacattgggacagagtcaatcttggaggagaatccaaggcattaatgatgggaaactttttccaagcgccgtggggatttgcatcgatgggactttcgagttcttgcgattcaagcgtgaccaagattgtctgttttgcgataacgaaactcaacatattataatttaggattcatggatcatattcacgttcatacaaagtcagtttttttttaaaatggtaatggacgatataagagaatctgagggagagaactgtggatttatacaacaaaaagataaaatataaagttgcatggagtatatatacacatgttccagaggtgaagatgtttggtaggtcaccagtaaaagatgtatcatttcaagaacgaaattatcaatacatttgctaaccatataggcatatacctttgtcgtaaaattttgcataggacaagaaaaatgtgtgactcaaaaccatattctcattaccaaattggtgtactactactatattaacttaagttccttatttaatttatttcctatatatatattaacttaagttccttatttaatttattaacttaagttccttatgtactactactactcttatgtttgaataagtggtttgacaaaaacgaaatactttatttccaccttctttttttgctattttgaaaaagggtaccacaacttgataacaccaaacaggaaaatgttcaataaaacaatagattaatctgcaaccatacgcccaatgtcttatttcttcctgattctacttttcttttgatactttctttctgattcttaatctagtcctagttctgttagttataacatggtgaattatttaattaaaaatttgtatagagaaaggaaattttacaattagtaaaatttgaaataaatggcttataagtaagaattatttatttataaataaaaagttaccacaacttgatagtaccaactcacgctattttactcataataaagaaaagaaacgacgataataaatcactagacaacgtgcggtctttatcgtagaggtgaagttttggtgattgggagactcagttccagccagagtttgagcatatctctgatgtctaaatgatgttcatgtcgaagcctacacattcgcatacccagaaacttagacaaatacgttcaaacaaaaaaatagtacattaaacaaagttaattagtaaaatgattgatgtttatataccatgagtatattaagaaaaagacgtctccaaaaccagcctctctaagggactcaacaacttcttcttcacgggtgtaaggaagtagacgattctctacgacaaaaacaaccataaagactaaagacttagcattaccttgtgaccattatctaaagaggaaaataaagattacctgctccacgtgtaaaaaagattttctgtgatgcagcacgagctacagccccaactgtatattctatgctgcttgttatgctcctggcgaggtttgagtaattaataaatttaaatatttcttaaaacttaatagagataagtgaatgagtaatagaagataaattatataccccgtaatagaaagccacccattaattccaacaacaactcggggatttataggataatgtccaagagcacaatttgttgcaaattggagagctactactgcacccatgccaaagcctcctactccttttacgactacataaaaataaaatgtttagtgatcattaattagctagagatctgatgcatatcaacatgttagatgtgtagaaaaagagccttatatttatattttcaaagattttctagaaagcaaaaatacaaaataaaaaagtaaggacaaaaattatatctatatgctgataacattaacaacccattttaaaaaacaaaaattaaataagccaaaaaattaataaggccaatttaccatttagtggttcacgcaataaaagatcagcaacaaatttagctgcggaatctaatgcctctcgatcatcttgtttgatattagatccgaagtcgtacgctgaatcaacaaagagcataatgtttactagaaaaactgagtacatattatgttataaaaaagaggaaaaactgagtacgtataaaccaacttatctcacatgtatttgtgtagacgataggtggacaaatccagttgacctgtttatatctaaaataattattcatgttgttaacaaatttaaaagttattagtggggttttaaacttacatttttaagttttaaacttttcacaaactgcactgaactgcaaacaaattaataaacacagtgagtaagaaaatcaatacaaattcaaataagagttaagaagcgaaagatcatgaagctcttatgcttagtttacaaaacagaatattccgttcatgttagacgaaaaaagtttctttaatttcataattaacttagattagaagaatgaaagatatgtaacaatacaaaacaagtcatgtgatataaacattactcagtgaaatgctcatccttatcatgcagccatactatactggccctttgatctccttgaggttccacaaaatgactgcattttaagtcaagtacatttgctccatttctactacctgcaaatattttaccattagaaaagtcattaaccaaacaaactttttgagagtagtagcccacaaacttaataagaactacaaaaaaataagaaaaaataagcaacatgcaccaaacatttcagaataacaaaaatatgaaaaataaacaaaatcatgcttttgttgaaaataacttttggagactacaaaaaaaaggatcggagagttcatttacttcatatgaaaatttcagagttgcacactatattgacgggaaatggaagagaatgaaaaggagagaaatgtgaaaatatacaccaaagagtgatgtgaatatctacgaagatataacctcacaataacaacaagaaaagaagaagaagaatgaactaacataacatgaataatcaagaaggaaacaagacatactagaagccgccatgttttgatgagaaaaaacttgactagttcttttatttttatttttttacttagcagatttttctatatctgttttttgttaaaggattttcttttctatatttttgagaggagtttcggaagccagtgatggtggaaatatgtgaggaacgatgtgtatttatacacccaaaaagcacaaacctgatgggagagagaatattccatttctttttttctatctcactaaatcaaaatgtcaaatatattggttggtcactaattaatgaaggaaacataatcagatgtttcattatcaatttttggaaccacacctagggactaattttttcttctttctagttctatgaaaagatataaaaggaaattgaacttatgatatcatcgaaatcataagtaataagtatcatcgaaattgaacctatgacattgatatcttctgtgtactttagctggaaccaattatgtatttcatattatttgtcttagtcttactttgattaattggtatacagctatatacatatttggaaaatttacgatatctataaatctcataattagtagaggttttagaattttacacgtagactaatgttaaatcttaaaaaccaataccataattcattttataaatactacactctacagggcatgcatctatgaatttttttactaaatagttttactttagttggtacacattttggcaagatatttgatatgggatgagtcgtttcaaatgacgaattcagtcattagtggtccaaacttaaagcaaaagtataactaattaaggtatttaggagctgtaaaataaaataaaataaaattaggtatttagaaaatcttagtcgcttcaaatttctaattggggcataagtgtggtccaaacttaaagaatacgtacacataaatgcaaattactaacaagtaacaactatgaatcccataactagtatagagttaaattaaggaaaccacacaggaaaataatcttgactatgagtacaacaacttcaaatatttataggaaataagtaattccagatgactaagtgagtcacgagtgcgttccaaacaaaaagaattttcaatcccaacacgtaaactttaatattacattctcattgtggagcacgtaaactttaatatttcaattttttttttaagtcacacaaactataccttcaaatctctagacgtgagatgtcgaagctatcttaaaacctgattatcaattttggtggtttctaaaaaatatatataataaaattcgggtttgttagaataaaacaaaagaacgtcatatagagttattttccttccaaatcttatagacagaagcttggaggaataacttgcaaatatgatgttgaatatggtgtttctagaagctacccaagcaacaacatgcacaaggctagaaggtggagagtgatatatcagaaggtcaagatgttcgttggtcacattatcaatttggtgttctaattaacaacatctttgggttactaaattactcattacgtttgaaaaaaataatacttcaattattaccatctctttcttcttgttgctatttcgaaaaaggttaccagttaataatcgccaaccgaaaaaactgaagaattaggaaggaaaacaataaaattaattgaaagaaacagaaaaaattaatctgcaaccatatacctaatgtcttatctgtttctaatgcaacttgataaatgataatggctagttcgagtttatattaattaacatatggtgaatgattgaagtagtttgtatagagaaaggaaattgacactttcaaaaactaaattgtatggatgtatatctatcatctaatcacatactttcattaccaaatacgtataggtttatcaatttacgttatatcttggcttaattcaaatatatattactcatgtatacttataagaagattgcaacatagttaattaataattatttaattgttaaaaaaggttgcgacaacttgatagcaccaacggggaaaaaacaaactaccgtaaagtctgaaaaaaccaataacttagtcataagtcataacatgagtcacgctaatttattcaggacaaattaaacaaacgacgatagtaaactactagtcactagctagatagatgaaagtctttatggtagacattcttttgcaagcacaacatcgagcgggagcttctcttctaaccagcttttgaccattacgttgcgattgatctcatgagcgatcggtccaaacctatgtcacatattcataacccaataaacttattagacaaaaaaatgtcaaaccaaaaatgctatatagagctagcagggctaaaaagtaaaatatttgatgtttctataccttgcaaatggtaagaacctgacgtctctaaatccagcctctctaagtataaaagcagcttcttctccacagccacataggtgaggaacatgatctcctgcgaaacatattatcatatataaagatttaattagcattccctctgtctaaagaggaaaatagatacatgaattactttgtccatgtgtaagtaagattgactgcgatgcagcacgaggtggagcctcatatgaagcaaattctatacttcgttttaggctcctgcaatgttgagtaattagtctttcatcattcaatgggatgtgaaacgtaaccttacttagtttaaagaaattatttgagtatacttcgccttagaaagccacccgctgattccaacaacaactcggggatttatagtataatggttaagagcacaacttgttgcaaagtggagagctactgctgcacccatgccaaaacctcccactccttttatgactatatatataaaaaagttttagtgagcacttataaatatatataaaagagcacttttttaatttttgttatattctctaataattatgcataggtcgatattaggtcattctgcattaccattttctggttcatccgagaaaaggttagcaacacgttcagctgtcagatataatgcatggttgatattatattcgggtttgttccctgattcatcaaagaggacggtaccaccattttagctgtttacatattctaattatatataatcaaataatgtttacaagaaaactgattataagccaatttatctcactcgaagttgggagcacgagagatggacatatccatttgatctgtagtaaaataaatattcatgttaacaaaactaatagctattagctagtggattttaacataaaatgttcaaggatgcttacattattaagattcaaaattttcacaaactgaactgaactgcaaaaattatataaacataataagagaaaacaacgaaaatacaaatcaaaagtaagagttaagaagcgaagataaagtttctatgattaaagtacctaacaaaaaataatattccgttcatgtgagatgaattttttttcttttggattagaagaaatgtaagatatgtaataatacaaaacaaatcatgtgatataaacgttactcagagaaatgctcatccttatcatgcagccatactatagtgactctatgctctcctttaggttgcacaacaaaatctgctctgttgctactacctgcaaagattttaccataaaacaacgtcattaaccaagcaaaattgtctgagagtagtagcccacaactgaataaaaactacataaaagagaagaaaaatatcatcggagatttttaatattcattcgaaaattaatatcagagttgcacaatatattaatgggatatggaagagaaagaaaaggagatcaatgtgcaaaaacacaacaaagagtgatgtgaatatataaacaaaatttacatcacaaattcacaataacaacgagaaaagaagaagaagcagcaaactaacataacatggaaaatcaagaaggaaacaagacatactagaagccgccatgttttgatgagaagaacgtgactactcttttttctatactcagcagtttgttgttctaaattttaagagaagttttgtaaaaccagtgatggtgaaaatatgtgacgaataatgtgtatttatacacccaaaaaagcacacacatgatgtgagagagagaatattccatttatttttccatttcactaaatcaaaatgtcaaaactattggttggtcactaattaatgaaggaaacctgatttattagatgtttcattatcattatgtgcaaccacacctaggttttaatattttctttctaattctatatgaaatgataacaaggaaattgaacttatgatatctacagtatactgtatactacagctgattaccaataatatatttcatattatttgttttagttttcatataattaattgctaaacaactatacatatttggagatttaattacgtataaatctcataactagtagagattttcgtattttacacgttgactatcaatgatggatcttaagaaccaatatacttcattttctaaaatactatttcgtaaggaatgcacctacacatgtatatatgaatttttactaaatagttttactttagtcggtatacagattttggcaaaactataatagttatgtaacccgcaaatattatagatttaaattgaggaaacaaaaacggattaaaaaactatatgagtcgtttcaaatgactaagtgagtcataggaaacttattagtcgcttcaaatttctaatctgtgtaatcaaagaatacatacacataaaagcaacttactaacaactatgaatcccataactagtatagagttaaattaaggaaacgacgaagaaaaagaatcttgactatgagtacaacgtaacaacttcaaatatttataggaaagaataaagtaatttcagatgactaagtgagtcacgagtgctttacgaacaaaaagaaagttacatccacattgtggaacacgtaaactttaatatttcattttttttcaagtcgtcccacaactataccttcaaatctctagacgtgagatatcaaagctaccttaaaacctgattatgaatttggttatagtacttggtattcttccttttcacattttggtggtttctaagaaaaataaatttcggtttgttatagaacaaaaatagaaggtcatgtagagttattttcatatattcatatctactattgacagaaaagcttgaggaataacttgcgaatataatgttgagtttggtgtttctcgaagctgaacaaacccaagcaacaatatgcacaaggctagagactggagagtattatttcaaaaggtcaaaatgtttgttggtctcattatcaaattggtgtaataattaacgttccatctttgggttcctaagttactcatatgtttgaaaaactggcttgacaaaaccgaaatacttatttttttctttttgctatcttgaaaaggggttaccatgtacaacttgataacaccgacaagaaaagtgaagaatcaacaagataaaacaataaaaatgaattgcaagaaaaatagattaattaataaccatatacctaatagattataaatcccttctaatctgtaatagagatcagagaaaaattgctgtgtaattaaattaagtaaaatatcacagagaaaaacaaatgtcatcataacgtgcgtacatttgatgtggtatacatttcattttacttgttaacttccgcttagtgttttggttcaacaagcaatttagtttcacttgcatagtcttttgatattattagttaaattgatcaaaatggcaaatagatgagttctatgttcaaaataaaaatatgatcatatgaatccgtgagctagtcccaaaaacagatatggaccaaccacatttaacatgttatatttctactgtgactaaagtcagttttaattctatgacataactacgtaacacattgatactatatatccgctcattcactctacaatgactctcatctcaatcgagtcaatcgccacaatttgtttgccaactaattacaaactcactagatatataacattcgaagtcaaaagataaaaaaaaatgtcgcttatatgatcttacgcatttgacaagaatgtcgctatatatcttgtatacatatctagcttcatgggcacgtttctatgtccttcactccccacttgtctttagttgataagaaattaatgttatacaacatcaaatgaattgaaagaaagcaagtagtatattttttcggaaacttgaaattaatttactctatcctttttgaaatgtaaggatgtttcaactaaaagcacaaaaattataaagtataattttttttttccaaaaacatcattactatttaattaagattcaaccaattatatataaaaaatattgcataataaaattgttgcaaagtactccttatgtcagttaatttgttgcaacaatatgcaaactttaaaattatttgatactccaacaatttgcaatcaaccaattattttaaaatcaaataattttaaaattttgcatagaaactaaccaaaaaaaaaaggtaacagctggaaggttgagattggttacaaagacgaattatttattatattaagccccaaagctacttgatttgtcgaacaacctctggtctctctgatcatttcaagtctgaattttgttcatccccaacatgaataccattatatatccaagtctcttaagcaaaacccgaagattcagacaaatcctgggttttcttttgtttatctattcctgaaaattcacaactaaatcgaaacagtgtagtgtagtgtactacagatgttgcacacaaggtgttcgacgaaattccccaatactaaaaattgttttttctttttctttaaaccaaagccttatgtcacgtgacactcacgttataaaagccagatttttcttcgatacaattatgttattttctcgttgctcttttttcccgcttcacaatttctctctgaagcaagaaaagccctcgagagacacaagaaagcttaaagaatcttgagaatcgtcttcaatggagtcttcttcttctatcaaggaggggaaactctacaaagatgctaaagatcacatcgctaaaggaaactacatcaacgcattgaagatacttgaagatttgattcgaatccatagagaagatcaaaacgcatggcttattcgtatcaaacaaggtcaagtattcttaaaactatcgctagaaacagagaattctgatatggaattcacatacttgttaggttctgtgggatgttactcggaagatgagaggttatcatcattttgtgcaaaatcgcttcacatgttggccaacaagcttggatctttgatgtactacaagaagtgtttggtgaaagcaaaacaagctttatctgttactttcccagatatcacggattctgttgctcggcaaatacgaatgaatgaaaaaaagaaggagatgttgagcgtaatcaaagatgcagagtctaagattgcttctccggagactctagttgcttctactatgaaacaagtctctaaaccaaaagttttggagtcagagaaaattccagacacacgtgagggtgtggtgaaaagattgaggtcgttttgggtgcgattggatgtgaaggtcaaaagagactttatgaaagtaaacattgcaaagcttttatcttttgtcgagacagtccgttacagagatgggcgagatgttttggagaaaatccttgcttctgcaaggaaagacatgatatggacattctggatgtgttgttcgaagaggttctctagtgctgaggaatgtaagaatcatcttgaagaagtacatgctgcagattttcaacctggtacaaaaaaggataagttccagagaatagggaaggactgggctcgtaagatatcaattggaagttgggaaccagtggatgcagcggctgctgttgaaatgatcaagaatcagctcgcagatgtgaaagcgtttgcatctaaatgtaagaatggatggtccaaagaatggcctttagctgcagatgaagagcgcggtaagttactcaaggaaatcaaattgctccttgtgtcgctttgtgaccataaaacgttatcatgcagtgttcgagactgggtgatgcattttccggttaagcatcttgaaaaacttgaagtctctgcacagagtcttgtctattctcgactagtggaaacacctcagagtatctgttttttggaatgtcctgaactcaatcagattctagactttctaaagaaaataaagtgtaaaaggaatgatggtgcagagctggttcgcagagcagtggacagtttcttggatcgtactcgggttaaagaaaagatcgactttgaccctcagttttcatatctgcttctggatagaagactgctgaaaagcaataacgctccatgtgatgatgaagggacaatcaatgtttttgatcccattgcccactacgccaaggcacatgctcagggggatgatatcataccttggttatatgactacaattcagtagataagatctttcccaaacctatcagggaatacaatcttgatatatggctagctgttctcagagctgttcagttcacatgtaggaatatggaaaccaaatatacaaatcaaaagttgttcttaggttatagcgcaactcttactataatcgagaacatatgtatgagtgaagatgaaaggagaaggaatcttcaggaagatcagtggatcagatatgcatctattctgtgcgataggtgtgaggagatagtccctgaaatttccctcgctagaaaaatatttgtgtgtgcagtacgagatgttttcgaaggagcattgcttccaacatttgatgtccctgatttagatgactgcttgaatcttatacgtgagcagaaaacacgtagtgacgataaagtgctggagtccataggccttctgaaattagcggtcacctacaaggttctttcatgactgtaactttcattattaacaacagagtaacatattcatcccatcttaataaattatcgacatgacttgcaggttcttctaatcgaatcaaagattttgctgattgataattcaaggattagtttgctaaacaacctcgccaggctttctgtatttgacaaccgcacttatattcttcaactgatgaaacctttcttgctggttggtctgtctgacttggcctttatattgttttttatatggtttcatatctcttctcatctagagtgcaataatgaatatggaacgcaaagccaaggcagatgcagtagcagcagatcttgcactcgaggaggagaagaagccacagtcaaagaagaagaatgataaaataaacaaggtctttcaactagtaatattctgtgaacaagtcaatgacgctttcctatcttattgcgataacatatcttccattttgacttcgtttccttacttttaggattccacttctctgctttttgtatacctgtaatgtccacattgtattaatgagtggtcttcatggtgcagcacagagcttcaacgagcaagtctagtccctttgatcagactgttgaacagtaagtaccttaaaagtcattttcttatgttatttaattgttttcgggttttctctgagtttttacatgtacagtaaacctcctgtcaaccttgaactaaaaacggtggaagaagattctatggaaccagaaaatgctcttgcaagtgagaatggtccattggaaagttcatccaaaactcaaaatcaagaggaagctactaaagatggccctgcaggttgtttaaaagcttctcaattgacaaataatttgaatcgtcttgttttgagatgcattattcttatatctttcattcgccattttcaagagatgctagacatgcctaaagaagattcactgtcggcacattcagagtcagcaattggaggagctgcagccagatacaattcagctcttgacatgacgctgaaggtaaagcagtttccaaccaaaggaagattgaatacctaaactctcatttactgattcaactcattccacatctcttcatttccttattccttttgatagtttcacaaaaacatgtggtattgcaggctctcttgaacattaaagttctcaaagaagatctgaagaacaatacacaacgatttcaacaagttccttctgcactgcaacatttttttaatgcttttgtgtcagagagcataaaaactgagggagtctacagttgcatcttgagcgacttacttagttccctagaagaagttatttccaaggttcgtcatttgtgtggagaagatatgcatctaagcattgtattataaattgtttttgtcaataagcttaaatgttattcttaaggtttttaaatattttactctttgcagtcgagtgatgctgctaaggtagttgtagccatccttgagttttggttttgctggaaaaatccagaaggagaaagcttggtaactcgcctttttacgttggcggaaaatgaaagaatgagttgcagaaaatgcagatggattacaaattatccagagaaaagttcttataccattgttatgcctgcagattcaatcagacaacttaaggtatgtttcattgatttctctctttattgttccttcagaaactggtacctcctcttataaagttgtcttatgcttaaatatatacagtgtgcttttgagagtatgaagtttgtggacatactaaaagtgatccgcatggaatatcaaaagtcatgcgacattaaaacaggaggttgtggagagtcaaactttgttcatcactttataagtagatgcccgcctgtcttcacaattggtaagttttgaccaccatgattgtgttcttatgtacacatttcacttataatgcttataataaaactttgtttgtgttttgtcggtttgcaacattagtcttggaatgggagaagagtgaaactgagaaagaaatatctgaaacaacaaaggctttagacttggagttagatatcagcaggctatacgtaggcttagaaccaaacactaactaccggctggtgtcaatggtaaaatcttaatcaggatcccaaatttttgtcctattgttcttctgtatctctctgttacagtctcaacgtatgtgatgcaggttggttgtggtgaagaagaagaacacatttgtttagcttatgaaaacaaccggtgggtcaatctgggacgagagtctttagcaggagaggtaagaagaaacagtttccctttgtcttgcttgagttgaactgtgaattaggatatgccagacattattgacacatatgtggtgatgctataggatgtcagtcactggaagagtgcggtcattttctttggagattttaaggtcaatctcagagaagagtctttatcaggagaggtaagacgaaacagtttccctttgtcttccttgagttgaattgtgaaattagataggctagacattattgacacatatgtggtgatgctataggatgatggcaactggaagagtgtggtcagtttctttggagaaaggaagattcgaccagagattctattttatgaagctgtcggatcgatggcctaacaagtgtatcaatatagaggatcccggcattgatgtaaataaaacagtgacatgctccaattcaaaagatgttgtgctctctattctataatattttgtcttggaaactacatttgttcatatacagagagtccttatcatatatacatgactaattagtgagtcacgagtacgttccaaacaaaaagaattttccatctcattgtggaacacgtaaactttaatatttccatttttttcaagtcaaatatatagacgtgagatgtcgaagctaccttaaaaacccaattatcaattcctttgcatatttggtggtttctaaaaaaaaagaaggtcataacttgcaaatatgatgtcgagtttggtgtttgtagaagctgaacgaacccaaacaataatatgcacatggctagaaggtggagactggagcataatatatcaatagctaaggtcaaaatattcgttgctctcattatcaatttgctctcatctttggcttcttaaatttttttttttttttttgtgtcgaagtccttcctaaattactcttatgtttgaaaaaactaaatacttttttcctaaatactggagcataatatatataatttcttatttctttttaatgaaactttataatagctagttcgagttagatgaattaacatggtaaatgattgatagtttgtatagagaaaggaaattgaacactttaaaaaactaaattttatatacgatatgtttatatatctgtcagacttataagaagattgtaacataattaattctaaataattatttaattattaaaaaaacaatgttgcgacaaattgatagcaacaacgggaaaaacacaaaagcataaagtctgtaaaaaataaaaacttagtcataagtcataacatgagtcacgctaatttattcaggacaaagaaaacaaacgacgatatttagtaaactactagtcactagatagaggaaagtctctatggtatagtaacatcgagctggagcttctcttccaaccagcttttgaccattacgttgcgattgttctcatgagcagtcggtccaaacctacatcacatgttcataacccaataacttattagacaaaaaacaaaattcaaaccaaaaatggtatatactatatagagcagggctaaaatgtaaaatattatttgatgtttatctaccttgcaaatggtgtgaacttgacgtctctaaatccagcctctctaagggacaaaacagcttcttctccacagtcacaggggtgaggaacagaatcgcctgcgacacatgtcatcataaagatttagcattgtctctgatcattatctaaagaggaaaatagttacattgaaagagaagccggttagatttacatattccatgcgtaataaagattgactgcgatgcagcacgagctggagccccatgtgaagcagattctatactgcgttttaggctcctgcaatgtttaataattagtctttcatcattcaatgagatgtgaaacgtaaaattaattagttttaagaaattatttgagtataccccgaattagaaagccacccgctgattccaacaacaactcggggatttatagtataatggttaagagcacaacttgttgcaaagtggagagctactgctgcacccattcctaaacctcccactccttttatgactatatacaaaataaagttttagtcattgagtagctgtaactagtcacagattagatatatgttaattaagcatattcaaaaagggaaaagcccacttaatatatgtatataaagattggtaagaccatttttttaatttttgttaaagtcccaaataattatgggtcgatattaggtcactctacattaccatttttttaatttttgttaaagtcccaaataattatgggtcgatattaggtcactctacattaccatttttttaatttttgttaaagtcccaaataattttgtgacatcaaataatgtttacaagaaaactgatgagtataagccattttatctcacatgaatcggggaacacgagagagggacatatccatttgacctgtatgtcaaaaaaattattcgtgatgttaacaaaattaatagctattagtgggttttaattaacataaaatgttcatggatacttacatttttaagattcaattgttccacaaactgaagtgaactgcaaaaagaatataaacataataagagaaacaacgaaataaaataaaaattaaaagttaagaagcgaagataaagtttctataattaatgtaagaaaatatttcgttcatatgagacgaatttttttctttcataattaacttggattagatcaaatgaaagatatgaaacaatacaaacaagtcatgtggtataaatgttactcagaggaacgctcatccttatcatgcagccatactataatgactctatgctctcctttaggttgcacaacaaaaccaggttcatctgctctgttgtttctactatctgcaaagattttaccatagaaaaacgtcattaaccaaacaaaattgtttgagagtagtagcccacaactttaataaaaactaaaaaaaatagttattttatttattgaagatttcttttattcgtgcgaaaatttcagagttgcacattatattgatgggaaatggaagagaatgaaaaggagagcaatgtgcaaatatacaccaaagagtgatgttgaatatctaagagaaaatatacatcacaaaagcaacgagaaaagaagacaatatacaccaacgagaaaacaataaactaacataacatggaaaatcaagaaggaaacaagacataccagaagccgccatgtttttatgagaagaacttgaaaatagtcttttttctatactcagccgatttttgttctatattttgagaggagttttggaaaagcagtgatggtgaaaatatgtgacgaacaatgtgtatttatacacccaaaaaagcaaacacatgatatatttttctgtttcactaaatcaaaatgtcaaaaatattggttggtcactcattaatgaaggaaacctaattaattagatgtttcattatcaatatgtgcaaccagacctaggttttaatgtttaatttctttctaattctatatgaaatgataacaaggaaattgaacttatgatatctacagtgtactacagctggaaagtggaaaccaataatatatttcatattatttgttttagttttgtttaatcaattgataaaaccaactatacatatttggaaaatgttaatatgtatgaatctctgaactagtagagattttcgttttttacacgttgactattaatgatggatcttaaaaaacaataatatatatacttcattttctaaattactatttcgtagggcatgcacctacacacgtatatatgaatttttactaaatcgttttattttagttggtatacacattttggcaaaactgtaatagttatgtaacccgcaaatattatagatataaattgaggaaacaaaaaagaattaaaaaactatgagtcgtttcaaatgactaagtgagtcataggaaaacttagtcgcatcaaatttctaattggggcatgagtgtgatcaaagaatacatacacataaaagcaaattactaacaactatgaatcccataactagtatagaattaaattaaggaaacgacaaagaaaaagaatcttgactatgagtacaacaacttcaaatatttataggtaagaataaggaatttcagatgactaagtgagtcacgggtgctttccaaacaaaaagaaatttccatcctcattgtggaacacgtaaactttaatatttccttcttttttgttttaagtcccacaactaccttaaacctgaatatcaatttggttagcacttggtattcttccgtcgcacgttttggtggtttctaagaaaagtataataaaattccggtttgttatagaacaaaaaaagaaggtcatatagagttgatcttttcgtttcaaataccattgacagaaaagcttggaggaacaatttgcgaatataatgttgagtttggtgtttctcgaagctgaacaaacccaagcaacaatatgcacaaggctagaaggtggagagtattatttcaaaaggtcaaaatgttcgttggtctcattatcaaattagtgtagtaattaacgttccatctttggcttcctagattactcttatgtttgaaaaaactgacttgacaaaagctaaatgcttgttttctttttcctgtattgaaaagaggttaccatgtacaacttgataacaccaacagaaaaaaagtgaagaatcaagaaggaaaaacaataaaaagtcattgcaaaaaaaaaaaatcgattaatcttcaaccatatatacctaacagattacaaatcccttctaatatgtaatagagatcagagaaatgttttgatgtgtaattaaattaagtaaaatatcacaaagaaagacaaatgtcattacttgcacgaccttgtggtacaacaattaccaaattcgatgtggtatacattttattttacttgttaatttccgcttagtgttttggttcaacaagttatttaatttcaatttcttagtcttatgatatatatatatgtatatttttttttggtgtaaaatcaccagccccaaaacaaaatctagcagtactagcttaggaattcaaatactaaacatggaaagacaaatgaagaagaagaagatctaacgagaggaatctgagtctctagtcttatgatattatattattatttgttaacattgaccaaaatggcagaatagatgagttaacgttctaataaaaataaaaatatgatcatatgaatccgtgagctagtcccaaaaagagatatggaccaatcacatttaacatgttatcattctactgtgactaaatcagttttaaatttaaataagaaacaaatgtttttaattgaaaataagaaaaattaaatgattttttaatctatgtgggaaaattttaaacatcaaataaattgaaagagaggaagtaatatattttttagaaatttgaacttaattaatataagtttccgttttaatataaaaaaaaacaattgatactccaacaatgtgtaagcaaccaattattttaaaatcaaataatttttaaaatgtgcatagaatctttttttatatataaaaaggcgtaacagctggaaggaggagattggttagtgatgaaaaatgaaaagtttctaattacaaaagacgaagatttgcaaaagcttttaattgtttatgtcccaaagctacttgatttggtgaacctctgttctttgatcatttcaagtctgattttcgttcatccccgacatgaataccattctatattcaaatatcttaagcaaaattcgaagattcccagaaattctgggttttcgaagtagtggagtgctatggatgttgcacacaaggtgttcgacgaaatttcccaatgctatttttttatatatcattcttgtgtcacgtgactctcacgttataaaagccttgtgtcacgtgactcacacgttataaaacccagcttcttcttcgatgcaattctgttattttcgttgcttctttttttcccgcttcacaaatttctctctgaagcaagaaagcttaaagaatcttgagaatcgtctacaatggagtcttcttcttctatcacggagggaaaaccctacaaagatgcaaatgatcacatcgctaaaggtaactacatcgaggcattgaagatacttgaagatttgattcgaatccatagagaagatcaaaacgcatggcttattcgtatcaaacaaggtcaagtattcttaaaactatcgctagaaacagagaactctgatatggaattcacatacttgttaggttctgtgggatgttactcggaagatgagaggttatcaccattttgtgcaaattcgcttcacatgttggccaacaagcttggatctttgatgtactacaagaagtgtttggtgaaagcaaaactagctttatctgttactttccaggatatcacggatcctgttgttcggcaaatacgattcaatgaaaaacagaagcagatattgagaataatcaaagatgcagagtctaagattgcttctccggagactctagttgcttctactatgaaacaagtctctaaaccaaaagttttggagtcagagaaaattccagagacacgtcagggcgtggtgaaaagattgaggtcgttttgggtgggattggatgtgaaggtcaaaagagactttatgaaagtaaacattgcaaagcttttatcttttgtcgagagagtccgttacagagatggacgagatgttttggagaacgttcttgcttctgcaaggaaagacatgatatggacattctggatgtgttgttcgaagaggttctctagtgctgaggaatgtaagaatcatcttgaagaagtacatgctgcagattttaaacctggtacaaaaaaggataaggtccagagaatagggaaggactgggctcgtaagatatcaaatggaagttgggaaccagtggatgcagcggctgcggttgaaatgatcaagaatcagctcgcagatgtgaaagcgtttgcatctaaatgtaagaatgggtggtccaaagaatggcctttagctgcggatgaagagcgcggtaagttactcaaggaaatcaaattgctccttgtgtctctttgtgaccataaaacgttatcatgcagtgttcgagactgggtgatgtattttccggttaagcatcttgaaaaacttgaagtctctgcacagagtcttgtcgattctctactagtggaaacacctcagagtatctgttttttggaatgtcctgaactcaatcagattctagactttctaaataacttaaagtgtgaaaggaatgatggtgcaaagctggttagcagagcagtggacagtttcttggatcgtactcgggttaaagaaaatatcgactttgaccctcagttttcatatctgcttctggatagaagactgctgaaaagcaataacgctccatgtgatgatgaaagaacaatcaatgtttttgatcccattgcccactacgccaaggcacatgctcagggagatgatatcataccttggttatatgacaacatttcagtagataagatctttcccaaacctatcagggaatacaatcttgatatatggctagctgttctcagagctgttcagttcacatgtaggaatctggaaaccaaatatacaaatcgaaagttgctcttaggttatgtcacaagtcttatgataatcgagagaatatgtatgagtgaagatgaaaggagaaggaatcttcaggaagatcagtggatcagatacgcatctattctgtgcgatgagtgtgaagagatactccctgaaatttccgttgatagaaaaatattcttgggtgcagtacgagatgttttggaaggagcattgcttccaccatttgatgtccctgatttagatgactgcttgaatcttatacgtgagcagaaaagttgtagggacgataaagtgctggagtccataggccttctgacattagtggtcacccacaaggttcattcatgactgtaatattcattattaacaacagagtaacatattcatcccaacttaataaattatcgacatgacttgcaggttcttctaatcgactcaaagattttgctgattgaaaattcaaggattagcttgctaaacaacctcgccaggctttctgcatttgacaaccgcacttatattcttcaactgatgaaacctttcttgctggttggttatatatagacagctttcattttctgtctgacttggcctttatattgtttttttatatggtttcatatctcttctcatctagaatgaaataatgaatatggaacgcaaagccaaggcagatgcagtagcagcagatcttgcactcgaggaggagaagaaggcacagtcaaagaagaagaatgataaaataaacaaggtctttcaactagtaatattctgtgaacaagtcaatgacgttttcctatcttattttgataacatatcttccattttgacttcgtttccttacttttaggattccacttctctgctttgtgtatacctgtaatgtcacattgtattaatgagtgatcttgatggtgcagcagagagcttcaatgagcaagtttagtccccttgatcagactgttgaacagtaagtaccttaagagtcattttcttatgttaattaattgttttcgggttttctctgagtttttacatgtacagtaaacctcctgtcaaccttgaactaaaaacggtggaagaagattctatggaaccagaaaatgctcttgcaagtgagagtggtccattggaaagttcatccaaaactcaaaatcaagaggaagctactaaagatggccctgcaggttgtttaaaagcttctcaattgataattaatttgaattgtcttgttttgagatgcattattcttatatctttcattcgccattttcaagagatgctagacatgcctaaagaagattcactgtcggcacattcagagtcagcaattggaggagctgcagccagatacaattcagctcttgacatgacgctgaaggtaaagcagtttccaaccaaaggaagattgaatacctaaactctcatttactgattcaactcattccacatctcttcatttccttattccttttgatagtttcacaaaaacatgtggtattgcaggctctcttgaacattaaagttctcaaagaagatctgaagaacaatacacaacgatttcaacaagttccttctgcactgcaacatttttttaatgcttttgtgtcagagagcataaaaactgagggagtctacagttgcatcttgagcgacttacttagttccctagaagaagttatttccatggttagtcatttgtgtggagaagatatgcatctaagcattgtattataatttttttttgtcaataagcttaaatgttattcttaaggtttttagattttttactctttgcagtcgagtgatgctgctaaggtagttgtagccatccttgagttttggtgttgctggaaaaatccagaaggagaaagcttggtaactcgcctttttacgttggcggaaaatgaaagaatgagttgtagaaaatgcagatggattacaaattatccagagaaaagttcttatgccattgttatgcctgcagattcaatcagacaacttaaggtatgtttcattgatttctctctttattgttccttcagaaactggtacctcctcttataaagttgtcttatgcttaaatatatacagtgtgcttttgagagtatgaagtttgtggacatactaaaagtgatccgcatggaatatcaaaagtcatgcaacattaaaacaggaggttgtggagagtcaaactttgttcatcactttataagtagatgcccgcctgtcttcacaattggtaagttttgaccaccatgattgtgttcttatgtacacatttcacttataatgcttataataaaactttgtttgtgttttgtcggtttgcaacattagtcttggaatgggagaagagtgaaactgagaaagaaatatctgaaacaacaaaggctttagacttggagttagatatcagcaggctatacgtaggcttagaaccaaacactaactaccggctggtgtcaatggtaaaatcttaatcagtatgatagatgtttgtcctatcgttcttttgtatctctctgttacagtctcaacatatgtaatgcaggtcggttgtggtgaagaagaagaacacttttgtttagcttatgaaaacaaccggtgggtcaatctgggacgagagtctttagcaggagaggtaagaagaaacagtttccctttgtcttgcttgagttgaactgtgaattaggatatgccagacattattgacacatatgtggtgatgctataggatgtcagtaactggaagagtgaggtcattttctttggagattttaaggtcaatctcagacaagagtctttatcaggagaggtaagacgaaacagtttccctttgtcttcctcgagttgaattgtgaaattagataggctagacattattgacacatatgtggtgatgctataggatgatggcaactggaagagtgtggtcagtttctttggagaaaggaagattcgaccagagattctattttatgaagctgtcggatcgatggcctaacaagtgtatcaatatagaggatcccggcattgatgtaaataaaacagtgacatgttccaattcaaaagaagttgtgctctctgttctataatattttgtcttggaaactacatttgttcatatacagggagttcttatcatatatacatgaatggttcagctaccaaaagacacatttatctttactttattgttatgagttttctgagatcagtatgatccaagtatatctcggcaaagacggtatctcacaattcactatcattggaacaaatatagcacaaaaatttgattttggtaaacaaagggcttttttaaggtctcatgcatttgaccagaacatcgacgaatcgcttgtacatatgttgcttcatgtacattttctcaaccattttgcgtccttcactccccaatcgtagcctctcgtctggattcctaagtagatacaagagattatgagctaattctttgttaccggatctccccattgagtgaagtagaccagtcatgttgtgttgaaccatctctttggttcctcctgcatctgttcccaccactgcaagtccataagccattgcttcgattgtcactctaccaaatgtttcaccaactccctgtaaaaaatcaaggttcaaaataaataaaccgaacaaaatcgaaatggtcaaaccgaaatcaaaacctacattttgaacaaaaacaaaactgaaatgttttatccaaaaccaaactgaaatcaatcacaaattggtttatttgattcagtaattcaagttcctataaaactgataaaactaaaccaaaacctaactgtaaactactttctagtggaaaactgcatatgcatcaaataatgtttttgaggtgtgaggaggattacctgggagtttgtaacgtagacatctgctgcagagtataatgaagcaacacgggttgttgcaggagtccacattaccgacttagataagtttccgctgtttgacaagaagcttaacatctctttaacgtatccaactttgttgctctttgaacccacggatcctaaaagaactttaagttcttgcttctctcttcttaagccattgtcaagtgtgagagaaacacttttcatctgtcgtgatgaacctcttaaacgatgtttgctggagagactaaccttttctttcctaatgatccccttgtgattcctttgagattcttgtcctctctcagaaagagccaaggcaatagattcaaggagaagaagttgtccctttgttgggtttatgctgctaagagacatcacaagcatatctgaatctgttattcctaactctgttctcactgattcgcgtaatatttgtctcttcaccctcattttctctggtgaaagtgttggtgtgttgagtgaagaaggaatccccgctacaaaagctaactcatcattaacagatagtggaacaatcactggttgtgatctaagctttatatgctcctcctcgcaccatgttaaccattgtctgctctgtgattcagataagaaaatcagcattttcactcggtcaagaactggtttcgctcgatcaaagtattctcgtcgattctccattatccaccaagctatttgacttccaccagctggatgatgattcatgtattgatctgcgagaaaaggaaaaaaaaaaagtaattaagatatgctttcctctgattgtaaattagtagtctaaaaactgcataatgaattcttacctatccatgaggtacacactgctgatcctgcgatgatcaaatctgctttcatggcagtcttgaagctgagttctcctttgtcttcaacaactttgatccttctcctactgagctcttgcatcaatccacctctcctgctaagaactactgcagagactgttgcaccacagctcaaaagctctgaagccagctccatcatagaaattggagcaccagtcattgatagctcgtggaaaagcaggacgaatctccttgaccaaacaaggcgtttaaaatctgatttcctgtcgcaagtcccagatcttctatgcgggctccattcaagaactttatcctctagtgatccaaagggaccaagaagcttaccataagtagcatttgtcaatggaagttgtggatcttgctcatcatccaaatccttagtctcaagtacctctttaatcaccttctgcttaacacggatcttactacgagaagtccggacagtttttctcgtcttctgcttggaactcaagctccgtcgagaaaccccatcatctttcttgatcagactaacatccgtcctcttattcgaaccagcatcatctttaccagtaatattaaccaaagcctcagaattctcattagcaacaacatccagtcctttaatcttctccatatataactcatcctttctcggtctgcctccaaaccgtaaaaactcaactttgctttcattatcatgtgcccacctagactgaacataaaatccaagatacgtccaaagcgtaatcaaaagcagccaataaaccaaccggctactacgaaaccactgaaacgctcctcctccaccatgacctctacgcggagtcctaccagaatacactctaggtgtaccccttggagtagacctccctgacagtgaagacttaacacttgtctgtctcagcggcgataaccgaatctcctccataatttcaaggctataatctcattatgagtaacatatcaaacacaaaagcaatctgaagtagaaaaattcaaccgcttcaatccaccatcacaaaattgggcagctcacattaacatcacaacctaagacagataaaatcattcaatcagtctacaacacatatcaaagattagcatgcaatgatcccttctaattccagtacatcaaactctaatttaacaaaaatctgatactagatgaactataactgtttagaattcagatctaaactagtcttacgacctgcatttaggaattaatcgcaactattttaaactaaatctgaagaacactccagaactttctcagattacaaaggattttcaattccagagccacaaaacaagcattagaactagaaaattgcgttggataaatttgaagactgaagccagaaatatatcttctggttacaaaaaattcaaaatcacatcgatcggtcagtgaacacttaccagaagctgagtaattaccgacttggatccgccgattctacaacgttgcagcttccgaagtacaaaagatcgagaaagcgcagctaaattgacgcgaattc

SEQ ID NO: 88 - DNA, 130234 bp, Arabidopsis thaliana
gaattctttgtaggggaggcttttaaagttgtactaaccacattgaaaaagacgaatattgatttaaatgtggatccatgcgaagtctcatctactggaaatgaatggtcaaccatcagcaggtggaaagacctagtaacttgtgactgctccttcgttaatggaaccatttgccacattaccaaaatgttcgtctcccttaattttattttataaaatctatttggttttgttgagtcaattttgtgattttttttggttgatatttgacacagaaatttgaagagagaaaatcttcaagggtctcttccaaaagagttagtgggacttcctttactgcaagagatgtaagcaagaacccaaagaatcgatcgacgaaattacaaagttgcatctttaaaaatgatatgaagtagtgtcattctttttgttgtagtgatctctcaagaaactatctcaatggttccatccctcctgaatggggagtcttgccacttgtcaacatgtacatacacatatctccatagctgctcataccatttcaatatatattggacttactttgttgatgaaatgcagttggcttctcggaaaccgattaacaggtccaatccctaaggagtttggaaacattacaactcttactagcctgtgagttcaactaattttcaatctattataaccaatgttttcagatagtttatgtttagaagtaacttaatcaaaaaaacttatgattttagtgtcttggaagccaatcaactttcaggagaattacctcttgagctagggaatctaccaaacattcaacaaatgtaagattattcgtacgagtttaagtttagtttttgtattgttgaaacttgaaacctcgatttgtcattgttcaggattcttagctcgaataactttaatggtgaaattccatctacatttgcaaaactaaccaccttgagagatttgtaagtattcttctttgattcatagagaattttttttttatttgctactatatatatgcaattctgatattttttgctaatgcatataattttgtacatagtcgtgtaagtgacaaccagttgtcaggaacaattccagatttcatccaaaaatggactaagcttgagcgactgtaagatctttgtttacggtttgagattgttacttcctttaaacattcttgatttaagtaattataatgttatggttacctcaggtttattcaagcaagtggtttagttggaccaattcccattgccattgcttctctcgtagagttaaaagacttgtatgtataactaactacattggcgtcatgttagttgttaacttttcttcaatgtatattgactttattattcttgtaaatgcatttcttaggagaatcagcgatttgaatggacccgaatctccatttccacagttaaggaacataaaaaagatggagacattgtgagtcttatagataaaactacatttggaacctttttggacgttgaaagctaattcacaagctctttttttttcttgtgacattgtagaattcttaggaactgcaatctcacaggagacttacctgattatcttggaaagattacctccttcaaattcttgttagtatatttacaagtttatagtcaatctctactagctaggatgaaatcaaaactaagctaactttgtaataatctttttgtagagatcttagcttcaataaattaagtggagccatccctaacacttatattaatcttagagacggaggttacatgtatgaaatcattctcttctttcttatttttgagaaattgctgagaattttgttagacttgtttctttcttacagatattttacaggaaacatgttaaacgggtcggttccagattggatggtaaataaaggatataaaatgtgagttttaaaacttttttgtagggtgcattacgaaaaaaattatatgtaattacttcatagattattaacatgtttcttcggttactggattatattttgtagtgatcttagttacaacaatttctcagtagatccaaccaatgcagtatgcaagtacaataatgtgtaagaaaacattacaccttggaaactctcatggctatttgtttttcgtaattttaagagactaattaaaagattaacaaatgttttgtttgttatagactttcatgcatgagaaactaccaatgtcctaaaagtaagtttgtatacgcattaatgaagagaatgaaattttagtcggtgcatgtgttagtctgatttatgctctatttcttgtgttatagctttcaatgctcttcatataaactgtggtggggatgaaatgtctatcaatgggacaatatatgaatctgataagtacgatagactggagagttggtacgaaagtcgaaatggatggttctcaaacaacgtaggagtcttcgtagacgataaacatgttcccgagagagtaaccatcgagtctaactcatccgagctcaatgtggttgattttggtctgtatacgcaagctcgcatatcagctatctcactcacttactatgcattgtgtttagaaaatggaaattacaacgttaatctccatttcgccgagattatgttcaatggtaacaacaattatcaaagcttgggtagacggtttttcgacatatacattcaggtaactagtaggacaaaaatatatattaaatgtctaaaaagcttggtcacataatgaattttgatgaatctttggtataataatgtagaggaagctcgaggttaaagatttcaatatcgccaaggaggcaaaagatgttggaaacgttgttattaagacatttccggtcgagataaaagatggaaagttggagatacgattgtattgggccgggagaggaactacagtcattcccaaagaacgtgtttatggtcctctcatatcagctatatcagtggattcaagtaaacaatgtcacttttttttggtatttttcacattagagttgatttattatctcatttctaacgaaaatttaatacgttgatgaaaataggtgttaatccatctcctagaaatggtatgagtactggtactctccatacattggtagtgatcttatccattttcattgtgtttctcgtatttggaactctatggaaaaaaggttacttgagatcgaaaagccaaatggaaaaaggtactcatcacaaagaatactaataagttatgatatttctaagtgattttgtgtttcttggtataattgttagagctttgttcttctctcagatttcaaaagtttggaactcatgattgcttctttctcgttgaggcaaatcaaaatcgctacaaacaactttgattctgcaaataggattggagaaggcggctttggtcctgtatacaaggtaagaagagaaagaaagatcacaactaagaacaatatatatgtgtatggatggatcaattctcaaaagtttgttgtctttaatatggttacagggaaagttatttgatggaacaataatcgcagtgaaacaactttcgacaggatcaaaacaagggaaccgcgagttcttgaacgagattggcatgatttcagctctgcaccaccctaatctggttaaactatatggatgttgcgttgaaggaggccaacttttattagtctatgagtttgtagaaaacaacagtctcgctcgagcattgtttggttagcaacactctagctccttaaataaaccgtcaaaactgaatttagttatgatttgttttccctttcttgataaaggtcctcaagaaactcagttgagattggactggcctacaagacggaagatctgtatcggagtggcgagagggctagcatatctacacgaagaatcgaggctaaagattgtacacagagacatcaaagccactaatgtgttgctagacaaacaactgaatccgaaaatatcagactttggtcttgccaagcttgatgaagaggacagcactcacattagcactcgaatcgctggaacattgtaagtcacaaaatcaatattcaatgataaaagtttatatgtcatgtgagatttgcttataagttatagcacatcatctttttgcaacatttatgcagtggttacatggctccggagtacgccatgagaggccatttgacagataaagctgacgtttacagctttggtatagtagctctagagattgttcatggaagaagcaataaaatagaacgatccaaaaacaataccttctatcttattgactgggtaatgatctttttgattgattacatttcacagaactattgaacaaaagatctcaactatattttgttcttgtttccctaggtggaggttttgagagagaagaataatctgttggaactggtggatccaagactaggatcagaatataacagagaagaagcaatgaccatgatccaaattgcgataatgtgtacaagctcagaaccttgtgagagaccgtcaatgtcagaagtggtgaagatgttagaaggtaagaagatggtggaggtggagaaacttgaagaagcttcagtccatagagaaacaaagagacttgaaaacatgaacacgatgaagaagtactacgaaatgatagggcaagagataagtacaagcatgagcatgatcatgagtgatcgtagtgaatcatcagcagatcattagcagttgtgtaaataacatatcaagatggaaacccaaaaaactgtctttagcatttcagaagcaatctaagtaagtacaagtcagagggagagagatgtgggaatcaatctttttaataagtgtttaaatagacaaaagcagagaatcctaatgtaactacttacacacaagatttacatttggttcttttcttttcttgtcttttcgaatattcttgatcttaaatcaattttcttcctccaagttggtaggctcgcttagaacatacttaggtagctcatacttagcacctgcagcgcaaaaacagtactagtcagggaaatgaagaacaatcatatgacgcaagtaaaacaagatttagattttgacctctctcgtcatagcagactgtgagatctgtgttctgaacaatgactcctgcactgtccacaattgcttgtgcaagagatatgtcagcttctgcagcagcgcgaagtgcgtcccatatctctgcgattaccaagtgtaaaacacaacatgttgacactaagatcagatgcaaccagccaaaacacataacaaagcatatcatctgacactaaagttatatgatttccctcactgtggtataaaattacactgacacaatgtagttgccctgaagttcaatagtaaacatatgaaactctcaacctaatgaaatattaattgacaagtgttatgcagaacattaaaagggtccttagctcagtggtagagcaattgactgcagatcaataggtcaccggttcgaatccggtagggcccttgattttttatttttttcctccttccatccatttgtcacaaaatccctgcagaagaatgactacctatctatcctgtttatgtataactcattcctaagggctcaaggaataagtaacaattaccttttctaccaccataatgaggagcagtgtcccaaaactcttctctaagtttcataagctcagctttcgtgatcggttgggtatgcttccacggtttcggcttcctaattttcttcactgaccctgtaaccacacacgaaattatccatctgatgcaatgcacaacccaataaaactaaaggatctatatacatcatcaaccataggcattgccgcattgatcatactagttagtgtccaattagattaaaagttagtccattcgcggaaactagctttaaccgtgtagattcttcacttaaatttctttatataaaggaaaaagccaaccataatcagagatgaacatacatagacaacaacaatctaaaacataaaaatccttcattggaattaaatttaaacatcatcatagatatcaagttcgaagataacatcagctcttgctactgccataaagattcgaaactgaaacaaaactcaatcagatcagataaaacctaaaccctcaatttcaacgaacaaaatctactttaaggtaagaagaagggaacattccaagcttccaacatactgattacacaactagggtttctctcaccgatttcagataaaaaaaacgattccttttttctccaatccaacaaaataagatagatttgatcttaccatctgcttgagactgtgtcgatccagcacaacccatttatgttcttgcttcttctttcaaacccttaaagtaaaaaacacaaattctctcggaaataaaccaaaaggattcagacaaaaccctgtgtttgtcgaagcttcatcgaaaccaatcaaagtcgcaaacttttcttttccttaatagaaagcaaagagatttttttttacgaatcttcagacaaacaaattagatgtcggtagaaagacgaagatcaagaccgagttgaagatgacgatgaatcggtgttgatgattgtgacattattgtgatctttggtatataaagaagtaaagattttttttttttttttttttgggcataacgaaaaggaaaaaatgggaattttggcttcgctgtcttctcaattaaaggtaaaggttctaaatccaatgcgagccaccaatcatatgttgccacgtcaccataattattctttggattgaagaatctattgtgcacttttaatctttaactaataatgatcatggcttaattaagttaatcaagttatcaggttgggaaaagaatagcaatgataatcatcactataaaagtcgctaccagattatttttgttttagttaaataacgaataattcaattagttaattaatcccatagacagtgatggtatacattaaagtttcttcattcttttcttttttaattgtttgtgattaaacaatagcaaaaagtatcaaagcactgagatacttgttcattttgagaatttatgattacaactatttttgtcttttgttattaaaattcaatccaataaaatggacaaactgaaagatagtaatttgtattttaggatcaatgattaattttggtaaatatttaaaagtaaaagcaataagagatgataattttaaaaataattttatgatcagtaatattatattatatttgtaagattttattaagattttaaatttatgattcttcatttttatttgattttattttcaaattattttgaattatcatataatacatataataataaggaaaaaaaaatcttgatacatatatatattttattctagataagttatgatacgaaattttagaaattaatatttatcactcaattaattagagaaactaattcaccaatcaacaatcacaagaagattgaagaacttttagtcatgttttaatcccaaaatttcaagaccaagccaagattttttaaagagcttatagattagctaatcaaacatgacaacactttctcttgtgtacaaaaaccaacaattaatgatgatgccacaaaagacctgaacaataaaattcacaacaaagctataatcattgtcaaatctaaccaaccacagaattcgtgaagctcttcttctaccggaagcttcagatacctgcgaactataagtgaattaaacccctcaaggaaagatctttcttcacttcttttgaagtatgagcatccccacaaaggcaactccacgagtggtcaaacctacgagaagcaatatcattatacacagactccatttattaatgtcgtagccactcttcataagcgatccacatcgagtaatcatccatactccatagtacctgaaacccaataaatgaatcaaacccagcttttgagggaagaaatataatttatttctttttgctttttatccttacttttgagcatttcctatcacaaatgcttccaaagcccactttggataactcaaatcagctatgatcctgataagttcactattcttcggttgggttgcaacaagtgttaaaacgactggaagaagaacagaaaactgcaaaatccccaaaaagttcgttaattagaataagtagagagagtatatgattcttctataaaaggacacttaaataaaactcaccagctgggctgtgctcggttggagaaagatagccaacgcatatgcaataccggtcacacaatatacgagacagaccaaaacaatatagttatcgaaaaatgtggatcttgggttcgtgaagaaatagaacatggagagatagaccaatggcttgacaagtatattgaaaatgtctattgtatctttggcaaggaagcaggccgaactactcatccctgaagcactttctctccagtaatgtaacttgtctagtgagaatgatcttaaagctgctattttgcaaagaagagctgacagaagaagaagaggatcataacataagatagataagaacataaagaaactctcaaaaaatgattaataacagtaatgatagtttagtaaagggtttaatccaacttacagactgcgataatagtataaatataaccaggagctccaaagctctcatcacttgctttaatcagtgatcctaaacaagctccagcaagcaacaatatcaaatagtctgtggcttgtaattgagcttctctcattcgctgcttcgctatcctgaaatcaagaacattaatccgctttattccaatatccaagaatcaattgatcgtaagtaagtcatggagaatgtcagaagtaaaccttccaaggaaatatttgtattgcagccacgtactaggggttcttctgtgggataaatctctagactttaagaagttatgccgtattttatcacgacgcaacctgaaattactcttcacatcccgccacagctctctcgcaaatgtttgttctgcattatctggtgaattagtacctaagtctggattcgtttcaagtccagcagcactgttgttccgcatatctaatggaaccgagtaccctttgtgaagcatccacctttgaggaagctctttgtaaccaataccagaatttcccattgaaatcactactccttccagaacatcgatgtaatagtcaggagggttgatacggtctggaacatgtatccccagacccgagaagtattcctcaactttgttgactgatccgtggtaaacagtaaggccacctttcgcgagaagtactagatcattgaacgttttgaacaaagtataactgcaataaaagataaaaacattatgaattaaaaacaaactttatgacacttgcagaaatttcctctatgagaaacttgttttcaagataccttggttggtgaacaaccatgcaaatatttactccctcgagagcttcatgccgaagtgctctaagaagaagctgtgatgaggcactatccaagccagaagtaggttcatccaagaataaaaccgaaggctccattaccatctctaaacccacattcactcgtttcctctgccctcctgagattccccgcttctctacagtaccaactaaagaactcctcacagcttgtagccccaaggagtcaatgattctttcaaccacaagaactttgtctgctttggatagatccgcaggtaatctgcatttagcatggaaccaaagattttcctctactgttaagtttccatgaacaacgtcatcttgtggcacaaagccaataatttttttatatgagtggattgattcctgcttcccatttataagaatcaaaccacttaatttgcatccgacagctttcccagccaaagcagaaagaagacttgtctttcctgctcctgatggacccatcacagctgtgatccgacctggtttcatacttcctgtgacacatcttaacacttgcttaccattggatttcaatgtaagagttaaatctttgaaagaaagctccatgagatgcctctttctcgtctcagaattggtagccattttgactattcctgaaaatgtgagatttttattctcttgctccatggctttctccttttcaatccgatcataagcatacttgaagatttggctttgtgttttcttaattttggccaaagtctgtccttttactctctttccttctatgccaagacttgctcttccattactcccagcggctgcatgatcctcattctcataactagattgtgcagcagaggaactcgcaggacttgaacatgtggacatgtctatagcttcatctatttctgaagagtccccacgacccaacatcttgttggtatccccatcttgattggctcttttacctgaaaatgtccgagttatttgcgcacggatcccactcacatgctttttagcagcctctctagcagctttccatctatgatgagctctcgctttcttcaccgctgcttcccttgattttgcctgcctcctttccctagttgttaggatttgatcggaacaattgtagataatgagtagaatagtactcactgcagcctgcacaaacaaattgaaggccactctttcagtagaaaatcttaatcttggatttacattcattaatatctgaaaaaacttacgataaccataatcccaaatgcatgcatgttctgatttgctgtgttaggattgcaggacgtcaacttaaagcaggctgcaaaagacaagaagtcattaatagatgacgagacaagcagatggaaatggtaatgggtatgtgacagcacgccattatataatattcgaagacttacgtttctcagaagtagaccccatcctgcagtagtgcctgaataacataaaagtaaaaccagttaagctaaaatcaattcaaaccaaaatctgactatcagcttaatcattattttgatatagtatagtaatacatctttgaggacaatttggagggatggaatggagtttgaagggaagtaaaaatgactacccactatcacaaggtactttttgggttgtggttggacaatatgatcctgcggaacagaatacttcaccgctggatctgatatcggcccatacatttgcacctccacaagtgtggtttggtcgtcctgatggtaattgataagtatacctatagatttgacatttcaacatcttatcacatgtatcatattatagtatctatatgtaagatgaaatgaaaaaaaaaacgtacggttcacataagcttgtagttttattaagggtagctaaggggcaatgagcaccaagggggcaagcttttcaaaacagaacagaaaattagtagcagcgttagaccatatatatgagaaagacttacaagccaatgtaagtgttttgaattccttacgtatcatacaagtgaggccacgggggcagaaaaacccttcgcagcaaggcatacagtttcttcttctttcaggaaaatctttggagttttgcagatcgacttgttcggttggatcaacactacagccccatccaggttcacaaccagagacccatgaagtcaagttgcagtttacatttggtttcaagtagcccgggttattcgttttattgaagaaaccattaaaatagaacttcatctctgctgctgtacagatacgcttaccaatactacctattccaaaccgaaaaagtcacaaacttgtacataaaaatgtgatcttcgaagaaacacataaaaatatatgtaaatcatgtcatcagatttaactctaagaaccataaaaaacatgagaaatatgcaacaaataagatatggacttcctatactatacaagatcaaaatcgtcacactttccgtcttttgtcaacaacgaagtaatgattttgagtgctaagtaaaagtccattaccttgggttttcttaatgcaagaagataagaaattcaagttggaggagaaattaaaagctctattccaatcagcatccctgagattgtaagttcaataaaaggacaatctgagcaaattatctctcaagacttatgtaaaataaaagaacacatttcacctaaagcacctacagagcaaatgaagctatcaaagcatcaactattctaagctccaagaattgaaaattacacagcctcattagaaaatatgatatcttaccaaacaaacaaaacactaagctgaaatatttagaagaaaatgagacatttttttgcactagcgaaacaagtttccaaaaaatatgaaactcaacaattaaagaaagttgaaagaatatagttgaagagtaagaaaactaacgggtctttgacgcaaaactttgctctgataccgagctcgcgattaagagcagcagtgctattagaaagactgcggtaaaccatctgagtaacgagcggaagaacagctggattgttgaagtcactggtgtccccaatagtttgaccattactaacataacaaaccaaccacagaactaagataaccaatctgagattacatccatgtttaagccaatttcgccggtccacactcatcttgagattcaaaagccttaaaagaacacaaaagagaaagttgctaaatcagatgctacacataaaaaaaaaaactttcttgatttatcaaaaagagaagctttttcaattctctttaaatggaatgtttgagacattgtgatttgtgagtggagagggaaaaaacgtgaagggagttggagaaacgatagtggtcttcactgtgtgtgaggaacgtgaggagcaatgtgaaaaacgatccatctaattccatacattatattaatcaattgttaagcttgacttgggtttagctacataaaggttgagtttttattggtcttattacatcacatcacaaactccaagacaatctaatttcaagaatttgataacccagaaacataaaagtgctttctttttctccagatcacatcaaacaaaacagagaaagttttaatatttctttcttagattgcagaattcaaagaaccctaaattacagagactaaaagagtggaaccaggatcaatggaaatgaaagaaaaaaaaacgtacattatgactagtgaagtattgaagttcatgacttgggagctgaagaatccatgaaaattaaagttgcttagggaagctttgtttactagtaatctacaaagctttgagatgtgcaggttaatccgccatctttgacctcgacaagaaagaaggaagagggaagacgaagagagtgcgttgaattattcattaggacaaaaggaaggacatatagactttaaattataattacggttttaaagtatctataaaagtgtcaatatttaccattgattagggaaaataaatattttatttctaagtttagtcaaattttctctaaagtataatgataggaaatatttgtgattaagaaaataaaatttccgttttataagtagtatcgaaatgcagatttctcttccagaattcaaattgtaataacaaaagttttctgtagaaacgtcatttcaaaatttgaaaccctgacttttttatacattaaactataattgattgaggaacataatttgtaaaatactaattttttcatgactatataataaatgatagagggaaattttgaatattcgtcatcatgagaaattaaatttaggatagattgcaaattgtgttcatatgttacaatcaactggtcccatagtatattgaatttactggtccaaatttggaagatagaaaagaattaataaccgaaattttaaaatcctcaaaacaaggttgatttttcacgtttttaaaacttgattctgtcgaatacattttacgggacaacagaacgtgaaaatgacaaatgatttttcaattcatcttatacgtttaaaaattataactaaataagataaaattcattcattaactaaattgtaaattttacgtttttaaagtaaaatttttttattcaatataaatttgttagagattaaaaaataagaataaacaaaaaaaattattatcgttttattgatttcattattattagtcattgatcattccattatcgttttggtggcattaccaatcaccgagacggttgatatagacgatagtagagaaaaaagtaaagtaggatgaacatgagtcactgagtcaaatgacaaagaaagtgattgtccatttctttggtagtggaggaactgaaccacaaaaaaatctcaaagcttttcatgtaaaagactataaaaaataaatcgtttttcgttttggcatttttgcattccaccttaacgcctatgacgtgaagagctagacatatattttatcttcttgttttttagattcttttcagcaattgtccgtaagatgaacaaaagatccaaactttttttctctaaaagaagaaagtcccaagcctcaccaatcggaacctgtttctttattaatcaaatcgagctgagcccgtaacaaaacagataagcccaatcaactcacacttttacctgatatcttagttggcccattaataaacccacccaagtccatacatattgcctattagaaaatgaccaaaaacacctttcgcgcatctcgagatctctccctaaacaaagtcgcaacggccggtgtcaatagcctttgctttaaagggtattttaggaaaactcaatttgaatctcccaatgctcgtctttgcttttttactctctctgtcttttgtccttttccgtcatttcacattactctcttcttcttcttctcctctctgaccgtttctcatctccagctctcattttctctctcatcttcaaccttaactctcttttctctctactctttctttggacgaatctgtctattgtttgtaagttttcaaggaaggtaaagaaacagagagatctaacttcggtgagtgtacaaaccattattttcacttaagcaagttttgtttgttaaactttcatgcgggtttctggtgaatgattcgattccattattgctttgtttttttttgtgtgttttcgaagttttaatttttattacagtggaaggttcatgtcgctggccgtgggcctaatctccattggtgttagctaataacaataatgtctaatttttgtcgcatttattgtttttagttcatcttatatataaatagttgattctctaaaagggttttaggactttcttcttttacacaacaaaaagtttggatcttttgttcatctattttttctttgagtttttttttctgtgttcatcctctgttctattttttttttcttctcattcttgggttgatttttgacttctgtttgggttgatttagtctgcagggtttaagcagaggttggtttgtggattcttcgatttcttcttcagatttagtctacaatgaagtgagaatttctaaagataaacaaagaaaaacttgagactttagcaaggtacgacctttgactttattagtttgtttgaaaacttgctcctaaaatttgaaatctcatagttttagtagttatgttcacatcatcaggtctcattatcactctttaacattcattttcttgttaagctctcttaggtttaattaagccatggagctctgttctagggtttgtagatgagaaatgtcttaagggtctgtttggttagctgcatagcgtttagaacgctgttgctagtgcgttctagagtctaaaaccacaatgagacattgtgggtcttgtgtctgattgtactaaatgtatttggtgggtttgtcaggctttgaagttgtcctgttctttcaaagggttaataatcaattttttacccatacatctggtttttaaggtttgtactgttttcacgttagggtttttaacatactaatagagatttgttctgtttctttaatggtagttcttagagaggtgaaaataaacaaacatattcttctgaattattctgcataagtcatgtgttttttgcagagattatatgggtgcaattttttaattgtttgtttgattctgtagcagcacattttgacttatagcctcgcagaaagagcaaacatattcacataaataataagaaagaaaaaaaaaagtagattggtttcattcatatagagaaatggtatagacacaagttgcttattcttttattccttctcttataaaaatagcattttccaagcataaaccatgaactcttcacaactcttgaagaatattttaaaggagtattcattgtatatatgcatcctgatatttatgtgttctctcttttatatgttgatcactattattgaaacattcttttactttgagcctttttcatatagttcttcactagtttctttgataaagcaaagtcctatttagagatattactaaaaagatgcttggccctccattaacggtccttgatccaagtattaaagcttgttcctctttttctttatgtatcgttcatcattgcagttctgattcactctcttgctttttaattccttttttggtgattcttgtcttattttgttactgtgttcttgatactgttgtctccgtactaagctctttttgtaatggatctgcagatggagactgtgagaccaatggttgttgctcctaagggtaacaaactcagacgcaagtttgctaaagttcttaacattcataagctaacgggtgttgctccagaaggagaaatgaagaagataaagttcgattccaaaaccgctaagttgtctgagtcgttctacaagcttgaggaagagtatgagagaagtcagggattggaagctcttcttgcgaagctttttgctacggtttcttcgatcaaagcggcttatgcgcagttacagcattctcagtctccgtatgactctatcgggattcaaaaagcagataacttggtagtcgccgagcttaagactttgtctgagctgaaacaatgtttcatgaagaaacaagtggatccaaatcccgaaagaactctggttctcgcggagattcaagagctgaggagtctattgaaaacgtatgagataatggggaagaagctggagtctcagtacaagcttaaagactcagagattatatttctgagagagaaacttgatgaatcgatgaaacagaacaagttgacagagaagagacttaaccaaagcggacaactttgcaatccacttgacaatcttcacctatctgcgctaaatccaacacatttcgttacttatctgcaccacacagtcaagtccaccagaggtttcgtcaagctaatgatcgaacaaatgaaactcgctggatgggatatttcatcagctgctaattcgatccatcccggtgtgttctactacaagcaagaccacaagtgtttcactttcgaacactttgtctccaatgtgatgttcgaagcgtttcatctaccgtacttctcaacttcaagcgagtcaagaagctacaagaagaagaaacagagcaatgcagatagagaaatgttctttgaaaggtttaaagaactcaggtcgatgaaagcgaaagattatctaaccgcgaggcctaaatcaagattcgctaggttctgtcgagccaagtacttgcagcttatacatccaaagatggagcaagctttcttcggacatttgcatttgagaaaccaagtttctgctggtgaattcccggagacgagcttattctctggatttcttgaaatggcgaaacgaatttggcttttgcattgcttggctctctcttttgaacgtgaagctgagatctttcgagtacctaaaggttgtagattctctgaagtgtatatgaagagtgtagcagaagaagcgtttttcccggcggcggagagttcgccggagtctgagccacgtgtcgcgttcacggttgttccagggtttagaattgggaagacttcaatacaatgcgaggtctatctctcgctttcatgatcgccgtttgatctaagatccgaaaacggacggtgaagattcttgggcggtttggtaatttctgaaaatggtggggtatgtttagaaaattgagaaaaattgtgggccgttggatttgaagtagcgaactagagttgtgtttatgttttttttttttctgtcttttgagttttgtcgatattagttcagagaacacagaggcatcttttagctgttgtccattgaatatttatctctttttaatataatatgtaaatattttatatgttttttagcctacttggagaaaaataaaataaggaacgtaatgttggaaattatcgaatttttaaggtgtataaaagatttcgtatatgattgaaattcaataatatttaatacttgaagtgttggtaagatagaattttatataatttgcatgtacatataagcattggatccattgtaaatgtattgctggtctatgaaccatccagcactgtgtctccctgttttgtgttggcacatgcacattacaattctcgtccaccatttcttcctagaaaaaaaaaatgaaaagattataatggtcaatgtattcctgcttattgattaaatatatgaacacgaatagaagccaatttgtttgaatatatttcgtggggttcatttatgtttaaatattgataaggtgttacttattgattatcgaagaaattagttgtattgactacaaaaacacgtcaaaattttgtgggatactaccacaaaggcggtggcgcggtgctatcaaaagttcaacgaaaagacaatattatttgcattaaattattgagtttacacgtaatggtatttggtgtgcatttatgaaatagttttttttctgtttttttttttgtaaattttagtgatgagtctgtgccaagaatctaacatcaattgaccaaatattatggtggggttcggatctaaaccaaaggactgaataaaatctttaaaaattggtttcaatgtttgtcggaaaaagctcctttttcacttttaacgttatttggtggtgctttgaaagtgaataacctagtcttgtcttcatcattttacaacctctataagttaaatgaatgagctgtttatatattttccaaaatataatgtgaataaaatatagtattagcgtacttcctagaagatttataactgaaaatttggaattttacatgtagatagatttttgcaaaatcattgatatataggctcgtatgtttctgatagatcattgatggcttcagagctttgatacacaacgacacttagctaatttatacgtcaatggcgatcacagagaatatattgatcctccgagactttcaaattgttcatggcagatgttaaaccctattagtcctaaatagactgatcatgaacgaaatatgatatccagagattactcattgaattgaatgtgcattgtgttcagttattgtgaatgcattcaagaagattggagatttcttgatcaagttttgtgtatcaacgaatttgtagataaaaatatatcggtcataccatcggacaagaattaaaatatggtaacctaagaagtaagtcataacaaaacgaataggattataattataatatagaagacaccgagaaattgaaacttgaaagaactaggtaaactaaaattaaacttaatatagccttgaacacacttaaatcaacttcgtatcctctacaaagtctagaaaagtgtgaacgcaatcagcatactttttaaatcccttgatttggactcttgtataagtctttctctcgatattgtagaagaaaatgtagaaagggtgtagagagcccccggatggcgaaaacacaatctctcccgtacaagtaatttcaacaatccttttcccggagactacggatggcaatatgcatatacttttggaccatttatgtttttcagcatcttctagaacatggaacacaagtttttcgtttctagactgaacgtcatactgatgtacacctaatttacctttgcagttgaacaaacgcaaattgcacatgccatcaatgttaacaaagctgactttctcaatcttaaagtcaaaacaaactatcttagaagatccttgataataagcttcagaatacaaaacaccatttatgcatattgcatcataattaatagaataacgtggaattactgggtcgtggatcgtccgccataaacgttctccagtctccaatgtcaaaacctgatggatattgggtagtgttccacaaggtgaccatgtcacacacaacactttgaactttttgctgataggatcatagccaaaactgaatctcttagttcctatcgttttcagtttgggtaaggttatgaactctccagtgagagggttaacaatcaccaggggttgtctgcttagaaatgtcccaaggaaaaccaagccaccgagcgcggtgcagatttcagttggaatttttttgggaaaacacttataaggagtggcttcaactacaagagaagagttctcatctggaatttgaggttgaggtgaagagaaaaccaataactctgtattaactttgagggcgaaaaagagccttcgaagagctacagatttagtcaggtacagctccgtgaaatcaggaccacgaagtatggattcccataatttcgatacgcaataaaacctagctatagattttgggggaaatctcgataatatatcaataagaagatcaactgggattgagtctatgtagtttcttaccaagttcgacgatggtgtgatcaaacgatcctttgagaactgctgcttcagtttttccatggcggatgtttcaaaccctaagaatcactttacacgaaagaaatcgactttggcggcttctcatctttatttcaactgaatttatagtctaagtaataggcccaattactttatcaccaagcccacacgtatttgttagtaatgcgtaagatgtaattttcccaaagattacaattaagcaatttgacttttactaaagacaacaaggccttgcattgttgaaaaggatcagtggattgtaacaaaaactcgcaagataaagcctcaaatcaaagtaagaacaaacgtcgtttttctccaagttgaatataaaaccaccaaaacgtcgtttttgcttcattttataaatacctcatttaactatgatcctccgagtcctgttgcttcagtttcaggatctcttggagaagaaggcagagactatgtttggtttgattctgagcgttgacttccacgattttcagcttattttgcaacgccaaacgataggctctgttagtatacccatgatggacgaactgttttggacattgttcatatgatttcaaaaccttacaatagactgaagggtaataactctggtgaaaaatggatggcctgcagagcttttatcgatacgcaacgacacttagctttagactttaatggcaatcacgagtgtatattgatgatatgagttttggagttggaagatatgtggtatgttgcatcgagagatttttaggtgatcctcatagagttggagattgttaaaccttaaacagatacatgtataatatggcatgagattacttattcgttttgtgaaaaaaaaacctcgtggtttataattttaaaagagttttagtgacatgtacaatctcttgttattctatctaagattttttaaaattttgttaaagttttgcgttattcatttaagatttgtaaaaaataatctaaaattcttataaatttgggttactggatttataccttttttagtaggggaagggggaaaccccccaaatagaaaactaaaaacaacaacaaaaaaaagaaaataaactacatctgaaccgtacgtaaccgcaccgatccattagcatcctccagagctatcagagcaaccgacttcggcatcgaagcacaagcatgaaaacccaacggtagagaaaacgcataattggttaaagttttgaaatacggtagagaaaacgcataattggttaaagttttgaaatacggtagagaaaacgcatagttggattcataattcgcctttttcccaaaaaaaaaaaaagattcataattcgcctttctatacacatgtgaaatacggactcatacttttataaagtcagtaaaagttttgtgttattcaattaaaatttaaaacaaaaaagttttggattgttaatgaactaaattattatgttattagttcataactttctatatttttcttcacaaagtaaagtcattagaaaatcataataaatattatcaaaatatagagtttatttgagaaacttaacaagattatgaaaaactaattcacaaaattataaaaaaaaatctatgagtagtttagaatctttcatttatttactttcaataatttgattaagctcatcaaattctttgtgaattaggaaccagtaacaccctcttattgttacgaacaaaacattattgttgcgaacaaaacattggtaggtgggagcaatttttgaaagcaaattttagaagtttttttttttaatttctaggcctacacgactttagattttttgaatccggatgcatgtctagttcttgtattaactaaagacaaaaaaaatacagtaagcaacaatattgtagaattaagttagcctgtttttaattaagataaactccaaccaatcttaacaggaacaatatttttaatagttgaaatccaaaatataaagactcaagttataattaaagccttgaacgatcacttacataaacttcgtatcctcaacaaagtctagaaaagtgtgaaggagagtgaaattatgcttaaactcttcaaatcccttaacatgcactcttgtacaagtcttcgtctggatattgtagaagaaaatatagaaagggctgggcatatagcacgcgtaaggtgaaaacacaatctctcccgtacccgtcactccaacaatcctgctgttgtggactataggtggcaatatgcatatacttttggaccatttatggttttcagcatcttcaagaacccacaatacaagttcgccgtttcttgaatattgatgtgcacctaatttacctttgtagttgaacaaagtccatttataactcccacggaacatgccttcatcagctatgttaataaagctgaatttctcaaacctaaagtcgaagcaaactatcttagaagattgagattcttcaaaatcagctccgtagtacaaaacaccatttatgcatattctatcaaaactacgataatggggaagtattggatcttggatcgtcctccataaacgttttccagtctccaatgtcaaaacctggtgagtattgggtgttccataacgtgaccacgtcatacacaacactttgaactgtttggtgatcggatcaaagccaaaatagctttctccaacaccagtggctttcactttgggtaaggttatataatctccactgacagggttacaaatcacccgcgttttttttcttagccatttctgaaggaagaccaatccaccgagcgttgtacagattctggttggcaaatatttcggaaaacgcttatatggggtggctacaagagaagagttatcatatggattttgaggttgaggtgaagagaaaaacaataaatctttattaacttccaaggcaaacaagagccgtggacgagacatagacttagtcagggactgctctgtgacatcaggacgacgatgaatggattccgatacgcaacgaaacctagctatagactttgccgggactctagaaaacatttcaataagaagatatactaggattatgtctgactattctcttaccgagttcgaagattatgtcatcaatagatcttctgagaaatgctcctctagatttttcaaggcagatatgtttcaaaccctagaatcaccctttcagagcaaagtcgactttggttgtttatttcaattgactttattagttaaacgatcctaaatgggctctttaggcccaattactttatcatccatttttatccatttgcgtgtttcgttggtattgaataataccaaaacagattcggttcatatttaaaccaaaaccaataacccctccttaaaaggctttgattcatttgttcattcggttcagaaatttcaattcttcagttcatgagtgtatataataaagtcagggatgatttttgaatagaaatcaattttagataaaattaatagttagtacaacaattaagcaatatgccttttgctgaaacactcttcttttgtccaaatttacatgtcttatatatgtaaatcttttacaaaaccaaaatcgaagtaagaagaacaaaacgtcagtgtctttcttggacacaatcgaaacaagtttcacctgcaactagtggtcacagttgataaattgaacactgggaatgtgttggactttgtagtaatcttctccacctattaccagtctctcagtccactcccttttcattctttctatcttcagttcctttaagcatgttacgtatttgagcccatccggaagttgcttcaacttcttgcaattgtctatagtcagagtacgaagacatggcatcgacccttcttctactctccactctaccaactcttttttatacgacatttttagagcaagtagttgaggaaatccgcctttcgagcacaccattctccttcccaagaatgcaccggatgaaagataaaccgatttcaaatgaagcaacttctctagaatcggcattggatcttcctccatgcggcatccgattagccatatgtgggcaaggtgaggagggaatcggtattgatccggaaaccttggcagatgcattgacaatgttaaatcctttagatgaataaaatcaagaacgaggagctctcccccatgatttgccacgctgactttttggaaatcatgaaaactaagcgtctcgagatttctcaactcacgaagagataacaatagagtttcgaaagtacactcgccactgaaaatcacgttgagaaccgagagcttagtcatacggaggaggtccgtcacactaccgtgtttcgttgagaaattcgtcaacgactctaagttcactagatcacctaattccaacttggttttagcaggcattgaacgaggtaagcgaaggtacctcagttcttgcatctctttcaaaacatttggcacatgaactagtaaccgatcagcaacacctaagttcaaacagagcagaagctttagattccccagagaagaaggtagatgagatactccagcctcgtataagctcaagaatctcaagtgaatgagatctccaatgctggatggtaacttccctccttcaaactgtacgtaagaaagatctaacactctaagcaaaggcaaacattggaaacctcgaggcttccaaaacttttcctcgactccaaatatcaatacagatctggcttttttattatctttatgtcccagcatatgaagtgcattaccactatgtagaacaagtctgcgagatctacaaggagattgtgcattgatggtagtacttgtagttgtagggactttgacaactcgaataaagttctcttctttggctttagataaacatacttctctcatcatgtcatgcatttgacaatactctattctcgaagtcaaatagctttcttcaacaacaaccatatttctcctcactagctcttctagatagctttctccagtatcttgaatggttgatccatcatgaaacggcgttattattccttctgcaacccaataattgaacaatatcttcacatctatcttgtaatcttcaggaaaatgggccaagtaaaagaagcaatgctttaactgcataggcaaatcttcataactcagagacaatactcggtaaaccgagttggaattgtcgtcacttaaaccagattttcctactatatgagttacaatattgctatgtactcttttccactctagaactgtatgtttcttagctaacaaccctcccagcactttaacggctaacggtagtcctccacaatatgtgaccatctcctttcccatggcttcatcaaccttgaattctgctaaccaggacaaagtaatatgtttacgattaaagccctgaatagattataaatatctaaaagcgaaagagaaattaaacttcttggtattaaggattcattagagaaaatacaagattcttggtcttgatttatgtatgagagcgtaccagttttgtctctcctagagcttactatcctctcaaatagcttccaactttgttcgggagtaaggattcttggtctaaaggcaaaacatgttggatccgcatgtaaaccaagaccttcattgcgagaagtaagtaacattttccaacctgcaaaatacttctcgtttcatgatagtgaataaaatgcatctatcaccaatgtatgtcaaacttgctttcatctctctctttttataaacacgtactgtataagtaaagtgcttttatgtatgtacaattagagctcacctcttttatgtggaaacaccgcttttattcggtcccagtcttcttctttccatacatcatcaaggacaagcagatatctaccgctttccaacaactcaaagagttcaccttggagtgtatattcgtccatctgtataatgccctcatcatatggtctaagatcttgcaagatcctctgccaaacatcttttcgcgtaaactgttgcgaaacacagacccatgagaatccatcaaaatggcgtcggacaatgtcatgatgaaaaacttgtctcgcgagtgtcgttttaccaataccccccataccagaaacagaaaccacttgaacgctatcattctccaccaaatgatcaaccagttcttcaacactctgatccaaccccacaagatcactctcagagtttctagaaaatgtttgtcggatctccctttgtctttcttgaagagacagtgaacgtccaccaccatcagcaatatgttgtatccctaaactctgcattcccacaatcacctcagagatcctcttagttataccttcgatatcagaagcaaatttccgacgatctactaaaaagcaagcaagtgttctcacctgcttcttgatacctttttcttttcctctaagttcattcagaagaaacgattcaattatatcatcagcatcataaacaatgtccttgacatcttccaagaagtttctcaccctttctgtttcattcttcttagcatctgcatcctttaacaacgactgtaaccttcccagctgacgctttagtccatcaacttgctcatctataccattcaatcgcgcagattctcgactcagaagctcccagagcttctcaactccaaatgatacaactgcctcagccatactacaacaaactacaaaagacagatcaaagcaaaccaaacaggaagaaaaatatatatatgaaactaagacaataacaacactcagtttggaagaagagagatcaaatttttaaaaagtcaaagtcaaccttatccagctaccaattcattggctgagtgttgtccacagtaatctctttttttgattcttcattttgatcaaatcgaatatattctaaagggtacatgaagaatagagtttacaaaaaccaagacattggcaatgccgtaaaccaaaccggttcaaatagccattccatacaagagctaaatagcctgattcatacaacatctctagtttaatgtagtagaagagtttctatttcaccttccattgctcgaactccatggagtttaacaagaaggagcttgcgtttttatgaccaccacctccgaatcgctgtgaaaccggtgttgtgtcttcttctgcaacactcctcaaacttattttcagtttattctcatctccaagctcaggaactctgtaaacaacagctccaacacctcgtaaactcagattcttactcttctcagccaattgattccctaactcgcttctaagctctgtaatctcatcagcatttacagctaaacaccgtccaaactcctcatcacctccaagaacaatctcatatgactgttccaacacctcgtgaatcagtttatgtttcttggacaaactctgttttcctctgttgatcacactttcatgatccaatgagagtagctgatcaaacaaagattggttcttattgaagtcgtattcaatctttaagtccaatattccactgttgaaagctttgctctctggtaactcccacttccatatatccgcgtcttcaatatactcgaaaacacgtctcattctcttgaaatcattcatctctttgcaacttcctctactttcttcaaccaacttctgagtaaaatagtcaaacgcaatagtcgcaccacttctctctatatccaaaacactagtaacgttcttgcaagtcaaagagacatcacctaagctatcaatagcggttttatggtgatcgaggatcacgacattgtcgactttaggagagacttggtgaacgaaacctggaggtccagtgaaatcaaaaagatagagatgactgatgtcttgaagtggaagttggttgattgtgattggagagtagactgtgttggggaagaacagtgaagggattgactttgctgagaagtagagatgagcagctaaagctgcgaaaacaccgtcatggcaaggataatggtaaagcacagccatcttcttcactccaagattcattcctgaaacctaaaagatcaatactttttaatacacagaacgattagccgaagaggaggaaaatttatcagacaactaagaaacactctggactttatttagggttctgatgaagtgcaaatgacgaaaacacccttatatactcgttgaaaatcaggtagcatccgtcaaaaaaaaaaaaaaagaaagaatattagatagcgaaagaatgcaacttcatatgaaaaaatatcaatcaaaaagtagtaataatcatatgcaacttttctaataaaagagaaaaatatatatataacttgttatctatatcattatttttttcctaaataacaattaattttgattatttgttaaaatttcaaaggattgtctctttaatataacacaaaatgttgtattttttttttatcataatgctttgttgactatatttataattgtttaaaaatttgaaaattgagtctatactcattataactattcgtttactatattttaattatgatctcatattttcattacaatgttttttaataatagtataaatcttaataaatgcttatgagacttatgattttctattataaatttttgatttattgttaaattatcttaatctattgtgacttttcttttgatatttctttatttttatttttttcaaataaatttacgatgtaaaattgacagtaaggtagttgggtagtggttgtcaggttgtcaggttgatgaattaggagtgtctatggggaaaggatcatgtatcgtccttggaaattttaaataatggaaaactatttaattttagatttaaaaaaaatggaaaactatttaatatggtatatttttattctcactataacgttagtatgggtaaaattgtctataaaatactatattcttacgaaatgtgataaatatagaaagaacttttaattgtgttatatttgtaaaggttttgtcggtatcatcatgatatttatccaactagaagcaataataacgttgcaacttgtaaaaaaacgacaaaaggggatacttgtagaacgttgcccttttgatctctgtttttgattatcacgctcgcagcaaacactttgagtttgattatcactatgtccgtgaacgtgttaccttgggatcgttagttgtcaaacacattccggcaacagactgctgatatattcaccaaatcgttgccatatcaaactttttgtgatcaaaaatgtgacacgtcggatcaaacattggcgagccaaaaactgccgtttacttcaaaacaatggtcgtcaactgcagtaaacgtcggtaaaagatcgcatgtgctccgagttccactatcttaccactatcattaatataacacgttaacacgacacgaacagtactgttattgaaggttttttaatttattttttaaatgtttctctatcaaactttctaataaaaaatagatgataaaaagactgtcagaccgaaaatgggaaaataataattaacgacttttctgtaaccaaattaaaaattataatacatctatcaagcttagctgtatacatgtatatgaaagagggagaggaaggagaagaagaatatcacaactatccaaatatcgtcttagtagcagccatgaattcaaattcagtcggtgaatttcgtgagggagaaatcgatggaaacccatttctcatatacactttgttatctcaaaccgagaacccttcttcccgtgaagcagctgttgattccgatggagggactgtggacgacctctctgttgagcctctgatcctctgtcctactttacgtctcaaagttaaaaatttaaagccatacacgagtgattcagatcgtagctttttcccgttggttgtttcctctcacttccctaccatacaaagcggtcatcaacaacccgagtatatgcttcaatcctacagctgtaagctccctttactccctctcttttggtgcgacaataaaaaccctaatatttacgatttcatttgccgtgcgtgcacaaccatagagcaaggcacaagctattacgtttgtgtcacatgtggtgaccagtttcacaaagaatgtgttggtgctccactcgagttcaaacaccctttctatccatctctttctctccaactttatagtcctccctccggccgcgtattatgttcatgttgtcaaaaacctatctatggcatgaattattattgtcctaccagcaacttcactttgcatctgttttgtgctttcaagccaataccctttgttatagatcaccccaaaaggcatccccatcccctcaccttttttcccaaacaatctttcttaccttgccatgtttgtagcctcattaaaaaattcattccaacctatatttgtattcgatgcgccttcgtagtccatcaagattgtatctatttcccgtatgtcataaaaatatctcgccaccaccatcgtatctcttatacctcctctctttcatccggaaaatggtcttgtggagtttgtcgtcaagaggttgacaacgactatggtgcctactcttgcaacaagtgtgatgactattttgttcattcaagatgcgcgttgcggagagacatatgggatgggatagaactcgagggagtacctgaagaacttgagataattgttgagccatttataacaatatctgatggaataatactccatttttctcatggtcatcatctgaaactcgataccagtaaagcttacgatgaaaacaagctttgtcaagcgtgcacccttccgatctacgagggtggctattattcaggtgtggatgagtgtgacttcatcctccacgaagcatgtgcaaatgcaccttgcaagaaatatcatgcgttgaatccttatccactcacactaaaggttgtcactaatgaatatcatgacaacaaaggacgttttcgttgtgatgcttgtcagcgtgaaagttgtggttttgtctatgtggacgatttcagaggatgttatgctgatacaaaagattataaatttaaaatagatatacgatgtgcctcggtttctgaaccatttgattatctaggtcatgagcatcccttatacctagctttgaatccagaagaagaggagtcagcaatatgtcacatatgccaagaaagtaaagatgagtcgttttcttgtaaaaaactaaattgcattgaatgtgattttgtgatatgcttcaagtgtgctaccttaccatacaaggcaaggtatcaacatgacaaacatttcctcaagttttatgaagcgaaagaggcaaatgatcattcagagtggtgtgatgtatgcgaaagaagaatagcagatttgagaaagaaagggttctattcatgcgacgactgttgcaccactcttcatattgattgtttgcttggggaagacatgtatatgaagcctggtcacaccataatgtataatatgacgggttcccgcaaacattatcagaagaagcttcatattcatagcaacaatactttgtctcggccattttgcagtgagtgcggggagcgttgtcgacagaaaatagttttcgaatacaaagaaaaatatatattttgtgctgtatcttgccagaagcttgtaattgattactcataggccatagccagacgctttgtaatatctaatctctccaaatttcgttattaaaatgcaatgtcatctttttgtttcttatcctctaccatatatataattttgtttattttcttttgggccgtcgatgctatatatgttctctgttctcattttttgttctttaagaaaaccaccgttaattttattcttttcctcctctgtttcaaaatttggagaacttccatgctgcctttggttatgtttataagcgtatacagataatacaaatttgatcaaagagatgtttttcttcaattaaaaggtcttggactctataatgatgttcttgttaaagagtgaatttagttctgattcaaagaaaactgtagtagaagagagaaaaacaagtagacgactcattcaagagaccattgattctttcgttttggagatcaacatttttaatcaatttacaggaaatttgttaaagaaaacccatttggagttcaagataacagattagaaaaaaattcacacaaaaaaaaaggcttctctgaaaccaagcagaagctaattaattaaggacgacaaatcgaaaatgaatccaagtttccaatactttggttttagaagaaattttcgaatttatctctgtgtgtatatgatctgttactaatgatccgtttaagtctgtttgaatatgttatctcgtaaaaggtcttcattgagcccacaattacatttcttcttttatgggctgtattgataatacttcgagatcggacgggtctcgctaaattgcaatgaaactagtggctccggctatcactgcaaggagtgcttcttcgtggcgcatgaagaatgtgtcaactcactcaacaaaccatctcaagatctacgcacgtggttcactcgactatatatatgagcaatgccatatactgcttttagccctgttcactcgactatatacgcacgtggctcactcgactatatatactgctttttttagccttgttctactttttttttagtcctatactttatttttgttaaagggttttcattaatataaaaagggtgactttggccagtagccaaatcaactaataatgaactcatgtttgcctgcagataatccatcttgcccaccggaacaaagttctcagcaacattaacttgcccgacaagtgacatagcattgaggcattgctgataaaggaccctcttccttgatctttgcacactgtgactattataaacaaaacaaccagatatcttcagcaacagcattccttctatgccaagctactgacaactttaccgagaatctccaacttcccactcttacatagattggctttacattggttactatttttctgaaaccaaaatctcaaatccaaacacagatagcattctatccctaagtccaagattcggctgttgaaagttttgctctctggtactcaaacaccagcctcattaacttgtacaacacgtgacctagcattgtggcattgctgataaaggaccatcttcctttactgtgttcaacaacaaatcaatagaatccgatatcacgggttctttgcacattgtaggtatcataaccgaccacacatctgcatcaccagcaatccctctatgcaagctactaataactttactcagaatctccaactttccactctcacatagcttttgcagaaatccctctagcctatccctgcgaggcttataacctttgaaaagcatttcgtctaagataactgcagcttcttcgaattgtaaaccttcgcaaagcccatcgaaaactatcctatacgataaggtatcagggctgcaacctcttctgggcatatcttcaaacaagtaagtagcttcttcccattttttgattctaaaaaagacaccaagtatcatgttgtagcttataacatctggtttcaagcccttttcaaccatttcatccaagactcgattagctgattcggaatcattctcaacacagaacccgttaattagtacattgtaagtcactgtatcaggtttgcatcctttttcactcatttcttccaaaatcatcgatacctcattcgaccttccagcttttataagtgagctaatcaacgtagagtatatagctgcgtctactttaatctttccttcgtacgcctcatccttaagcttaaacgcaaaactcaattcaccaatttgacaaagcgctttaatcaacgacgcataaatgtgtaccgtgggacgcactccatacacttttaacatatcgtgcttcatcttcagtgcttccttcaccctcgaatccttgcacaacccgtgaatcaacgtcccaaaggtaacaccagtgggcttcacttttttcttgaccatttcatcgaatagcttcaaggcatcatcgaaacacccgctctgagaacatccatggatcagtatattgtaagtacaagcgtcaggcttaccaaactcatcaatactcgaaagacgttccttcattttctccaactcaccgcactttaaaagcgcactcaacagagagttcaaagatttcacagtgcgttggcaacggtattgaggcatttcgtcgaacatgtggagtgcacgactgggtaattttccacggccaaagaaattgatcacattgcaaaatataatctctgtaggaacgatacgagtatcggtcttgaggtggagaagtacctgatctagctcgtcaaacatcttggagccaccaagtttcgtgatgatgatatcgtagcaaagaagcgagtatctgaagggcctttttgggttcgttgattctggatcagggtttcggaaaagcttcatggcggcggaaggatcattctcacggcggaggagagaggcgagcctgaaggaagagacagatttcacggcggacatgagtttcgcttcgaaatgggtctaaagttgacttttcttcatttcagaattatatatactttctgacttttcttctaaaaacactgttgataaaaatatattatatctcctaccaaaacaaaatatattatattttattataaaaatatctttaatattcaaataccactttaagtataagaaaaaagttatatatgaggatttattcagtgttatcaaggttactgatcataccagttttgacgaagggtttgtaatggacgaatcgtctgctaattctagggtttccatgaatggaaatttgtactggacagcttataattccaaaactggtcagtatttcatccaaatggctcgatttttccaaagagacattaaagatgttctgtattctaccatgtaaggcgaagaaaagtactactcatactcgtatcctctctatttacaaaggagatcggttttcagtgatggaacaatgcaaaagaacaagggagattgagatttgggtgacaaagaataaaattggtaatggggatgatggaaacgatgttgtgtggattaagttcatgactgtctcaatacctaacttccccatggtactttgtcataattctacaagttacttcgtcgatgatagtatctctgggaagagcttcgttttatgtttttctaccaagaaacctaaacaagcttgggtctatattgtgaggggagatctgtgcaaaaagattaagatagatgaagttgtatgtacgttccaatcctgtgcctatgttcccagtttgatctccattccttgagagacttttgctgaagctagtgaacaaagaagaagaaattttacaagtttgattttcaattatggatttcttgttttatttatttattggagttcgtttttattcgttaccaatctttctcttcactttatataatggtttgttttctaagtctcaaccatctcttactctggtttatatcatcattttctttctctcaaactaaaacaacatctagagaaatggctccttccttttcatgaacatataaataggtaaacttctcttcgtttttcttttcttgtatattttattttcttactcttttttttttagtttccttcaaattttcaggtccaagttgcttcatgcccagttggttactgccatagtgagtggtcttgttttcaagaaaattacgagaagtagggatatgacatcaacgtgaacataccaactcttgtttctccatccccatgatcgaacctggagaggccaaatgtgtgcctagttatctttagaggcttgtttgtttttttatctagtcttgaaagctattgaaatcaccataccaatctcaaggtttgttttcaagagttgggttgatgaaatcagtttgttggttggaggtctttctttagtagctgttgtgtctatcacaagtaatcaattgcactcaaagtagttttgccagcttatggtatagttttgtctaggacagttaggcttgagcgagtttatgtttgattttatgtcaaatatttggagaggaagagagatcttaaagtattcgatcacttgtccatgacttaaaatctagtcaattagcttagagctgactagctctaattactgcacgtaaaagtgttattgatgcttgggatcgtgtcaaccaccatgcaagagagtgggatgcgaagatagtagctcaggtgccggaaactcatgatcaaagcggtggtgttactaacgtttatttgggctagttatattaattatcttattgttagatatgacagtttatagcattaataaacaatctaaaaatctatctttttctaaaacgtaaacaacagacgtggtaccattaccaatattgaattttatgaagtacaaatgttaaaatatataagttgtacaaatgttgggttgtgttttgtaatccttttattttttatttttttggtaggatgtgttttgtaatcttttagaacaagttgtaaacgtttgtttatttggtataaaatcttaacattataaccaaaaaaaaaaatctctaagttacaactacacaagcccaaaaggcaaaaagtgataaaaataaattactaaatcctaaacaagtaatttcatttcaataaaaataaggaatcttctaatatcacaaaatgagttatcataaaccaaatccataatcttaattcttaaagattgaacaaaattcagatttaacaaatgtcgaaatgttcgtctatcaacctcagttacacaagtcataagatttttctgtgttacttaaattgaatgtgctatgaaaaaataacatcatgtatccggtttagtcgtcgtttccggtttagatttctcactttttcgaccacttataaagtagagagacgtgtcccaaataaaaagatctgtcacttattcgtatatcacagctgtgtcactattacccaaaaatatcactcccttctagatttcgcacgttggtattaattattatatagatttttttttcccagaaacaaatctcatccctttctctctcttcccctcttctctctatttccagatcgaaacatctctcttcacaaaatgcctttgtcacggtccctcctttcgcggaggatctcgaactcttttaggtttcatcagggagagacaacgacggcaccggaatccgaatcgattcctccgccgtcgaatatggccggttcttcgtcatggtcggcgatgctccctgaattattaggcgagatcattcgtcgcgtggaggagactgaggaccgttggcctcaacgtcgtgatgtagttacttgcgcttgcgtttctaagaaatggagagaaatcactcacgatttcgctagatcctctcttaactctggcaaaattactttcccttcttgcctcaaattggtacgccttttgtattgattttaccatttcattgatttttgtttcgtcaaattaggtttcgtgttctctgatttaggaatcgatttaggtgaatctgtgagttttgttatctctttcacattatagagacactgttgaattacctaaatcaagcttcttataagaatattctgtcaagttgatggcgtttgatcatgtcatttgaaagctattcacagttgttttgttcgcttaatggtatttgttcttgctttagcttaatatgcctttatagatgctattgtggctttgcttttgttaagagcaattggaaaaaaaaatgggatgagaattgagatagtttagtgtattttgaaatgcagccaggtcctagagacttttctaatcagtgcttgataaagaggaacaagaagacatcaacgttttacttgtatcttgctctaacaccatgtaagttatttcaaaagtattacttttccttttgcttcattcttattgttgattcagtcaaaattagaaaagtatatatggcttgaaatgaaagttttagataggctttttaagtgtgaaaacgattgaattagtgacttcctaaggttgtctcagtcttttacctagtaatgccttgtctttgaaacaacttaccaaccaattgccattaataagtattgacttttttgttgaccttggttgatgatgaagaaaattctgagctgcagtctaatataggagttgacctgtgaagtagtttgctaggcattgttaatccttttatctatattcgggtatcttgacatcactgaatgatattttgagttatattttcattccaaactcaatgaaaatatcattatattaaatttaagagcaaactgctttggaacaagttaagtaaatttttcctttgctggcaaaaggatcattttcaggatttattaatttagtttgtattttctgttcaccagcattcactgataagggaaagtttcttctggcggcgcggaggtttaggaccggtgcttacactgagtacatcatatcacttgatgctgatgatttctctcaaggaagtaatgcctacgtcggaaaattaaggtattgatatgtgcattactgaatatcctaggcggctaggcggccatttaatctctaaagcaggattgctatctcagaagttttaaatttgttttaaggtttgtttttttttgcttagaagatgagtgtggcttgaaaactaagggttcatggtttttttttggaaacttcaacagatcagattttcttgggaccaactttacagtatacgatagccaaccaccacacaacggagcaaaaccttcaaatggcaaagccagtcgcagatttgcatcaaagcagataagccctcaagttccagcaggcaactttgaagtcggtcatgtttcttataaattcaaccttttgaaatcaagaggtccaagaagaatggtaagcacactccgatgcccatcaccatcaccttcatcatcatccgctggactctcgtctgaccaaaagccatgtgatgtaaccaagataatgaaaaaacccaacaaggatggttccagcttgacaatactaaagaacaaagctcctagatggcacgagcacttgcagtgctggtgtctgaacttccatggacgagttactgttgcttcggtcaagaactttcagctggttgcgaccgttgaccaaagtcaaccgagcggtaaaggcgatgaagaaacagttcttctacagtttggtaaagtgggagatgacactttcactatggattatagacagcctctctctgcatttcaggcttttgctatctgtctcacaagtttcggcactaaacttgcctgcgagtgaaacccaacaaaaggcaacagaaaagaaaaagtgaactggctttgcaaaaatgtaatgttttgatgtaatcatgtgtaagtgtaaacacaaaggtatgtggaaaggagaagcacataagtattattatgtaagaaacattatttaaaacccataatcataatgtatctcttaagtatacccatgtggttttcttttatttttgaatagaatttgggacttcacattccttcaaagtaggacttcaatggttttttggaaacatgacttatttgcaaaatatatacaaaaacaatgaatagcaagacttttttctttttgtcagcaatgaatagcaagacttaagtaacatatttttaatttttggcttatacacaagaaaaaagtcgcatatttttggtttggaacttgagccggttcgatgtctgacaagtcgatttgaaaaacttctttataattttttacttttcggttttatattcttttgtattttacaactggatcttgtttatatatatcaatatatgtgaaatgagcgtactagtactattattggtgtggaatactttcgcatgccctagtcttaactcttaaggataagtaagggcaggtttctctttgttttccaaatttatcgttcaatatttcttaaattaggatataatgtacaattaatcgttcatttcttttaattagaaccgtagtttgtacacatcactacatagccacactatagtaattaagtgaagcctcatcagaaaaggaaaacgatctatagatgaaaaagttaaatacccaagagaagtgattttcagttaaaagtatagtttttgctaaaaatatttataacggcattaatcacgatactcgcgtaagtagtatactctaccatatactatcttttagtgagtcggaaatatgtcataagccattacgcgaccatgcaatattgcttccgtaagcatccgcactagtaaagtgtccaaatggatgccgtcaaaacaacaaaagtgttttaaaaaagaaccgaaacaagttttcacacttggtccttagcttctcaaactcttcttcgtcctgataatggactttaattatcatgttatacgtcaaccaagttatcagctaaccatcatcactttattaagtatatgcagccttgtgctcataatattcattatattatactaaaagtctaatcatatgaagaaaggaaaaaaaaaaaaagaggcttgtttatgaaattaaggagtgcacgtaaggccatatttataattctatttcagaaaatgtaaattcaaacacggcaaatatgttagtttcatggtgcatgcatgatgcatttccaactgtttctttttttggggatgaaaatgtatttccaccggttaattaacgaagcttctatttcatgtttccgttttcttttactttttttttttgtttttacttcatatatatcatttgacaaagttaaggctttaaaatggcagtagtttcttaatttgtttttagattttggatttatggtgtttagttcttagtttttttttgcagtaaatttttagttttatataaatgtatgtacccaatacatatcactatatattttatagtccaaaagaattttatgtgatggtgaaaagaaaaaaatgtgtgatcattcgctgaaattaataaattttgcagtatattaaagaaaactagaaaagtgagtacctaatattccaacaattagactgtatcactcatgcctgtcgtctgtcgactgttgacttgtgttataataaagacatttcaaattatccgaatattccattagcacatatgaagatatccaatttttgaataattggagtcgaccaatgtaaaatattcataacgtgacatcacatcacatacatgtacgactttgtcacttaccaaaaatgatctagttatgataataacatcatcacatgagtaagaatgataaggcatgatctaatcagcatcatataccgctactttatttactatcacattttcgttcacaagagtaatattatatttgattttatatatgtctaaaaatttatcgtagactgccgattttagattttgggaggttagaagaactaataaaaccgaaagaaatagatgatggtcggttaaatacttaagtcctttataagaaagaaaaattaaaagtcaactttatcgctgaaagtgaaagttaggttgaaagttcagagatttattcatcaacttccgtgcattgacacatgctcttctctacattcgctcacgtgaattttagaacaacaaattattttacaaacactataatcttccggtaatttaaccacaataaagagataaataatctttatattaaatcgatcgaattctaattctgtaggtactgtgagtcaaacatgaaagtgtaaattttcaaaatatgattggtgttaacttaggtgaatcaatttttgatgtttttttgttgattatataaatcaaaattacggaagaatgcatgttgtttacataagtgatataattaattttttactgatatattaaaaataaaaatattttatgttattgttttggttatttttttgttccacaaaaattaattaatcataatatttctttcttgactatcactagattcaatgaaaatctctcttttatacataaataaaaatcttctcaatgcattaataaatatatataaattgaggaaaaaaagagatagaaatcatggaaaaaaaggttaaaaattccaactataagcgagcatcacatatagaaatagaataatgtataggaatccatcatgatctcactctctatatataggtaagccaagtatcttatttttggttatgtatctctgaaatctgaatctgactgacttcaaaggacacagcttttacttctataactggttagcttctccacacacacacacacttgttagatttacttttcctccgcactatcagcagatttttctcatctgggtctgtttgtttctgttgactcaaagtttccgactttcttattttctgtctccgatttcatcgccgaaatctcagtcaattttgtctttagatctttaatttttggatccctttaattattttgtttggtcttacttcagagcgaagcaggtgaaaaaatggcgaatcggaagttagagaagatggcatcgattgatgttcatcttcgtcaactggttcctggcaaagttagtgaagacgacaagcttgttgagtatgatgctttgcttctagatcggtttctcgatatcctccaggatttgcacggtgaagatctccgtgaaactgtacgttttctccattttggatttgacccttttgctataagatcctgaaactacatgctctgttttgagtattgactaaaggtttcaactttttttgattcgatcatggattagattagttagggttttgaaacgcaggaagatttaaactttatgttagttttgagattagtagtttcatgtgatctaattttgatgatcttattgtgtgtgttgttgtatataggttcaagagctttatgagcattctgcagaatacgaagggaagcatgaacctaagaagctagaggagctagggagtgtgctaacgagtttagatccaggagattccattgttatcgctaaagctttctctcatatgcttaacttagccaatttggctgaggaagtgcagattgcttatcgccgtaggatcaagaagctgaagaaaggtgattttgttgatgagagctctgctactactgaatctgatcttgaagaaactttcaagaagcttgttggagatctgaacaagtctcctgaagagatctttgatgctctcaagaatcagactgtggatttggttttgactgctcatcctactcagtctgtgagaagatcattgcttcagaaacatgggaggttagtctttgaggcttcaccgggcttgctttggatcgatgttttgatgttaaagttatctactttgtgcggtttttcaggataagagactgtctggctcaactatatgctaaggatattactcctgatgacaagcaagagctcgatgaggctcttcagagagaggtaaaatcttattggattcttcatatttacatgattttggaaactaatggaaaaaaaacttgggtttttgttagattcaagctgcattccgaacagatgaaatcaaaagaacaccacctactcctcaagatgagatgagagcgggaatgagttatttccatgaaactatctggaaaggtgttcctaagtttctgcgccgtgttgacacggctttgaaaaacatagggatcgaagaacgtgttccatataatgctccattgattcagttctcttcttggatgggtggtgatcgtgacggtacatttctacaagtccttctcgcatagctctcttattgcgctccctctcttaatggttttactcatgtcacaaactcacaatatatgtgtatttgcaggtaacccaagggttacacctgaagtcaccagagatgtttgcttgttagctagaatgatggctgctactatgtactttaaccaaatcgaagatcttatgtttgaggtttgatctcgagttctttttttgagtttagtctccttactttcttttatttatgtatcacctcatttcatgattactgcttctttcatagatgtctatgtggcgttgcaatgacgagctgcgtgcgcgagctgatgaagttcatgcaaattcgaggaaagatgctgcaaaacattacataggtaagaaaaataaccgattttgagcattttgtttatgtttaagctatgtgtctggaaccgatttaatttggaacctatcattcattgtcttgattgcagaattctggaagtcaattcctacaactgagccataccgtgtgattcttggcgatgtaagggacaagctttatcacacacgtgaacgcgctcatcaactgctcagcaatggacactctgatgtccctgtagaggctactttcattaacttggaacaggtatcattgcaattagaatcttttaactcccggttatgatttggtactaaaccactctctcatgctatttgtgtagttcttggaacctcttgagctctgttaccgatctctgtgttcatgtggtgatcgtccaatagcagatggaagccttcttgatttcttgaggcaagtctcaacctttgggctctctcttgtgagacttgacataaggcaagaatctgaccgccacactgatgtattggatgctatcaccacgcatttagatatcggatcctacagagagtggtctgaagaacgccgccaagaatggcttttatctgagctaagtggcaaacgtccgcttttcggttctgatcttcctaaaaccgaagaaatagctgatgttctggacacgtttcatgtcatagccgagctaccagcagatagctttggtgcttacattatctctatggcaactgcaccttctgatgtattagctgttgagcttttacagcgtgaatgccgagtgaaacagcctttgagagttgttccgctctttgagaagctagcagatctggaagcagctcctgctgcagttgctaggctcttttctgttgattggtacaaaaaccgaattaacggtaagcaagaggttatgattggttattcggattcaggaaaagatgctggacggttatctgctgcttggcagttatacaaagctcaagaagagcttgtgaaggttgctaaagagtacggtgtgaagctaacaatgtttcacggtcgtggtggcacggtcggaagaggaggtggaccaacccatcttgctatattgtctcagcctccggatactattaacggttccctccgtgtcacagttcaaggtgaagtcatcgagcaatcgtttggtgaagagcacttatgctttagaacacttcagcgtttcacagctgctacactcgagcacggtatgcgtcctccaatttcgcctaaaccagaatggcgcgctttgctggatgaaatggcggttgttgcaaccgaggagtatcgctcagttgtgttccaagaacctcggtttgtcgagtacttccgcctcgtaagtattattacattcactcggaatctttaactcaccccacagagtcttaaaactcacagaatcttaaaatctgttgcaggctacaccggaactggagtatggacgtatgaatatcggaagcagaccttcgaagcgtaaaccaagcggtggcattgaatctctccgtgcaattccatggatcttcgcttggactcaaacaagattccatcttcctgtatggcttggattcggatcagcaattagacatgtgatcgaaaaagacgtcaggaacctccatatgctccaagatatgtaccaacactggcctttctttagagtcaccattgatctaatcgaaatggtgttcgctaaaggagatcctggtattgctgctttgtacgataagcttcttgtttcagaggaactctggccttttggtgagaaactcagagctaacttcgaagaaaccaagaaactcatcctccaggtaaaaacagagccttcttgacttctttcttcttattattattgtaaggttttgtctgaatggctttgctgtttgcagaccgctggacacaaagatcttcttgaaggtgatccttacttgaaacagagactgagacttcgtgattcttacattacaactctcaatgtctgtcaagcttacacattgaagagaatccgtgatccgagttaccatgtgactctgcgaccacacatttctaaggagatagcggaatcgagcaaaccagcaaaagaactcatcgagcttaacccgactagcgaatacgcgccaggacttgaagatacactcatcttgacgatgaagggtattgctgctggtctacaaaacaccggttaagctacaaagagatggttaaacaaactttgaatctctctttctctctcaagtctctcctttttttaactacagatttggaaaataaggttggattctggtttattttatgtatccaccgtcaaaatgttgattttcgtgtacgagtacttcgagatcattgaacacatgctctgtttttttctcaagtttaataaaacagaacaagagaatcttttcttgtttattttcttatctacaccactagaccaagaacggcactgacttagttgcttaaaacacttcggtctggtttggttcggctttttgttcatcattgtgtaaacaaacatgtagtttgagtatgtttgtggtcccgaaaaacggcagacatgtttgcggaaagaggccgttaaaaagcaaaaatggttcgaagaaaacgacacggtgtttgagtctcgtatatagacacggtgtgcattttctagttcgagtaacgtcccaacggctctgtattaattgtgagaatttatagcgtacatgtacggtgtaccggtttttcaccaacgtactttatgctttaatttaatttcactgaggtcaaaaagttcacactagtcttagtcggtgagtgttaatcacgcgcctccactaatgatgcaaaaaaacagaaattttattattattagtaaattggcttttctgtgatataataataataataaactcaaatttagctaaaagttgaagacgaccaaacatatgttatccatcaaaatatagtttaaaataaaaagagaaaaatacgtgtcaaactaccacgaattaagggcaccgactttggccggcggtagaatagcaccggctaacgaccataataaagttcataaccttccaaacctttattttattttatactatagtgtagtaattattattaatttttgggcgttatgttattattgttttcccttttaaaagtattacaaaataataattaaacaaaggaaaagaatttataatgcgcatattttggattctcttttcttttttgtttaacccttaaagagaggcaattaacacaaaagaacaaagcgttattaacaaccgtcgctttcattacaaaccaaatcaatctctaattaaacccgtatctccctttttttatatgtcaacgactaaagtattaacacccaattttcaaatcattcacacaagtctcttttcttaggctgacatgtaatttttaataatagatttgccatttatacgtatttttttttaataggtaaatatttcaggattcatctattaccaaagtatttttagatgcaagtatcaagtatgtatgaatttggagctgaatgtatgaaataaaaacactaaaacttagcagaaaatgaatataagatatgtaactttttattgatgaaaatgttgagaaaaaaaagagtagaattgaaatgacaagatggttcactatcttcttggtttcactaagccctaaaagtaaaaattgaaaatgaagaagaatccaaatcttcctctttgcccttttagtagccccttcttcttcactcacatcccaacttctcttatgtacacacagagtaatctccaaccagtaacatctctcagtacctaacaacaagtgaagctaaaggaagaaggagccaatgcaatctcaatctgtagggaaaaatgaatggagggaagaagacaatagaacagaaaatacagagacagagatcacagggcaatgaagaggtgaatgaatgaacaaatcataaagacctgattgatactctacactaatgggttcccttgtaatgaagcatcttatgaagtaaaagtgggattattaagcttaagggtatggggaggttgcagaagagtgaagaagaagttattaaccgctatagtgtctcaccgagtactccaacacttctttgcttggacagacaatctccttaacccgactaccgttcttgtatatcttcactgtcggtacaaccctcacattctctgcattacctattgaaggacatttatcgatatccacctgaccagaaaggtagaatttagagtcaatctcttcccagagttatatgagtcactacaatgagaaaagttttcatgtaacttttaccttgaggaagtgtatagatgggtaacgagtacatagcgagtccacgaatggagatatttgcttgcattgatgatcagaggctgtcgagaaatggataaccgaaactcctgtgtttgattgaagtatcacatcccaaattccataaattagatccagagttccaatcaagaaaaggttttaatgtgagaagcagagaagctatgttttacctggtaaattcatggcagatttaaactgttcaagactataaatttcctctacttcgccaccaaattccatatttaaaacttcttctccacgagatttcttcaatgcaacttgagcatggaataaagattcagcaacttccttgtcatgaggaagttctcttatcaaggcctcataatcactcactgcagctccccatctttccatctacacttggacaaaaacctcgagaatcagagtagaacaaattagaagcaaaactaagtcaaaaacgcggttttacatgtattatttaccttgctatttgaggcagccctccgaagaagtggctttgtgtaacttggttgataacgcagcgcttggttacaatcttcaatcgagcgttcccacattccaagtttaaaccaacaagctgctcgattacaatatagaatagcgttgcaaggatcaagcctaaggccttcagcataagctgaacttgcttcagtgtatctttctgatttataaagatcattgccacgagcacgagccctagcaaccaatgtaacagtattatgtaacatagcaacttcgttgcatcttggatcgatttggctagctttctcagcagccataactgcattttcaaacctgcaaggattcatcatctactctttaaccccttttttaactgatggcattcaatagtttacttaacacaagcatttgaaaatgactctcttatctcaccttcctaaagccatctcgatttgagctttgacaaaatatatataagcttcacaagccataccagaaaaccgagtctgcgaacaagatacagggaacggctctactttaggaacttctaatagctttgactgtgcatcatcaagccggtgaagtttcaagaatgcttctactttacacataaatagctgtagatacatataagacacagcagttaaaagatattaaagttcacaaggaaacatctaatcccacataatttgattcttacctgtggagaaaaatcagctccagaaacaatagcagcatctgcttctatcaaaactgttttccaatcagtgactcttcgcgcatcaacacatttaatcaaatgtttctccactgcttcaagcttctgcaactccatgggatctgatggtctcccaagaaaacaaagatgcttccttgcactattaacctgacctaatctgcaatccaaccaagtaattaaagaccagacacacattgaagtctaagaaacacatcaccaacaatgtatcaagaaacgaatgctttacctaataagcaataaggccaaacggtgatgagctcttccatagttaggatccgatctaacagcatcttcacattccttaacagcttcaccaattcgagacaaaccaatcaatgcggcagctcgattactccggtaagcagcgttagtcggagataaagctattgctctatcatacaacttcaaagcctcattaaacaaacctttcctatacatttcattccctactctcttcacttcctctgaatccgaacctaaaatcgcttttttccatataggagtctctcccgtagcaacagtactactacttctactagagctaccgacatttaccggcgagttggatcctcctccggtgttggtaggtttggccggagatataccacctcctcgcattatacttccatgtccataagttccagtaccagatccaagaacatcgcttcttgaacggctttgagtcattccagtgatttggatcttcccagaaggacaaatgtttccggtgggaagtacattcgccggagacgtcggagctggagaagtagcagaggaggaggaggaggagagaagtggttgtgaatgagaagaagaagaagttgtagcagagtccgatctcggtcttagattattattcccactagacgaattagattgactacgaacagaattagatcttccgataaccggagcatgtttaatccgacccgttacagatccggaagagctagaactactgctactagtggttgtagtagtagtggtggtggtgagtccacgtggctgagaacgaagcggagaaaccggtgaaccaagatctagctcacggaaatcaggtttgttgatctcggaggttagtgatgaatcacggagatgatcggagagtttgtcagattcagagatgggtttaactgacttgggcattttgagtgttgtggtgagtgaaaggaatgaaatttgagagaatcgaagaaaaccctaaaatggagttccggtgagagaaatggttgtttgttaatggagacgacggagaagaatggagaaggagaagatgaatggaggaggaggaggattagatactctgtgaaaaggcatcgaaagagagattggggatctcgtgaattaaaaggttgaagcaaagaatgaatgtgagtgcctagagagagaaaacttgttttttctcagtgaagagaagagagagaggagagaaggttcacagaagaagaggagtgaagatggagaaccagacccaatatttaacattttttaattattattataaattaaaaaagttatttaatattgacaaagaaaaagaaaggttataattaattattctataattaaaaaatagaaatcgaaagcagagtttaataataataaatttctagcaaagtgaaagaaaataaataacagaattgactttaacaaacttttaaaattatgttcaaaatctacaacacagttccaaattaacaaaacttttttttcttcttggattaaattttttcttaagctacttttttggtaataaacttaaaaaaatggataagaaaatttcggaaatggtaatatattaaatgttatgcaaaaaaataacagttcttgttcaactgctgcttcacgagacatgtttttgattcttgcttttttttttctctccataatttcgctttatcgttgaatcaaagaaataaaaagatgttgacaaaaaattcaacaaaaaaaaaaggtttaagaaaataattgttaatttgtaatttgtaaataactatacttaaaaaaatctgcttacttcgctttcggtactgttcgatttttttctttgtactttggagcttacaacatcctaatagccccactcgcgatttatgggaagtgacgtctacgctcctataacatctatacaaaattgtgttatgtccgaaacaaaaataaaaaaataagagcaactaaaataaaatgtggtaatacactacaaacatttgatattttttatgtttatgtttattattaaaccttttttaatagtatcttgttaagcgaaaaaatgcaaataatttaaccattacattatttcttgtagttataaatgcattttacggaggagtagtatacgtatattcaacgaacttaattatttattaatcgaataaacaaattcattgtatcaacactgcatctaactatagtacgtaaaatcgcctgatgagttttaacatttacctgtacgggtttaataagggaattaactagtaaataaacaaactacatgtacaaataagaatttttgtaccgtgtacgaaacgaaatttgttctagagatacatataccaactctaagtttattaacgtttcaagatcaatatatctaattcgtaaacaaaactttagctactgagaatcacataatgtattaatggatgatacaatagaaaatatgtaaacgaagctagtaagatagatttgggtatgatagggaaaatcagtaatcacatcaagatgtaataagtgacctcgtaatttgcactcatctcttattggcttctttcgcacgagatttttttcttcttctggcttcatcgttcttttttattcttttttttttacagacactttcgtatacccaaatttacgcttacacatttacttacatacgtatacatttatcccaaatttatacatacagtagtacactatgaatcccaatattatggttccgattaataacaaatgttataatcgaaattttaacttaaatttagatttaaagtatcaaattctacggttaattgttgttgttagttattatttttcaaaagtcttgactatccaatttccaaataaatataactatacaaattttctaacatttcttaataaaaaaaatttcagtcctaataaaaaataaatagaagcggtttaggccgacgcactctaaactaatcgattaaagaaaatagctaatacttaattcaaaagcctcatttttattttaatacatgagtactcactaccaaaatcatatcacgattcgtcgaaacttttaatcactagaatcagacccatcttcaattcgatgaagagagtcacacgacgatggatatgctaagacccgcaaaccgcgtacacaactccgctttccttcttccactcaaagtaccatcaaccaaatcacatgacaacttccaatatggagccaagtctcaaaaactaaggagccatgcacccctaagttttctaacatgcataataataataataaaaacttttatatgcaaaaataatcagaaaatagtagcacttggcgacaaagatttatgcattcttttggcctttgcaatttatttctcttaaagagtcttgtaatatttcaacactaagatacacgttccgatattaatatgggattccattcttaaaatccggccatattatcaaattaaagattcgtttgttaatttaaagtagagtgagtgtgtgaatttgttatttaacaaaagcaaaatgtttgagtcggttatacgtatgctaaagtgtagatttattgataatggagcggttatataactcggagagtcggagtagtagtgggtttggtataccgacacttgcattgcacaagtattattgtgtattctttttgcttttttggtatccataaaacaatgttttatcaagcatagaatattttgtgacctaaaaagaaatatatgattgtattatttcacttgactttgtgttatggagcatagaatataccgaaatcttgcgttatacttcatatccttcgaaccacatgttttgatatgcgtatagtttgcaaatatgccattatgcataaaacagatggtggtttcttttggagcaagttaggtgattaaagaaaatagctaatacttaattcaaaagcctcatttttattttaatacatatattttcaatttcgtcgacacttgggataaacatgaatattgatgtcataaatttccttttaaaatttatctattggcgtgtaaaactaaaatttcttaaagtgtagttatgaatattcaactcgacaattaagatgttgtgtagttgtcttaaacataattacccattaatctgtcgtcaaatatgaattgattgatgttgattattgtgtataactactttatagggatgggaaaaggcatattcataagcttttatggattgtatattgagtaagtgttctatgaatcttgaaatccaacttagaaaaattcctttaaatgcaagtcttctataaatcttgaattggctattgtctatagctattatggtaatgaatgtgacaaaaagaaaatggcggtataatgtggttatgtatgtcaccaaatttatttgttagtaatttttactttatctattaattttttgatgtttgtttttataccgcttattaagagtgtcagacgggcgagttcgcgctcaaacaggcgctccgtgacggacctcgcttctcttcattccgcgacggtctggtccgccaaagactgcggacgacaaaacgaaacccatatccgctctgtaatgctcattgatctaacggaccggccggcatatctaacggaatagaccctcagactggaagtccgattgacatctctaccacttattaattatgtttgttttaatagtatattttgcattcgctacatacattgttttttgtttggtctatttaattcacttgatttgcaattttgaaaaccataggagttttttaagataaaagggttcattttataaacatcttgttggcttttacttgaatgtcaaatttcatcgtaaatgatttatagtttatcatttaaataaatatagtttgaccgaccgtttggtggtttgatcaaatctttcccacaaaaatatatttttcatgctaagaatttaaagtcgacataattttttgtatgttgcctcaagtagaaaactcgaatgtaagactagaaaactagggaaataaaccgagtaaatgttttgaggcgaatgaacataatagtaaaaattaatggtaaaagcaaaggtagatttggtcaaagatgacgctagtccatgaaaagtgacgtcagtgactcagagtaaccatcatcactggtttctctgttagatgtgattacgctgcaacactggcatgtcattgtgccaatgtgccattgtcccagaatccaatttaaagcatggtgcgtgaaaaaattaggttttacacgtttacgtttgtgactaatcatttatttatacaaacacaaattgtattaacccataaataaactgatccgtactaaatataaaacttgacaaaggaaaatacacttgtaaatatgtgaaatactaggtcgattgctttcggatcggtttcatttagatttggtttctcggttataggtttagacttcattcatgtactttaataattgtcttacctaaatatatctaaaataattcaaattataaaaaatactcaaagtatcaaaaaaatatatatataacttttatttttcttgataaaaaatttctattttcaaaacgatcggatatctaattcggttcttgatttgattcgagttcggtattgaatcattcagatatactagtaatttgggttccgtttgtatatttatgttggttttgatttggtttggacgtttggtatttagaatttgctaaattgaaaaattgaaaaccagataaatgtgtgggtgtatatatagattaaaaaatagaaatctaaaactaaatcagacactcctaccttatttattattattttttttcttcttcacactcctaccttatagtatgtggatatgtatcatttactgatttacacatattcactcaataatggatgctaaaagaaaatgttgaaaacaaaaaaggaaaatgcaagttccaaaggagtgaaactgatacatcgtccaaaagaggaatctagagataagcagaaacgaagaaattcagaaagcccaaatggtttcagtcactcttattagaatgttttctatctttttccctctcaaatcttgatctgtacggacaccttttttttttttgtaattcctatattatattcaagatatcaaaaataatacagaatttcaaaatttggaaaaagtgaattcgttcagaacttaagatttttaggagactaatcataatgaatgctctttagattcagcacatgatagtacaacagaggtcgagccaccccacgtggaacataatgacaaaatccttcctatttcattttgtttttgcttttctcctttttaacttattacattacaagaaaatgtgtactatacagtagtattttcttacattatttcagaacccaagtacattatattaaatttacttaacgattctaatttctgatatcacgtaaatatgcagtttcaaaacatttagactttctttgtttttgctgttgccgccatcggaaagaaaagcagtcatgatttgggcctcacatgcccattttggaatggttcagaatccaacccatctccaactctctactattcacgaatttttttcatgacattaataacaacatcgactaaacgttggttaacacttgacaccggttgattgtaatttttcttatcctcatcgttgtaaaccatactgcaaggtatagagtttatggtggctcttactatatactctttactttcttcctcgatgaagactaataataatcagaatttcactctttgaagactaaaagcaaatggcacaaaacaatctcatttcggagttgctaaaagaaacaaatctacaagtgaattagagcttccacaaccacgaagaggttaataaaaattaattagcatttctatatttattagctgtaaaaatttaatctgtctacgtttacaaaaaaatgatttgtgtgcctacttatgtaatgtacctatactttatcactttggcatttttgaagtataatttttttgggctaattatattttcttttcacatgtgggctttttttagtatgcaaattgttttgaaagagttaaaaagtctaggctcgtcacacccatatccaattatgtgggccgggcctgagaacggaactcaaataaaatttgatacgcgaggtcgtacgtttcgaacatttagccttatgtaattaattaattttcttgctgggaggggttttaatccatgtgcttatcttttgagtttgtttgttcgttggcctgtcttttgctgttcagctccctcgtttaagtgaactctaaacttgaatctatgtgaaataatctcgttgcaggttcgctcgaagaaatgaatctgcaagtgatagagcttcgaccactgagaagaggtttataaagacatttgataagagaaataatatcattcatcatctgatggcaaagttgggcttttcgagcagctttcttgcttgtgaagttccaacatccttttctctgggttacaaagacctgcaccagttacaacttatgatcaaatggttgtatagttttattatgatcaagtgttaatcatattactggttcactgaacctgtaagaaataaatacacagaacctgagcatttagggatgtcccaaacagcaacagaagaaggtgagcattctggttcgcaaaggatgtgatggttctcgtggttgacattcattgccagcatccacgcacctattgttacgtcctcgttgttaaacatcctgaaactgcagttacagacaaaatcttttatttctttactaagcaaaacagacactatgatcttttgtcaagttatacaacagagcatgcctgttattcttgagggcaaccaaactggctaccacatcagcagagagagcataaatcgggccataagcatgaagaaagtactcttttcccagcagatgagacaatggttcatacctgcaaaattccatttttgatcccattcccaatagttttcaagcatacattagttctcagttttgtacttgccttcttcatgttaagatctgcgtttcaactttttcatacttaccatttgagcttaggatctgtgaaaaccggaccctttttcaagcatcctaggtacgtctgagagtgactccgctctttcgccaatagcagagagagtcgatctgtggaaaacatgaataaaacaacatagcaccatttaaaggtccagattcttttttcccctgaagacagaggataaaaactataagagctaatcacctggcctcaagtatatatcatcatcagctttgacatagaactcagaatcataaagcgcgtacgcagctttgaagaaagccaaactatacaacaaagaagaacaacgactaccacggattagagccttgtaattcatattgtgttgttagataagatctgaaccaaatcactctcactaacgttttgtaaggaagcttactgtactcctcttcgatatctagcagtacgaagtcatcatactctgcgatttctcttctgagctgagccattttctcctcacttttcgtttttcctatcataaacctgatggctaaccccgtagattcttccaaactgcaaacagcagtgagcagtgttactcagtgacaaagtaaacacaagcagatccatctctatcgtcaaagcatccaagaatcaattttcttgaatctggtgagactttggaaactaaagttcactaagaagcacctaattagattcatttcaacctaagaatcaagatcaatacaaaatcaaacctcattgccttcacttcaatctattaagtaagatccacataaaactctcagatttgctaattcaaatccagatcaaacaaattctaagtgatgcaatgattccacagatatcctgaagctaattcaaacagatgctcacaagaacaatggcaagagaatgtaattgaatcagttaccgtcgaagaccttctggatctgacggcatccatgtctttctaagtgatcgtctccggccagcagatccaaatccggtttgaataccaacgaatcccataaccttatgcctcttcttttcgccactaacaacgccattactatttccggcgacgtcccaaacgactcgcaccgtcttcggaggagtgttcgtcaagcaattacgaccggttaatcggagacccggtataagaattacggcgagtccaaatgtgaaaccggcgattccaatagctagggaagttaatacgacaagagccgttgatcggcgcgtggcgagtgatgaccgcgcgtgaaatagcttacgaggagaatgcattgtgtggtgtcaaggaagctcgaccttcgttaatggcgtcacgggtttgttttttttccctccgatccggtggatccaattattcggatccggtcacatatttatactaacttgagttaattatgatatttacgtgtttttgttggaggatagagaattagagttaggttcttaattatttttttgaacttttagttgtaattgtaaagaaattaggcaacgttaaattgactaaatataccgccaattaaaatgaattctcaatttctcatcaatgctatataaagttgtttggattcaaacgtagattagttaattaaattaaacagtaggtgttgtctaccagctatcgcattaataaaattcaaaatatcgaaatttggtaacattaaatattaaaaaaacttttatgtgtgtttggcaattaattttatgaaaattagaagatttgtaattaaatgtatttggccaaaaggattgtagaattaaaaagagaaaaaaaaaatgagaataattgtggacttaccacataagcgcaaaatgattttttttagattgaaaatatttattatttttttttaatttaagttataaaatgtgataattgtgttgaataagacacaaattaatcctctatttctatttttttaaaaatcattaataaaataggatcatttggaaaaataataaataaatttttaataaaataggatcataagattttaatatggatttgttagcttttcccaaatcttttgttactctattggaagccttgtttttatcttcttcttttttttggccaaggttgcttttgtgtaggcttttttttgctctttgtaaaacccctctttcctttatatgatttttacatgtttagcaaaaaaaaaaaaaaaaaattacttgtgcatgattctcacctagcatactaactttttaatgaacatatatataatttaaaaatctaataaataaaactatttataaaatttcataagatttagaaactagttttaaaattagacatttcattattaaagtaggattatttggaaatataataaataaaacgataataaagtaggattatttggaaatataataaataaaactacttataaaagtaaacacttcattaataaaattaaataacataagatttaccagtgcatgattcttacctatatatatatatatatatatacaaagtttgtagtgaacatatatataattatttatacaagaaaaaatgagtatgaaaaaatgtgttgtattgatggtggtggtgttggtagttatggtggctatggtagatgacgttgaagggcggctttcatatgctacatgcatggatctttgcgagaccaagtgtaactttttttttacacatccagaaaaatactgtaaagataaatgtaaccgcaaatgtcgtagacttcaatcatctcagtaataatctcttcatttattttattgaatttctttttttttctttttatgttgtgtgtataaaatttttgacataaattatatgaaaaaattgcagggtggagactataggaatgagaaacataaatggataaataagttgacaaaatagttgatatatttgtaaacttgatgaagctttcatattaataacaatttttttttagaaatttaactctttttttgcaactatatatgtgacgtttcaaaattaaaatacatatcaattcttcatccattagtaaaaccgtaatataactctcatgtatattataaaagattgcagaatgacatagttttctatagttacattttaatctaagaaattgtaaaataagaggttcgaaccctgttttagttttaaaactaatggtataatgatgtaactaagtacatattttagctataaaacttataagtacttcccgattaatagtatcagattttgcattaggtgagttatcattttaagccaagacatctgtaatgaaatgttcttgaaaatccgacaacttgtatgtctctttcattatctttaaatcataaaaagttgcttcaatgttaagagttaagacacaaaagcaatcgtgttatatcattgtctcttgattccacacaaagccaactctcatatttattatcttcatctcctttcaaaattaaaaagaaaatatcaaaagaagatagaggagtacaaaccaattttttagggttaaattttgtattataaattatcggactcaaaatgttcatcaatacaaagcaatatatcatcaatgcaaatctttactttgcatcattttcaacatgcaaatctcatcttcacttgaaaaccttcctttggttcttctccttcatgtctttgtatgcaatatgggacattatacacatattttttcatcgattgagtaatctattttaaaaatatttgaatcacattatatgcataaaaaatctaatattttattaactataagtattttatagaaatttaaaataaattaaataaataaagtcaaataaaagtgaaagaagaatcatatatttatgtttaaattagatagataggttttaaaaaattagcaattaataaaaaaggcaatgtttgtggagtgctaaatcttttattttgatattttttgatatttttatattttaataaaaaaggcaatgtttgtggagtgccattgtaaataagttgaaaggctaaagttttttttatctcaaatatctccaaaattaattatatcattttaaaatatattaaataaactatttataaaaaattataagatttagaaattagttctaaaattaaacatttcattaataaagtgggattatttggaaatataataaataaaactataataaagtaggatcatgtggaaatataataaataaaacgtaaacatattattaatgacattaaataacataagatttaccagtgcatgattcttacctatatatatatatatatacaaagtttgtagtgaacatatatataattatttatacaagaaaaaatgagtcttaaaaaatgtgttgtattgatggtggtggtgttggtagttatggttgctatggtagaagaagtagaagggctttcatatgctacatgcatggacctttgcgagaccaagtgtaactttttttttacacatccagaaaaatactgtaaagataaatgtgaccgcaaatgtcgtagacttcagtcagctcaatcatcccagtaataatctcttcacttgttttatttagtttgattaaaaaaatattttgtataaagaaattgacatgatttatataaaaaaattgcaggatggagactatagaaatgagaaacataaatgggtagataagttgacaaaatagtcgagatatttgtaagattgatgaagttttcatatcaataaaaatattttttaaattataaaacttttttttataccaattataaaagaagcaaagattaaaagaagatagaagagtgaaaaccaacatttttggtttacttttgtagtattataaattatcggactcaaaatgttcatcaatacaaagcaacatctcatcaatgcaaatctgcactttgcataattttcaacatgcaaatctcatctactccactcggaaaccttccttaattgggttcacaacttcataagttcacatcatagatctgtgttattgggctgttttatggcttgtaaaagttggactagacccactaatcattatagcctggactaggcatgtattttcttttctttctcctacaatattatctctcatcaatacatcaaaaccacaacaagtttatgaacaaaactctgaaccgggaagttgttttctgataaaccaaactacacgccgtcttgagttgattgatgacgtgttaaaagattaatggctgattgtcattttccatccaatcacattaaaacacgtcaggataaagcccgtttcatcactgcttctctttcatcaaaagttctttaaggaaaaaaaaaaacgtcaatggcgtcgtcgtcgttgtgtcatcgctattttaacaaaatcactgtcactcccttttttaacactaaaaaactccatcactattctccgagacgaatctctcttcgtgtaaatcgacgatccttctctatctctgcaactatgtcttcatctactaagaaggtacatcgttctcatcgatttcgttcttatccctatcgatcctgtaaatttctcttgataaatctgagttttctttaggttttgattcctgttgctcatggtacggagccgtttgaagcggtggttatgatcgatgtgctacggcgaggcggagcggatgttacggtggcttccgttgagaatcaggtcggcgttgatgcttgccatggaatcaaaatggtcgctgatactcttctctctgatatcaccgactcggttttcgaccttattatgctccctgtacgtctctctctgccaatctgaatccatttggtatcgaaatagtttctcaattagatgtattgatttcatatttgttttggtgatgtgattggttaagggaggacttcctggtggtgagactcttaagaattgtaaacctttagagaagatggtgaagaagcaagacactgatggacgacttaacgctgctatctgttgtgcgccggcgttggcgtttggtacttggggactactagagggtaaaaaagtatgtgtgtagtgagtgatcagtatccaagaagttttcttttcttttgagtttgtattttggtgtataaatcacatacgttgcttgcaggctacatgttacccggtttttatggagaaactagcggcttgtgcgacagctgttgagtcaagagtggaaattgatgggaagatagtgaccagtagagggcctggaactaccatggaattctctgtcacgcttgtggagcaacttcttgggaaagagaaagctgttgaagtctctggccccttggtatgtcttatccctgactcttctatcaaccttaatttggtctccaaataatcgacagatcttagaggccagtttctgttgagaagatggctctccgcaaagaaggatatatttagtagctgattcgaggggagcacttatttgatttaacactctttaaagcaccctagtattgttagttcatgtaaaaaaatacaaatacgtgttttcgacctcactaatactgtgatttccttgaagcctaggcctgtggctgaatttttcagcattatttcccctgtccactgatcagtgactgttcttgtgagattacagacagttgaaagctatataggacactgaaaaatttaggtttccacaaagaaacaaccattccttggtagcataggctttattccatggtaacctcttagtctctattcttcccctttgcatatcaggtgatgcgtcccaaccctggtgatgagtatactattactgagcttaaccaagtcagctggtcattcgagggtaccccacaggtagctttcaattgcctgtctggcaaaatgaaaagaaaaaaaagactggcaaaacttttcacacttgctttactgagctcatgcgtctttcttaatcaatcttccgtacactgagagatcatgtttttccttttcagattcttgtacccattgcagatggctcggaggaaatggaagctgttgctatcattgatgtcctgaagcgggcaaaagcaaatgttgtcgtagctgcgcttggtaacagtttggaagtggtagcatctcggaaagtcaagctggtggcagatgtgcttctcgacgaggctgaaaagaattcgtacgatctgattgtgttgcctgtgagtgctaacttcttcaaattactaaagtttatagtgtcaagcaagttgaggccaacatgatgaacttctctttttattatcagggtggtctcggcggtgctgaagcatttgcaagttcggagaagctagtgaatatgttaaagaagcaggcggaatcaaacaaaccatatggagcaatttgtgcctctcctgctctggtgtttgagccacatggtttactcaaggtacgagagtaatcacaatagcacacacatttgcttagatgtgtaggatcattactatatatccgatggcatggagtattctgttatcaaaccgttatttttgcacttaaaactaagggaagggtcacaatttttaatggatttttttacagggtaagaaggcaacagcgtttccagcaatgtgcagcaaactgacggaccagagtcacatcgagcatcgagtcttggtggacggcaatctcataacgagcaggggtccaggaacctcattggagtttgcacttgcaattgtagagaagttttacgggcgcgagaaaggacttcagctctcaaaggcaacacttgtgtaaactcatgagtatcttaggtaagagtgactttaataagaaaaaggctttagtatcaaacgatcaatgagtgtaccgttgttgtggtgagctttgtactaagtgtgatgcttaaaactgtcttataaataaacgagtttactctgtttttatcagaaagtttttttgttactttacattgcgaattttagaatataagaaagtgctgaacaaaaagaaagaatatgagaaagtaaaatttcttataaaattacaaaacaaattgaattatatctgcagatcattgttattaacctagcttcttgttctgtaacatctgtaccataagatgaagaatccaaggactctgtacccgacgatgaaacttgccatgataccaagattgctccatttctgagactctttgaggtcttgttgttttaagaacacgtctcctcgatactcgttgatcatcaggcattcgaatggatacttgaagaggctgagataatgcatgaactcccagtaaacggggatcctgtcctttgcaatgaaatacccggagaagaggaagaaagatcccatgagacctgagattactgatgtccccattatgaagtttgggacaagagcactgaaacatgcgacaaaagagtttgacatcagaagaacaatccatatcaccaatgagaagtagaggaagccgtctagctctcttctgagaccgaccagccaataaaccggcgtagcaaagagcatgcttatgatcaacaagaagggaatgaatatgagagtatctgctaaaacgtaagacaaaactctgtaagcccttctcgatgtctctctcattaggattctcctgtcttgcaagaaaattggaagtccctctgttgtggaagatagcaggaaagtgaggataaaggcgaagaacccggttcgcaagactttcgcttctttcttttgatttcctacgttcaagtaaatcgaccccagtataagaccggcaatggaagcttgtaaggctctggttgtgaacaattgcttggttctgaagatgttcttgcaagatctttgcccgagtatctgcacttcctctaacactgagttgctgtgagaatcagattgatgaagctctcctcctgcactaatatagcaactcttccatgttttgctatgaccataacatgagatttctctgcaactctgggttctgatcggttcaagactccctgcaatatcaattgcatactccaagacatttacccgcctaggaatctggtgaccggagaacttaatcttctgatgaaggctataaactgatccgttttgaacaaccatcccgttagagagcaacactatccggtctatctgctcgagtatgcgaaaaccaggctggtgaatcgtcagaacaatggttttaccttgtttaatcgtcatatctttgagaagcgtcacaacttgaagagcggacgcagaatccaaaccagaggttggctcatcgatcaatataacatttggatcatgaacaagttcaactccaatagaaacccttcttctctctcctccagagattccagatcttgatccttgaccgatccttgaatccgcaacatgttctagaccaagctcttgaatcagcctcttcacctttgcagccgcgtctttcctctttgtcttcagcctcaagagtgcgctgtacgtcagtgtttcttgcaccgtaagaaacggaaacagagcatcttcttgtggcacaaaccctgaaaccctcctgtactcaggaccatccataggcctaccgttgacaagcacttgccctgaaactttcccatgagaaacttttccggctagaatctccagcaacgtggttttccctgctccgcttggacccgcgatcgcagtgatctccgcggatcttgcatcacaagaaacatcctttaagataaccttttcctccttctcactcaacaaaccacataaattagaaaactttggagtgtttccgcctattctatacgacagattcttggtttctaatctatatgagatttcccggccaccgggaataggagcttttaccggcaattccatctaagaaagaaagaaggaaaaagaaagcatcaaactttgagagatagagaaatcaacaaattgagcaaagagtgtgagattaagtgaagaataaatggtagagaagatgaactaacacaccaaactttaaggaacctctcctttattattcaaacattcaaaagcttcaagactttattagctttctcttattgccttccatgaaaaccgaaaagcacttgactatgactaaattaaaccaaagatatttatgattccaagcttaaaatgcttaatttgtttttcttaataaagaatttgttcgtaaataatattgatacagttagataaatttatatgaaattaaacatttgttgtttttcttgtattttttaatttctaatgaaattggttgaccaaaaaaaatatctaagaaattaagatatgtagttggttcttttttttttttttttttaattgggttttgaaattgtgaagaggtacaagaaaagcaaaaaaagaattagttagaaagagatttggtttcgtctagagattctcaaattcgggtgagctgaaaaattgaccgtgaaatgtttgccttgttggtgaacttgttttatctaatttattagttttttctaacaaagaaagagaggaaacccagtttggttgttatatattacctacaatatttaattacgtgtttcgaactcgcttacggaaattcagatgtttaattaacaaggaataatcacgtaagaaacctcactaatttaattatttttggataataataataaaaagacgcattataagatgttgtctaggtgggcattcggttagatgtggctgcaaaggtgaaggggctgattcaaagttgtgacgaaaaaaatcgaattttgatttgggtttggaaaaaacacttaaagttgtgactaataaactttaattcggtataaaattaaaaacaacttggaccaaacgtaagcgggtgactggaaaaacgatatttttataccagtacaatttgcaaagtattgttttcttatataaaacatactgtacaatgttaattctttacccaaattcataaaaaaaaaaaaattatatccaaactttataggtcgcacgtattttaggatctgcaataacaaatgttagttaatactaacatacgtcgactcaaatgacccatgtttaatgaattagcatcatcttcaatcaaaccatgtcgttttgatcacaatttttctttttcttttttaaacctaagattcaaatccaaaactaaaagtaaaaaataatataaaaacacgaaatgaaacaatctcgacaatccaaagagcaaacaaaatcttcaaagttgcgagagagagtttttttctctagacctaacaatgtgtattagcaggtttctgcaatgggtgttgccaatcttcgtgttatgcattatgtgcataaagataaggccttcgcgtactggtcttgtacatgtgtctacgcacctgaatctcggtattgctctgaagagcacaaaaagatggccttagcagaacgggaatatgagctaccacataactttgccaatgtccatttgcatacgaatatggaggatcttgtcctaccaaagattataagctatttgagagatcctcaactaggtatcattgaaatacctaatctacaatacatagacgacgtttttaatgtcactcccactgagcaaccagatatgttctctactaacctcgacgaaagagaagaattcaacatatggttgtttatgatgatttcgtgacaaatgggtttctcatgtcaattgaaataacaatgggacgattttgaaaataatgtaaaatagtaatgatatgtactacaatttttagttttacataatatccttgaaatttgaaagatccatctaaacccatttatgcttggggtttttccattttcactaaaacctctccatttttatcatcttccaatggcgatttctcgttccatccttcaccggccagctaaatccttttcctcactgttcactcgttccttctcttcgtcatctcctctcgccaattcccctactgtttctcgatctgcgtcttcgttgttgaatcgttcacgttctctcgtttctggattctcagcgttggtccgtgccggtgtatctctagctaggtgtatgtctacgcaggttacttccgcttcgctgaatgatccgagccctaactggtcgaatcggccaccaaaggatacgattttgcttgatggttgtgatttcgagcattggtttgttgtcatggaaatctctctagagacgagattattgattactacatcaaaaccctagctcaagttgttggcaggtatatatatagatccatttccacagtgttctttgatctgtttctagagtcttactttgttaagtgtgtatcttatttttgcgttttagtgaagaggaggcaaggatgaagatttactctgtgtcgcacaaatgctactttgcttttggagctcttgtttcagaagatctttcacataagatcaaaggttaaagcttgttaattcttttgcttagcttgagtttattataagcattgatttcttatacttttgtatgtgaacaatccagagttgcctaaggttaagtgggttcttcctgattcctacttggatgggaagaataaagactatggaggtatgttgtttaactctgatgattgtgctttctagtcacaatatacattgttgtaagggacactaagatttgatcttgtcagagagtagtaattagtttttgatgggttttctgaaatttgattgtttcaggagaacctttcattgatggaaaggctgttccttatgacccaaagtatcatgaagaatggataagaaacaatgctaatgcaactaatgaaaacagacgccctcgcaggcctcgcaactcggatggaggcaggaacgataggggaaaccaagacacgggttacagacgtccaccaccaaaccaaggtatgggaggtgctccacctccaccgcctcacataggcaacaacccaaacatgcctcctcatatacaaccacctaacatgaaccagaactacagaggtcctcctccaccaccaaacatgaaccagaactatcagggaccaccagcaccaaacatgaaccagaactatcagggacctccaccatcaaacatgggtcagaactaccagggaccaccaccgccaaacatgaaccagagctatcagggacctccaccgccaaacatgaaccagagctatcagggacctccaccgtcgaacatgggccagaactacaggggaccttcactgccgccaccaaacatgagtcagaattacgagggaccaccaccaccgaacatgaatggaggatggtctggaaactaccagcagaacggtggataccaacaacaaggtcagggtggtggaatgcagcaacagccttacccacccaataggaaccagagttaaaccgtcttgtgttttcatgtataggagcggataccattttgtggtcagtgttcttcagtttgtcactctgctttgtgagagagagactgagagttttagtctaataagttctgcatgagttattgtagccagcactcgtcaatctatttatttattatatcctcaagtcaaccttgtttatttatttagtggcacaagaaaaaaagagaaagctataaactaggagtagaaaagagttaatcaaaatccatcgatttcatggcaaaaagaccaaatctcgataaaacatcacttcctcgttggttcttagcagcttggatctgatcagcaagtgagatatctcctcttgttcgctctttccttatcaaatccaaatccagtttctccagtttagctgcaactgaaacaaccctatccgttccaattgcgatcttaccaagacttgttttcttcttgtgaatctgacaagacatttaatcaaaccaaagaatcatcaagtgggtttctaatattcttcagagtcatcaacggagtagtttttttatacctttgttagtctcttctttagtttagaacgtgaagcaatggttggattctccctttcctgctttggctttcgaatctttccttctcgtcggtctttctcctcacgttctttctttttttctgcagctctcctcatcttctcggtcctggcttttgcagcttcttttgctatcatcttggtttgttccttagctcttgctttctcttcagctaactgaagctgctcagatgaaaaatcttgttttattttttcatagctgtcccagtcaagttctgcctcgccacttcctcctttccttgcagcttctgcaatgttttctgaccacgatgacatgaacttctcctttaatcgcttcgatcttgaccgttctgcccaaacttgtttcactgaagctcttatcttctccttggtttcattactgcaagagacaaacttagcttagatatggctctagcttcattgttctctattctacactcaatactttacaaatctacctgtgtggttgttgatgatcggacatcttcttccgaacctgcaagatattgaagagaagaaaaagttctttgccaaataagttttcttccttcacttctcactgtaaacaatagaagatgggacaacaacaaaatgtccctgaatttgcattgaatcttacttgacttcaccttgggatttgtcaaagcttcgattgttctctgcttgattcgtcttcgagtgtctgttaaagagtatcaacaatctcactacacaaagcctcaaagaagaaacaatgtagaaaatcgaagaaaagatccttctaccttcactgtgtttccttcctttgttccatggcacctttcctttattagctaatccaatcttccttctcctttcctcttctttaatcttcctatcactatcactatcagcttcagtatctttgttcatagctttcacttccaaaagacttgaattgacttctttcctatgaatctcaaacacattgtacaatgaacctacagatttcaactccaagtgtctgatagacctcaaagaagcaagtgaattaggtattctcaaaacgattggttctttgagagtccaatagattgaatttgggaaccaccaagcgcattggaatggagcacgagttgattgaaatgtgcatttcatctccattgataaacctctgcaaaaacagtatttgaccaaatcgaaatcaaaataggtcaaataaaatcaaacaaccagtacctgaacgataaatcaatgaatttctacataattttcatcaaattagaaatagatttttataaatccttgatttcagagatgatttcaaatcacaagagataagagtttgagaatgcagaagcactcacaaatttagtgacatacacggcacggagacgaacaggagacaagagaaaactctgaaaagtttccttttatggtttctcaaacgcgaaagccattgaagaagaagaagaagagtgcgcagacacgaagagagagagagagagagagagagagagagagagcgggagaaacagataaggaagatgaagaacactaatgggccgtgaatgggcctaatctttattaataccttaaattacaatttaccctatttcaaagtaaagtacacctttgttttagaggttctctctctttactactataaactcgaaagtgtacccaaatgagtattatcttcatgtacatattaatttatttagtacggttttgatttatcattgaaatatgagagctgaagagacccaaaaaaatcggaataaatttgaacaccacaatgtgtaaagattttttccctaaaatcaaaaacaaattagacgaaaaatcttaaaaattaaattacgaaaaagacctgaaaggattaaagtaaagagggtggtggtatatctcatcgagtgtctcgcccagcttcttcagtcttcaccacataatattaataaaaagcattttcttctttcgattgcttcagattcgtcagctcactctttcctctccagaagaaaccctagacatctcatcgccaaaatgttcagatctatgctcgtccgatcttctgcctccgcgaagcaggcggttatccgccgtagcttctcctccggctccgtccccgagcgtaaagtcgccatccttggtgccgccggtggaattggtcagcctcttgctctcctcatgaagcttaatcctcttgtctcttccctctccctctacgatatcgctaacactcctggagttgctgctgatgttggtcacatcaacaccagatctgaggtattacaaacaaaatccctttttgatttgaattgcttcctcgttcagattttgaacagagatgtatcattttggcttattagacttgtgacttgttcactatactgattcatgtgctatgtacttgtgtttgataggttgttggatacatgggcgatgataacttggccaaagctcttgaaggagctgatctcgttatcattccagctggtgtaccaaggaagcctggtatgacccgtgacgatcttttcaacattaatgctggaattgtcaagaacctttgcactgccatcgccaagtactgcccacatgtaagcatatgatctaatgcatatcagagttgatgtttcttttggaatcatatttcgcattgctatctccaagaattactggtttttaggcctcagttttcttatagatgacatgtcttgagcgtgaatttgctctcgcttctccaagattgttgatttttaggtgtaaaaatgtctccttttgttctactaaatttggttttctatcaaaggattgacctttgaacttactcttttgctgaatcaggcgcttattaatatgatcagcaaccctgtgaactctactgttccaattgcagctgagatatttaagaaggctggtatgtacgatgaaaagaaattgtttggtgttaccactcttgacgtcgtcagggccaggactttctatgctggaaaggcaaatgtcccagttgcaggtttgtttagatgccttttctgctcttgtattcattcataagttttgcttcgaaatgtgttcatcttattagctgtgatcacaatttgaatcccgagcctgaggctttaatttgaatgcttttcgtgtctgcagaagttaatgttccggtgattggtggtcatgctggggttactattctccctctcttctctcaggtttcctctcacttcctctctactcagactgtggtcgaatgttttatatcttacaactgcggtttagctctgttcgactcaaagttattctgtttgtgaaaatataggcaactcctcaagccaacttgtcaagtgacatacttaccgcccttactaagcgtacccaagatggaggtacagaagtcgtggaggcaaaagcaggaaaaggttcagctacattgtccatggcgtaagtattgtacttctttacatagttgttctcacttggtaaattttcaggatcctacttttgatttcttaacttcttaaatctgataatcacagctatgccggagcattgttcgctgatgcatgcttgaaaggactcaacggtgttccagatgtcatagaatgctcatacgtgcaatctacaatcaccgagcttcctttctttgcctcgaaggtaatcctcaaaacttaacatcaaacacagtatgtacgtcctatggtcttgtgtctcggttgatgaatatgagggtttaattattattcaggtgaggttggggaagaatggtgtggaggaggttcttgacttgggaccactctcagactttgagaaggaaggcttggaagcattgaagccagaactcaagtcctccatagaaaagggagtcaagtttgccaaccagtgattaaaccgagtttactcggtaatttttccaattttccagctagagttgccacctcctccttcatcgggttgtatcaataaaaaatccatgtttgtgcctccattagtgaaaccataaggctctttttggttaatcaccaaactcaaagaaaaactgtaacatgtcaaagttgtaattctttcttcctttttggaaccatgcgacttttttttcatgaacaagagatcataagtgtgggttggttcctttttaatgctgcgtctgtgtcaccatactttctgtttctcagatattactttcttcttttttgggttaagtttaaatttcagccaaaagtaaaagagatttttacagatgtgatcttcattggcattttaccaaaataaactcaaattgagaagctaacgttttggaggacttgcataggtagagttgatgttaaatgggttccatttgattgatcagacgagtttatttacttcttttctcgctgtcgagtatagtttagttttttacttttgttaaaaatatgagatttccaacattaaccgctccaaaccgattttacatattttggttcggagtagttgatatgccatgggctccctttcgtcttacattcaaaaggttagagaaaaggtctatacactttcagcccaaatcatcaaaaaccaaaactagtttggtaacccaagtttcatcttcttttttgccctctcttttcttcttttggttattgtgacttttattacaatttacttttacagtagttacacaaaagtaacaataatattttatttctagacaaaaagggtaccagaaaactgaattaaagcatcgtcctttcactttttttttttttaacatggcacatgcatatttatcatccgtgtcaacattcttcctttcttatatttttttcactaaaattgcaaaacggattattggatccacattcgtcctttctatatcccttttcacgtaaaccaaataatatgcctcgatatatgattagtaccatatattctttattctttcttttgtgtactcatgtataatgtattagatttatacaagaagaccctaatagactcattaactctaacaattaccgttagtgtttttgtgtattgccctttaaaactgttcatgttagaggaaacactatttgaccatctaactcttgtaaacaaatcaaataatcagtttatgtaaaattataaagacgaataaaaataaaatattttactacaattcccctgaaaatgacttaatacaaactaatcattttgaaagggaatggaagaatgaatttataacttttcacagtgctttaatttcttttattacggaaaaaaataagacaatggaaataaacgaaataaaactaggaaattgacagaaaaaattgtgtttatttctttatcggaaaaacaagttgacaaaaataaatgaaaggaataaatattggggaaaataacttaagagagagagataagaggaaatgactatgagggtgatggggagtgtacttactgacacacatgcgatcgaaaaacactaaaagcctatagggtatattcgtaaatttatttagactacacttggttgagtaggtgcaatgggaaacatttatttgaaatttgattccatctttgccttacatatcgatacgtcatctttttatgtgtgcattgtcattatttgatgatcaagaatatggtaccaaatacattatatatcagaaaagttcgtatgactacgggtatttaattaaaaatacagtacatgcatggtcggtgtgtataatggagaagtagttagaaagagaatttgtggtaatgacaaaaaaatggaaaacaataattgattgtgtcctaaaccagtgaaccgtgcgatatttcgtgcctttaaatttgatgttgcatgtcgtagaacgatgttttgataatttcttctcttgggaaggtaaaagaaaaaattatggattcaatgcagattggctcgatgagtaggaaacgcacttacaaaaaacataaatctcctatctacaatcacatatttcttcttatatctctcttgaaatctctacatgaatcacacctaaaatgttcatatttaatcacataccatacttgtattagtatgtcaaatgctcgggatttccttgttaacaaaaaagaaaaaaaaaactgattgagttaccaaattacgtatatatacacatttttatctttgtttaaaggaaattcaagttaattttaaactaaaactatgtacaagtatgtatctctattattttcgttttccatctgaaactttactacgtttggttaattaaaagtgggattgacgaacagtggagttcgagaacagatagtggaaaggagcatagacaatggttgattatagggatactgtcgaatcctacggatactggtgatgcattttacagggtgtaacctctaaaaccaatacaatttgattcgatgaaaataatactttatttgtttaaaataataccatcaatattagtttataccgcccaattattagtgtctccaactctccaacagatctaaaagctttactttttagtttttattataaaagaaatcttcttgtattgtctttttttccaacaacccaaaacctttactacctcaaaagttctgtattaatattttctaacacagtacagaacaatctttgacttggtaaaatttgggtttattagtgcttatagtttctatcatctttaacaaaaaaaaatagtggtagtcagaaccaaacctaagaggactatgtatatgtgttgatattcttacagtaacctctaccaaaatatatccattgtaatgtatatagctaatacaattcgaaatgtcatgtaaaatatttccacatgatgaatcggacaaaagctttttgtttttcatttagaaaaaccataaaatatataatataaaataagaaaacactttaaaaatgaaataaaagcacaagtgatgatgatgagtatcagagagctctttttatgaccaaacacactccttccattaccatttccctctcttccccaaaccccaaaatctcttcctttttttaccgttactgtaaattttccggccagaaacaaaaaattaaaaagagctttcctggattctcgtttagtcaattccacatctctctatctcttctctctcttcttgcttcctctgtttttgcttcttgaattctcagaaacagagacaaattctaaaaaagaaacaatctttagacaaaagaagagaaatttagtcatgggttagtctgcaaaattcaattacgtcttcttcttcttcttcttcttcatctttgatttgttggcgtgtttagggtttgggatttggaggagaggcaaaatgttgaattaaataaatcgaacgactctggattcctcggcggttaacgaccgccgtcgccgccgccgtcataatccaaccaccaccaccatcaacgaccttgaatttccacaatatgcttcatcaatggcaccagataacgaccatttcttagattctccgtcgccgcctcttctagagatgagacaccaccaatcagcgacggagaacggtggtggttgcggcgagattgtggaggtacaaggaggtcacattgttcggtcaacaggaagaaaagacagacatagtaaagtatgtacagcgaaaggaccacgtgaccggcgcgtgagactctcagctccgacggcgattcaattctacgatgttcaagatagacttggttttgatcgaccaagtaaagctgttgattggcttattactaaagctaaatccgccattgatgatcttgctcagcttcctccttggaaccccgccgatactcttcgtcaacacgccgccgctgctgctaacgctaaacccagaaaaaccaaaactttaatttctccgccaccgccacaaccggaagaaacagagcatcatcgaatcggagaagaagaagataacgaatcgagttttcttccggcgtcaatggattctgattcgatagctgacactataaagtcgttttttccggtagcttcaacgcaacagagctatcatcatcagccaccgtcacgaggcaatacacagaaccaagatcttcttcgtctctcgcttcaatctttccaaaatggtccaccttttcctaatcaaacagaacctgctctgttctccggccagagcaataatcagttagcgtttgactcatcgacggcaagctgggaacagagtcatcagtcaccggaatttggaaagatacagagactagtgtcatggaacaacgtcggagcagctgaatccgccggaagtaccggaggatttgtgtttgcttctccgtcgtcgttgcatccagtttatagccaaagtcagcttttatcacagaggggtccccttcagtccattaacacacctatgattcgtgcttggtttgatcctcaccatcatcatcatcatcatcagcagtccatgaccactgacgatctccaccatcatcatccctaccatatccctcccgggattcaccaatctgctattccaggcattgcatttgcttcaagtggtgaattctccggttttcgtataccagcacggtttcaaggcgaacaagaggagcacggcggcgacaacaagccgtcctctgcttcatccgattctcgccattaaacaagttccaaaaacacataagattgtgcaacacaacaggtttcttttcatattccaggtttgaagtttttcgaaaacaacacccatttgtgaaagtcttgtcttttaaccattcatcaaattgataacttacattgtttttaacgtttcagggcgcttcgaatgcgtggaatagtgaaggcggttttcgttgttgtgtgtttcgaatatccaaatggcctataaatctgatcaacagtttcaggttcttcttaagtctttaaaagcctaggccttggttaatttgaattcatcttgtatcaattagagaacgttctgtaagttcaattctgttttacaatgtttagctctagctacatgagctcacatcttgtttgttgtaacttgttctacaattacttgtcctttatttatgttcttgtgttggaaacctttaaccccacttgaagctaaagtcttttgtttgccctttattccatgtgggtttaatgctttccccaagaaatatctcattttgtttgccaatcccaaagaggaacagtgctctatccatctacatcaatcatcatattgtttggtttagcgtttattagaagtattatcttcccaatctctgtggttataaactttcttttgactagcaaatggaatttgaaacaatcatttctcttgtgtttcttagtctcttcttttggccccatagatgaagagtcactttccatagacagggtttgcatgtgttgcttcttttggagtttagagtttagaattatgggtttcttttaaaatttgtttagtggatgcaagctctgatacttagtaagagttttggcccatgatccacggatccctatataaatatcagagaaatggtttttgacttcttttcatagaatcttcctcaatactagatttcaagattttatgaaaaaggagcaaaagagaatttgatgtctagtgtcaaataactgtctactttaaacaagagtgtaggagatccaccgaacttgagtgtgatgtagtctttaataagtaaaaaagaataggacattagattagtagatgaagacactcttgttggtctaaatgaaggaagttgaaagcagagcaagtctctttcttttcagatcaatagtgtgaaggtatgaatttttgtccataatttgtcgatttttggctataatatctttcggaaagaaaactttggtttcttatggagaagttatataaagaagcaacactttacatgagatgggataagatgagattggaagtagtggctagacatccgaaagtaaattgcagcataaaaaagaaaaagacagcctgaatcatatccattctacattttaaaattctgttatcttttcttcttcttttgttccttccttgtaaccttcttgttcaaatgtatatgattgatgtacatacaataaatgtagctcatgatgaatctggttatgtgaaaagatcaatgaggtaaaagaaacctctatgattttgggggcatgacagaagaaaaagggaatgttgaagaagacatgaatgataataataaaaaaggatagcaaagtgtaagaaaaggatgaaaccaaaatgggaaaaaaggttgtcacctttaaagaatggtcccctctctctatttctttctatctcttgtcagatctcaaggttacatacagctgtcttacttttctttgatttttcttcattctattccatagccaatgataattttccaaaaaaagaagaaaagagtcgcaaaatggctcaaaacttgattgttggatagtggtctaaaaccattattgttagtttgcatctctcttcagaggatgaggttacaacaaaaagttttaaaaccggctcttttggttattaagtaatgaggttactacgtttgatgttgtttgagttaaccggtttcatttactgaatgataagaagccaaccaaatttgatccaattttccttattgacactaaaagtttatgttccttcaaacaccatcaaattctggcaggcatgaattttctgatttacatttggtttagcttcatacacaaaatgatgatatcaagagttaaggaccgaaccaaaaaaaagaagttagagctcgtctttcaaaaggttctccggattcatatacagtttttgggtctaaaaatgtttgtaaataagaattctatcgaaaataataaagactcaagttttggtcccggcggggctcgaacccgcgaccttcggctcataagaccaacgctctaaccaactgagctacgggacctgacgataacattctacgttagtacataatgaatcaattattcatcggcttatggtacaattggcattacttgctaagtaagtgtcataagttggttcgatcatttttttttccccgaaaaattaataaatttcaatctctaaatatgatgattacaacttacaagtaacttttttggttcaatacaaagaacatccataagtaaaactataaaagagcaagcaaaaataaagatgtaggagaagactaaatagacagaagaaacaagaaagatattactgtattagcttcaataagactctgtttccaatacacaaatctcagaatttaagtttttacactcgagaatccatatatatatatatatgtagagaagaaacgaaaccacgcgcgaagacactcactcattagaacaaactctttgaacagagagtgatatctacgaccagccaaaccagtaatcaagaatatagaccagacccaaggagaatgggtaaagcaagtaagctatgaaacatgtccaaagaggataagttgtgcggaaactcgcgaaaccgcccatcaccagacaaacgatgagaatcaccaacacttctgatgagaagttccatgtcagtcctcgaacgtagacgattgctaagaacaccgagagacacagaatgttgttcattgtcactccaccacatagctgaaaacaaacaaacaccaagaaacgggttttagtataggaaatataatgggacagaaagatataagacttgtgaatatggatggacctcggagaaagttaaagaggcggttctgatctttttgcgggatgcgaagatgatggcagacacggcttcacttgaattggtggccaaaggcaaagcgatgaaggaaatgaagaaagacggaatccctgtggctgcggagaagttgttaacagtgtcgactaaaggatcagcaaatgcagctgcaatggcagctcctaacagtagcagcagagctgctttaatggtgatccattttgggtctgcaacctcaccgccttcctcatcattctcaccattctcgttatctcccaacaaagcatgctctctctttgtttgctgcaaaacaagaaaaaggataaaactaattgcgttagattccagataagttttgtgacccaagtctgttcaaataaggtttcaacagtctttctaaccacatggaaattgtcaaggaatttcattgttcgagggccagcttcaggaccagatggagcacctcccattgcctggataagccattgcttaattccacggacaaactcttcttgatcaacttgctcatcaagagtcttatcaaaatcttggagaacttttcccacagcatcatccttgtcaaaatctatatcctcaaagctgatcccaatgataagcgcctttagttcagccgctgacaagtgtccgtcattgtttgcatcaattgtcaaaaacaacctaataaacagataaacttgagcacaaggtgaaaccgagtaaagtgcattctccatgtaaagaatatatgacttactttcgaatgacatgttcatcaggctgaccttcatcatcaagaagccttcccagagcatgttgtttcaagtgccttagtattcctgatataacatgcttgtgttttgcaaaagcaagccgtctcctttggatccatggttggaatacctagatatcatcatacaaggaaggataatctcacaaaacaagatggagaaagcaaaaaaaaaggaaacaagtctagtaaatatttttcagaaacttctgtcctgaagattttatgttacctgatatacacagtaagagatcaacataagaactgaaaggattagagcaatcaacacggacaattgtcttccagaggttgagcccaacatctgcggaagctggacaatgacgaacggaataactgatatagccattattcttgcagcatagctggtccaaatatcaacagttacaccagaatctacaaaaacagagtaaacaacaataaggaacccgcatatagtaaagcacaaatactaaattctactgtattcatcagtcccttataaaaacccatacaaacgaagaatcctgaaggtgtaaccgtataagacacttccttgttaccttttaggtgaaagcctttggtgtcttggttgtttacagcaattgaatcacgaagatcacacttgccaaccacagtacaagttccccagataacagtgagaagcataacagtggaaccagcaagcaaacccattcccacagagacttggctttgagcagttgctgcatctccagatagtccagacactgaaagccaaaagacattgtttataaccaaagaaacaccaaacacataataaataacccatcaagataacaactccacagaaaaaaaagataagattttgactaaaaagcacaaagtgacaagttatgagttcatcggttaacatcagtgtatcatcatcatcttttcacaatttggtatcacaaaacccaacaaaaattcactttttgttaatccctgtatcatcatttgattcacagaaccaatcaaatattcactttttttgctctctcaaaattcaaagaatcttcatcaaagcaaaacaaaattcgtctatttcactcaaaatgaatttcaatttcgcatttgctacataactcgcacacaagcatgacactttatagatcgaattgaatcatacgaaacctcaggatctaaatttgaaactttgaaaaaaattaataaacattttgacatacccatgataagcatagcgtcaggaagagcaccaagcatcggaagaaacaaaccaccgacaattccaggtccaaggatctcaagaagaagctcacttccagcagagagatacgtcgcagccgtaaacatgagaaatccataaaccaaaatcagaaacacgtttccaagagcggtcttagtacacggcataaacccgtatgtctgctcacaagcttcctccttttcctcagccggagccgaaacaaccgacttgataaccgatccggaaccggcgagatttgaaccaccgtcgattccatcggagattagactcgttgaagatgggtttagggagacgaatcgagcgtaagcagatgaagtgaagaagagaaggaagaggagagagatgagagatctgaatctcatgattgatttcgaaagaagaagacaacaaaaaaaggtgaaatcaaaggaggacgttgttcatggagaaatcaatcagtcgagtttttgtggatgagtatgtatatatatacacacacacatatacgtgtacagataataaagttgtgtgtgtgtaattcgtgtggggcagttttttttgtttggagaagatgataaagctaataaggaagacgaagaaggcagtgactaattaccattttagccctgttaatttggcactacaccattatttatgtagtaagtaccaaatcgtttgattttttccaagattttcttctgtttatgtttaattagtcaatttaggaatataccaataatacaaaatttgggtgtataagaaaagggggaatataaatttgttagtgtaagttattaataatacaaaatttggttacatctagaagaaagatgccaaaattagttgttacttattagggtgtgttattaataaattaacaatataaaatttgcccactacaaaaagtaaaagtaaacgtattgggtactacaagtacttcttccctacattaatgggattcctcaaattcaacaatggatttgttcagcatttatttattttcttttttagcattttgatatttaaatactatataaatttaaatactccactagtataaaagttcaaaaacagataaggtagtcatcaattcatccggatttatgatgatttttttttgtggggtagatatgtctacttttttcaaaatttcggttatttatgagaggctgatttttttctatatatacagcataaattaattttcttgcaatatttatttatagttaaaaaattatttgaccttagtctcaacttaaaaaactttcggggtcaatcgcaacaatataataggcagaagctgaaaaaatgaaataaaagtaggtaagggcgattcgggaaccgtacgttttatttgcttagaaacgttcgttagtcattattaccagatttgattacgcggccacacttgtaataataaagcttaagagagggcaaaaatcaaatatttgtcaattttgccgacattatagttagattagataccatacaaaaatcataactatttaaaatatgatttgtctgaattctgtatttatagaaaaatatcaaacgaaagtgttgaccaaaagagcggtgaagacgctgacgctgagctgcgtttgagtaatgtcaaagaatcaaaacgtcacgtagttttgtctttaaaaaaaacaacacgcatgtttgggtattttcgaatgagatcaataattgggcctagtttagtattggcctaaagcccataaagaaaggagcgaaatctgaaaagtcagaagacatctccttgcacctttcttctctcttgctgtttctatggtggtggtattagggttttggaaaacccctaatctcacctgagaaaagcttcatccttttgtgacttttaaacttctcttacaagtcttcttcgtcatcctcctcctgggttcagcaattctcgccgaaatcgtaacctccgagctcacagttctgcaacttgtgggtgtatattgattcacaccaagatttagggattaagggtaatggtggaaaccgaagagaaaactgataagcttgagaagattaaagtggaaaccgaagagaaaactgataagcttgagaagattaaagctaagcgtcgtcgcgtgagtagctcagaaatcgactctgatacacaaaagtacaagagaattcaacgctgcagagcgaaaccatcttatcttctatgtattgggccaaagtcaagccgaagtgagtacctcaatagattaccaggattacttcgtgagctacttcgtaatagacactggaatgatgcaagccgtgtgctttctgttctgatgaaagggacaattaacgatccttgtccgaagatgaatcgcctcaaatacgaggtttgcttttatctctcaaagatcgaaacagtgtttgttgctctctgtttcttattgtgttcttttttgtttggcaggctcatatacaaattgtgagtcactcggaaactaataaaaacaaagctgatgagattggaagaatatatgatacttggattgggcagattggtaaacaacataaagaggtcccttttttagatttgtaattctttaacttgtagttattggacaatatagcattttgattgaatattgctctatggctggatgataacattggtttacttgatcatttggacaggagaggctcttggtttggtacgagcaaatttgtcattttattgagcatgagatgaacaatgaggcctatagtactgtaatcaggtacaattgatatcttcttgaactagttttaaattggatgttaggatttcatttttaatgcatatgttatattgtaatgtgtatgatagttttgtatgttcagctaattatctggagatagtcagtcttttatccaccaatgtgtaattccaccttcctgagggtggtttgctacgttcttgtgtgaattggttttgatgattctctttatcttttggtagcttaatgcagaaccgtgatttcgcaatgcttccacgggccaatctgtttataggaatctcattctacaagatgtggtgtaataaattcttgaaggagttgcagcctgaagatgcagatgacaatggaagcgtatccaacatatcggaatcaggatctggtagtctggttgagtgttcaggcagggatgagtcggtgtgctctttggcgtcagaggtttctgcgagaaaagattcagagacttccgtcatgaaaaataaaaaagtttcccatttgtctatcagtgactcggagacaaggatggatacgaaggtaaaagtgatgagtactccctatgttacacctccaccacaactctatgcgatctctgaagaaaacgaagcctctttgggagatggaattgttgaatttgatcccactgttattaatattcttggttagtactgagaatttctttatcttgcattgtgatataatcccgaaccagctctgttgaatctatggcttcctcttctttcaatgttaggtgacatggatccatggttgcttccctttaaaccaccagaagatccggattgctacagaaagattgtcaatgattcttattataaggaagcagtgaaatatatgcggcaaactcttcagtccccgccccatgtatctttggctgcattacatccacttgtacaggtaaaacctgagattactatttttgcctacgtggctcataatgtcatcatgttcctcccttaaagctttaatgtctcacactaattagatgtttgttttttccttatcttctgttaattcccttctagattctgttaatcggaggtcatgtagatgaagcgatgaaagtggtcgaggagatgtgcaacaaaatacatgacgtaaaacctttcaggtagaaaaagatctctttcattctctatttcgtacctgcacccgtcgtaggactttagaatatggagaagaggaatttctgaagtgatgttttggttcttttactcaactgtaggattaaggccctaatgatggagaaatttcatcgtaacagtgacatgctcgcaaaatgctatgaagatatcttaaagattgatccttgttgtataactaccctaaagaagcttattggaatgtgcttagaaggtatttaagaccaagccccataaaacacatgttagtcttaagatcttgaatcctgcctaagccgtctctaataccgtttgttttaatgactttcagatgagtatagtagagagtcgcttaccgaaatgatagcgttgcatgtagaagcttcttttcctgagcctgaaatttggaaagagttagcctcttgcttcagtaacttctttgagaatcttgatgaagaccgattgtcagtatgccttgacggatctgaagataaacggaatccacaaacgtattctgttcgatacaacccaacaccaaaaacgttcaccaagacatcatggactcttcgggctaagtggtggctaaaccgccatttctccccgcaaatgctagagacagaaataaaaaacgttacattgacaggagattgggagatgatgacttacaaagccgcttgtgcaagttatatctacggacgagagttcggttatgttacaaaagtgtacgaactgttaaagagtagcaataagcgagagtttttcaaattcttgagagaacacagagtgaatgggaacaagatgtacaattttgaatagtttacacaaagtagaagatgcccatttttgtagttttactgtaattgtgatttttaacatttgtttctgaggtagaaatcaatatacggacctaccggttttgaggtcttaaagattatgcatttgatgtagtttccataattttgaaacttaagaacagtaacaagtaacaactaatgaatttgtagaatagtatatagtgtggcctagcaaatgacataaaaacatgaaaagtataagaacaaaaagccctagaaaaaccaaattagcctgtacatttttcattatcaacgtagccaagaaaccagattaaaagatgacagtttttgaccattcacacattttatgtgcacaaaaaaaaagtacaaatttacagaaaattcttttggagctgaaaacaaacccaaactctgttttcttctcttctttaaagtctataaatatatatataaacccaatagattagaaagtgcttcttcttcctatacctttctcttctccatgaccagtgcctctgatttacagattgggcaaacgttcttcacaatcagccatttctccaagcactctgcatgatactcgtgcccgcaatccaaagtcgcaatcttttcttcgttcttgaagctttcctgtaaagataatgagagagttgttcagagctctaattccaagcctgtgcggcccattacaaagctttgatcattttggctagtttttttacctgacatatagtgcacggttcggtttctaaatctttagttcgtggggacgacgactctttttcaaagttgattccagaacatgttcttgttttcaaatgattcttaacatcttcctccggcaacccagtgtttactgttccaattcgctcactcaaagcaagaagctcctgttcaaaccccagtgacaaatcagataaacaaaatcctaactatgatcacagaaaattgcattgtgaattctctgctcatgcgaaacccaagatcttctcagggaaaagataataaaagacagcaacttttagctcctaactctgataactacatcggtaaagagtaatgaagggctcacctcgtaagacatttcctcgatgtccaatcgcatatctcgatgatgatcaatgtgattatttccagaaccaccaaggaagtctccaaactccaaaagcgcaacttcctacacacattgaaagagaaccaaaagaaacaaaaccttgagcaacgacaaaaatgaaaaaagatggagcagaaaatttgaggaaagaaagttacatcatcaggcatcactctaagccgaggaactcctccacggtgttgtctaagagttgctacaggtacagaatcatctcgctgatgatgctggtatatccgaaacccggttggttgaaccggacccatgtgactcgagcccatctctgaccccaagggaccactattcattgtgttctgaggagtaaaactccctggaggaactctgtatgaagcagaagaagctgtgtggggatataatgtggcattctggcctctcatgccttgtacaggaggaggtgccgggtggtgatgatgactataatagtggtccctcgggtttaactgagaaggatacataaatgatgtagggtttctgctactagactctatggaaccagcgaaaatgttactacctgaaaggtcattcaaagatagataaataagattacaaggttcaaaactttaaaaagcgattgtgtgttagtatgtaccgtgcatgtaaggtgtgggccagaacgaaggtgagccatcagatctgccgtggtgttgatcataccacattgagccaggaggtggaaaaggatgatgacctgcatagtttccttgaatgaagttgtttggagcatgagaaggaagaacagtgttcactgtaacagctcctggtctgttcctagcgcctccaaaaggggctattgtctccggtgtgttaaatggagctgctaaggtacttaaatattgaggttgtccgggtattccttcagcgttctttcgcttgtatgtccctcttgtgtgatccataaaatgagcatttctttcgtattcatgatcaggacttacaccaactacaccgtgactgcttgaagatggtaactgacccggaggagcctgaaatgccacatagggaacatagaaattcgttggaacacgctggtgaggatgatgatgatactgaggaagcccgtagaacatggccgagttgtcataagttgggtcttgaagagaatgaggttctaaattaggaacgtgtgcaaccatagcaggcatattattattatccggttgttgcggaaagctgcctaaaaggatgcaaggctctgcttggagagaagcttgagattgctgctgctccatttctaaatcaacattcctatttctttgtcccatttcgcttgctgcagaagccctctgatataattcgatccataaagacatcagcaaccatacaacgactgagtaacaaatcaaacttcttgattcaaagcaccaactaatgcaacattattacatctcaagctgatactaataactaagctatcacatatgtcaagttctaattttggggataagtaacgaaagcaaaacatacaaagcacatgttctcctcgatttagccttagaaactgatataaatgtcccttaaagaaaccatattctcggaagattacattgtgcattctcaaactcatggtaacatggtaaagccaagatcatttccaataaatggaaaaaaaagaatgaaactttagctgcagatatcaaaacaataccaattcttcaaacgctaaagatcaaaactttattacataaacaaagaaaggaaactagcccattacgcctaactacaatcagaaccggaggaaggaacaaaactctaaccttgagaacattaagattgagaggaaaaaagcttcaatgggggctatgcaaccagcagcaaaagacaaagacttgctaatttttctgagaatccgaaaccagaagaaaaaaactccctgcaagataaacaaaaatcaacaatcagagattgaaatcatgaaaacaaacaaacccagaacaatgcaatttcttcagataaagttgatgataacataaattcacaatcaaacaaaacccaccaaataaaaaatacgttttttttgtttttcccaggaacaaaatgaaactgggaattcaaaaaaaaagaagctagagaagacgattatggtgatgattaaaagagataattacctgattttagaggtttaatcagggagagagagagagagaagagagagatccgaagcagagaagaaagaggaggtgaggaagagagagacgtcggtttcttgattctaaaatttctcttctttttgcactctcacggaaggtttttatttatttcgcattttatctctttttattctatttttttcattggttactcttttttctttgattcattttgtttttttattggtcatttttgcatttgaaaataatttaattagaaatgtatatggagttctaattatagatctaaaacggtgtcgtaattaggttataataaatggaggattacttaaaattaatgacttcaattagtgtacacttttgatctcatatgtaaatgtttcgtttttattagagctgattttgctttattttatgtttggttgctgaagcatgccaaccattaattaagaattgattttattagctaagataaatagaaaagaaattaacgcaaatggataaaatgtattttttctaatttttatagaatgaacgaaaaggttttttttcattaaatgagatgtttttgtggtttatttacttacttcatcttaattttctttattagatagaattttggagcaaagttattaattatttgtttttttttcttaacataacaagctttggggaagtgtccccatgtgctttctttgttgaaccagcttgacacctaattatgcccaatattaatttagaatttatggcttcacaactttgtgaccaatctaagaaaatgtacacaccacatcctatccaaaaaactcaaactcaaatgcgttgttattatcgggtttaaatatatgtattggcgttgttggtgaaacggcgttaaattatgcttggaatttgaaaatgttgttgcaatttttataactgaagtttcgtaaattactaatttaaaaataagaaaaataaatggattggcacatattttttaaaaactatttacaattatagatatataattttaacacatttttctagataatagttattaatttattatcgatccatgttgaactaaatctaacaatggtaacaaacataaaactatattaatcctcataattacacatactagagaggtatgtcaacataaaactatatttagtaggcttggacgagacctacacattcatcctaataataattatatcaataatctaaaataaagataaatgagattagagttaatacattgaagaacgtatatgattgctcaatgtcaatttaaccaaacaatcgtactttgagctaagatagacgtttgacttcatcgtcaacatattagtagaatgaattcgacatacacttaaatctatggcatcgttcttagtgtttctgattgacatgccaacattatatctcgaatgcatcgtcatttgtttaaatctattttatttgttcaatctaataacattttaatacggtatactatactcgaagtagccttataaaataacactagccatacacgtatgtgtcgagaaaatcccatgtagcaaaaaaagcacaagtttataacaaaatagacgatactaacaaataaaagaacatacacgatataatacagtatatgtaaatttggggttataacattgcttccaagtgtagagtttggatcagattctttctactgtcttaaaaccacgaagagaatatgctcttttattcttttcttttttctctttttcgtcagtatttagtcagtcagattaatgattcgattgccctatcgggaaaattttgaacaactatcaattaacgtcctttattgtaagaaaaatatcagttaacgaacaaaaaataaaataaatagaaagcgatttgtaggtaaacaatacaatgaaagcggtagaacgaaaacgaaagcgataccaccatccataaccatctattttgtaacactatttcatatcacttcaacaccattttactatttttctctgattggtattatctaataggatttaatgatttctaatattattacttacaataaaaaaactttaattgttttatatgtaccaccaatcctatatatcctatatatataaactcatggattacacacatggtgcctatagaaacaacagtttaacatatagtttttttaaatgaatgaaatagtaaaaattcatttagcaacaaaaaagtgtagtttgattaatgcccaaacgagatcattttgttatcttataagcatgactttgttccactatcggtttcgatacttgcgattgaagaatttgagatatttgttggtttcttgatgttagggttttttgattttgcatccgtcccacttctttaggtgtaagcttctccaatctcaaatgtatgactcctttgtgtgtctactaagttcatcaacgtccacgagtaaacaacagcatttagggaatgggctaactgactgggttattgggcctgtgatgaccatgtatgggtttttctgattgaggatttctagaaagtatcttacggaatcttgtttatgatttttgtagatgaataaaacttccaattaagaattgggagcgatgttgtcttaattttttagtgtacaaatcgttaaatacaaaatatacaaagtacaatagtggttttaagaaatacaaattatgaatgattagtcacttttattttattgaagcaaaataggagcttcaacaaaataatggccaacacaaaaaaaatactgaaaagaagttatcacgtaagtgcaaaaaaaaaaaaaaaaagagttgtcacgtctgaaaagataaaacttaggccatgaatgtttgtaggtttttaaatgggttttggattttgaattttggtttttggtttttggtttttagtttttgattttcttggtttttgtttttggtgtagattttagtttcttaaaaacttgaatggtaatttttttagattttggtttttatgttaatggataattttttttttacaaaaaaactaaaaataaaataaaaaatgtgattttgagagatagcttttgagagagaaactcccaaaacatagattttggttttcttggaaaatttgttaaaacactcaaaaactagattccctattttttaggaaaaattgttttttcaaaatcttgaatgggtacaaaagagattttggaaaaactaaaaccaaaaactagtttaaaaaccacacccattcaaggcctaatttttgacatgttatatgtatacaaatataattcatggcgctatataacacagatcataaccgtgccaaatgaaggttttctgcaaaattttatcaaacgtatattgattgcacagacgaaagtaagaatattaaaaaataaaagttaatgagattttttgaatcaaaatcatatttaaaagctctaactgcacttgctaaatgaagattgttacatatacaaaagtaagactaataaattattcttgtaaaaaagtagcaactcgttttgggttcgtatacacaccaattggctacttgtttgttaaataaaaatctaccttttcagttattttgtttggatgctctcaaaaagtcataatctcttcattttcctacttgagatttgacccaagacactgttttctgtcatctgttaaagtgtaaagtcttgtgagatttgtctttagttacatgagtttctcttttttgtaaggtaatttggtagcaaaaatagtaaaactgtcatggcctgtttattggaagttagcaaccacacatcctaacaataatccgtaattaacggtcttatatttcatcattatatcatataattttgttgacaaagaaacagaagaaaatgtgatgagattgtttttgtgtaatatttttagtttatgcaaatggttgaccttatgagatttttttcacaaaatctaatttgagtttagtagtaattaatacttcagagcatgctcaacttactacttttaatattaacatattgaagttgaataaatgcgtatatcaatagattactattgtttaggtcttacgagagatctctgcaatcaagaactggttcaatctagttagttgcaacttccaagttattacatttatttatttaagccagcatgattcaacgtattttacgtgcaaagttaaaaatagaattagattattttatttcgaatgcttctaggaaagtctgcataattcgcaatcaaatcacaaattattatgttctttctttcggataaaatacaaaattttcataaaaatttgattattataatgttctttgttgttgttgtgtttctcaaccccttttcttcatcacaatcatgacttttttcttgcccaaaaaaaagaagaagaacatcatcatcacataaacagaggaatctcattatttcaggaggatcagaaaaacaaaacacacaaaagagttcaagataagaatcatctgtacgaaatacagttaattagtgtaagaaaaatcttagcactcttgtcggacattagtagctacggctcgagcccaaaacttgatctgatccttcatttctttacttgaatcctttggaaccctaggtggtgtagctaatccacttgcgacacgtggctcgaccagttggtcataacctttcagcctttgaatctctttggttgtttctacgctgcttaacgttttacgcagcgttttgggacttgagccaccttgtttgaccatagcagtgtcttctaatctcaagcttcttggtggtctctgcctttgattgtttgaaacctgcaccaatattccttttcagattctcaaaaactattttcttttacataagaatgaatcatttattacctttggaacataatgtgaactagccagggcttcacggatcaagaatcccattcttgagtcgctttcttgatcttcaaactcgtcttcctcgttatcttcttctcttcccatgttatttggcatcgtttgagttctttgcaaactgatcttgacactactataactactgctacttcctgttttgttgcttctagaactttcagtaatccctttgtctcgagcaatagtttcctttttctgcaagaaatgctcaccaggcctcgtcggttctagaaccctaatcttctcagagaactgccttgtcagcttattgatcatcttctttgcctcgcggtccatctctcgtttttctatctgaggcggcaaagaaggtgcccggatcaaaccacgttttgtggaagcttcttgaatcttccccggagccgaacgagatccagatttaggaagaaccacatgttccttcttctgcaaggaagacccaacttgtctctgttcttgaaccctaatcttttcagagaaccggcccgtcagcttcgtctgagatccgccttctctactatctatagaagatgccctgattaaagatcgccctgtggaagcttctagaaccttcccaatatctgaatctcccattttttcaggagaagtcgaagtagaagaagaagaggggtaaggatctgagtgacaataccttaagcctctcgaccttcttgtaaataagttctcaaagaaccagtaatcctcaagaagatcatcaataagtaactcacttgaacttacatgatccatttctttttcagacaagagattacaaaagaaagttaaaaagaagaagacaagagattctaaaaagagagaagttgtgtgttttataacaaagatcgggtcttcggattttcctttgtgggtgtgtttgtttgttgaagtttgttcatatctgtgttgtttagtaaacatccaatgtatttgaagcatcgattctggagatttatttggaagtgcccacatgggcagcctttcttcaattatttcttttataagttttttattattatctatgtggagtgaatatattggattttgcatagaatattttaaggattttcccggtgaaaaataatgctgaaattggaacttattgcaaaataaaaaataattacaattctagagcaatagagtcaactatataaggtatattgaaacttatgtaaaattagaggtatctaaagtgggtaataaaatacataattttggcaacaactataagaaataaaaaaagattcaacaaaactatgattgcttaagcgatgacataataattaatcaatgtcaggacagtccacaagccatgtgatttctctgtttatatacattagtatattttgtagtacgtagtctaatagtaagaggattttaaatatgtgtatattggagaatatatacgaagattttgattaattaaatcagtagagagagaaaataacaataatcacgagtactggatctccgtcaaaaagccgcaatgttaatctgtgcgtgacaagtggttcagttactgataagaacgaacgataatattatattctactatgaattgaatatattatggattgattgttgattgttttatttttgtatgcaatcacgtggatattattaataagttaagatactcaaaatatttggtcaatttcactttttccgtagttatacgcctactcttttgcgtgttgcaaaatcaagcattaatatggtatcatcctcttcaaagataatggaaatgaagaatgtttcataataatcctacttctacgtattaaaaagatacttatactaaggataataaacttacgccgcaaacaatgctattaaattttataatgtcagtttgtcacattgacattaaaatatttccaaaagtaaaatcagttggggttttttccctcccacttggaaagacctttcacatgatttgctctttggaattttcagcaataaaagtgttactgctttaatttctagttatgtgaagtctttgattacttcttatcaagaaaaagattctttgatcttacttgtgtccaaataaattggcctaataaccgactaatactttactgggtaagtagaaatgtggtagcaagtctctcccagaaaattccaagttttccatcattacgtgagcctattacaagtctcataagcattatttaattaaatcacaactaatttagtaaaagatcaacacgacaacacccactagactattttcttcaaccacacggtttttaaaacttaaaatcggagttgaagagtttacaaaaaaaaggttatgtttctacttctaacagtagctaaacaaattttccacttaagttacgttgaataaaataaaatagaaaatagaaattgaaacatacctatcaatttcttataagaaaatatgtatatacttatcacgaaagattataaactgatagaaatcgcatgccactcagaaagctcttggattgataagataaactctgaacaattcgtatgcaaattttgatgtctaaaatagtgagacaaaatataactttatataagatatagtccatcctagtgctttcaacgatccaaataaaaagaatagactatgttagctaatagctatgtatgttgtcgctaactctgagcacccattaataccacttggatatcttgcacgtgaaccttcttaacattccatgaaccatttgccatgaattacttattttggaaacaagtaaaacaaccatatcaaaatagcttgtgcgtgacatgcagtctttaatttccatatgttatgtaggctaaaaacaagatggtgaatcagggagttcactggtgcctgcatatataattaattatgtaaccataaaatgtaagacttgtaatatactcattttttcacacaattaatcgtcggtggaaaaataagatattcaggaagacatcactaaaaaaaaaataaagatctcaagtgcatggctggttcttggaagatcttaattagaccatgctttgaagttggtgtgaatttgtctgcaagcggatgacaaaacggtgctattgggagcaaaatgttagaggtggagtttttttcaattgcatttagagatgtaaactctaatttaaactacattaaacattctatcacatgatatagaatgtcatgattttgagacgtattgctttgaaatggtcgtatagtatatgactgagtggtcagctttctctaaatttttgaatgaatttagtttgcttcgatttaagtttgataaaaacattttttctccaatttaatgtttggttaaacttcaagacatatttgtgccgttattttaataatatttttctcttggttggacaatctcatatagagaatttaaatgagttcgtggctggaacaaaagaattaatgggtgcaatatataatgtcagtttgaagatccattacttgtttctttagtcaacatatgtggcatatcgactaaagcacgtaaaaatattcgtactcgatcaaaactcaaaagtgcagagttttctttttgtatagagagtgaaaggaaaattgaatgggcttttgatttgatgtaaaagcctgcggatacttccatttttttgagtaatcgtatgtgatgtttctttgggacacatgactcgtcgagattgtgtccgtccatttcttgatgcgattgtctcctcggatttgatgcatccatacgtacgctcctctctctttttcttttcttctttataggtgcttataagttttaaatttttttggtttaatatataggtgctttataagttcatactcctattttgtaaaaatctcatatattccaggatctaaatttaaccaagaaaataatacggatgaattttgtatgtatatataattgtgtttcagtaacgtaaggcacctgagaatttccaatgatgcatgctcagacccttgaatataattatcagtttgttatcatttttgatgtattcatcatcctcaaggtttgtcagaacatcatatcaatacgtagtagaattgctggagaaaaaaaaatagaataaagagaggagatacacttctcaatctttcaaaaaagttgtacgttttctacaaagaaagattccatatctttggggtttcttggaaaccttttttttaataaacgtaatggcacatggaactagttccatcctacagatgaagaactcatcaatcactatcacttcaaacacagtcattgattccaatttctcatgtgtaaccatttcacaatttaatcacaccaagtctgagcctagggagaaggaccagtcctccctggtgattcccaaacaaaccctagtttataatattcttctgttctttatgtcttaattaaatcattttttgttttgtaataattctaaaagcacttcacattattattttttggtaatacattgagctagagaatgcgtaatttagtaatgatgaaaagaaagggtttttctttacatcaaaagatgaaagttgccaacaggactgatgataaatatgctagctagttattagaaagctaacagagagatcaaaatctcaaagacacattctctagcaaagaatctagctcgatcggaagtgagaaaggaaggataaactgaataatcgtctcattaattcaacagtaatctgtacaatgaaccatataatatacagttatacacttacatatttaccaagtaaaacagctaactaattaacaaacagttaacaaaagaatggtaattaactaactagtcaaatattcgcttttagggatgaagaagactcttgtctcctataaaatcatactagttactaaagaagataagagtgattgggctatgcatcaatatcatctcgatagctaattctcttaccatcacatttcctcttttgcctatatttcacaattgtgtgtactttatataatacgtttatccgtatatatgtatgtacgagaaatataatgttcctctccggaatggtaacgacaattatgtagattgatattgtacatgtgattgcacgccttatgaccagaaaaatgttaaccatgctatttcatttaatgtttgactaatatgttagattagataagtagtgaaataacgagacagtcgacggtaccactttaactgggtttttttgttcccgaaaatagcgatgaaatgtttaaaagtttttacccaaaacaaacattaaaagttggttttagtaaattaataacatttatttttacacgtttttagtatattacgcagttttaattttaattttttggggttcaaagcactttatgttcttagaaacctgaaaatgtgtttttaccattaactacatatataatttctttttttagattaacaaattattttgtattatacgatatactctaatcagagccagccggtccaacgttatcaaaggtcctaatcataattattgtttgttgtcacttttgaatgtcataatcttataaacgaaaagaacatggatgaccaaaaaaaaaaaacgaaaagaacatgaaatggtaacgacaaagaaaaatgttaatcatcaaaaccagactacaaaagcaaatttttgaatccaaatctcatcatttcacccaaaaaaaattaaaacaccaattctaactttcaatgatctataaaattttgggccataatccttggtttatgtgacttatgcactataccggcctcgactccaatttcatatttagatagttaatctgattgtcatcttttgtgtgacggatggattcttctgtgtaacgtttgcatgcatgaaaacccgcggaaattaaaaacatgaatattcgccgcgcgctgtggcagagtcatcgtagcatttatctcactgatcctcgccggctcaggcacatccattgagcacgtgtcatgttaacatgtaatcatgtcattgactttgtattttgttgttggattaggaaactgatgaaatttgtcggccaaattaacttggttataatatcatatgatatcaagtccagtctatagtattaaggatcttgtattatcactcatataattaattagctcttatattcccgtaacttttttcttttaaaataaaacttgtagagaagcaaatctctagaaacacttgtgtggtctagttatcggttgagtgtaaatttaaaccccaaatctctcttaaaatctttttcgaacacgtggtgttactcacaaagattatattctttggttcgataatttaattatgtagatacagtttgtagtatagtatgtaatttaaatttgctatggcatgaaattctcaaaggtttaattattaatatcaaattgttttactagttttgcttttaggaaacgaaaaaaaacttttttgaattcaacgtgacatagaagtaattttgaataattaacacagactaatgatgatgatgtttatttcttttcgtaaattaccaatttaatctgtggacacacacaaaagataaccaatccattaatcaaggcgtaaagatccaacaagtaaggtgtgaagtgtcgactgttgaccaagtcgttaagaaaagaatttaaaacaaaaaacaatgaacgaaagtaataaaatggataatgacgtcactgtcttggtcttctcctgccgtcaaattaaattccgtctttacgaaactgaaaaagaatcgacttgacggtggtcccaccttcgttaaatttgcggttaaccgacgcgggtctccatcctttaatcttgtcccacgtgtctttattatccacgtggcataagagaatccagaataaaaaaatgtagagattttgggttttagcgttaggggcggctgattttagcttatgtcaccgtcaagaaaaacgttataacgctcttttgtcgaaacggcttacgtgatcgtcacgcgttatcattaaaacgcggttcctgagccgcgcgtcctcgtgattgtgccacgtttctgaagaattctcgctcggctttttgatgcgccgctgattctttgttgttgttattaaatttaaagttgatgttgttgttgtccgtaattttccagattctaatgccaatatctgcgtctctttaattgtgagaggagagcttttaatttctcgcttgttgttgccaatttatttccatcagaaaacacttcagaaaaaaaatgttcgtaacatttgagtatgatggcatctaaactaacgcactttatatagcagatcgtcttataggttgtttggtagtacaatcaagattaggaaaataaatggattcattgtgtgatagtatgtttccaccgtgtggaacttatgatgcattgattaatcactcaattttataaccttttctgttacaaacatgtgctttgccttggagtcttcctattctactagattatacttattacttaacagtagttgacatacaatagtcttctaaactacaaaaaaaatacaacaaatgtattcgatagtattctttttctttttaccaaataggcatgtaaaaaacgatcaattgggttggttatatgtcaaaatagggagactcaagacaaaacgagactcaaaactctcggttaaagaatgccaatcaacatgaatagagatgtcaatcattaggccgacagtaggtcttggtggcctagtcaggctcaagaggcagtcgatcaatactcattcatggtatcgatcgattttgtcgacaaaatggaattggcatgatgaaatatcgatcaattattcaacaaaataaattgacttgtcttgcctctaacgggctgttgattgatgcaacatagaagctatcgatcaacaccttcatttcttgtatttttttccttcagttttgctccaaaaactttaatcttgttcgaatccagtttttatctaaactgactctataaataccagagattctttataacactgaaaacttattgagtatattagatttagaagtttagtaaatattctaacacctcaaagtttgagacagaatttttaagttgatcaagttataacagtattctgaaaagtgtattttccaatcttattgatatgtttcattcacgatttttttttctcctttctcttatccctcgacgattgaatttaagatcagatgttttagcccgtctagccaaaatgttttttgaagacattggctttgtaaattatactcatttggtttgagcgataatcaagaaattactttacaatttaagtttgaatttggcaaaaaaaagtttttgttgtgcgtttatttgactagattatattatactttactctaactacaatcatatatatacattggtaacacgatagacaacatatataaaagtcttttaaactataaaagccaacatatatattccatagtattctttaaaacaaaaacaaatatgcatgtaaataatagatttgtctttttattgttgtcactgtagcgacatttttttccgtcactgtaacaacgtatattttctccacagaactaacaaattcgaatctatttgtttgatggtgttcatttttaatccaatgtacatatgcaagtagtagatatctctttcttttttgtatatacacgatatataaaatagttcactaagttataaatctaaaaatttattttgataatattttgtttaccaaataaatacacaaatagtatatatgcgttgttcgtcatgatatcgtcatatataaaatccactacaatataaaattttggtcattttgtttgataatatttatttttcaccagatataagcatgtaaataatagattttttttttcttgtcggctcgttaacgacatttataacggaataacggtatactaaagtacaaatttttattctattccctttataccaaataagctttcatggtaacatccgctaaattatatattgtcatcatggtaacatccgctaaattacaaatttcaaataatttttacttttaccaaacagaaaagtaagaaatatttttttgtcgacactttaacgatatatatatgtaacggtatataatttacaaattcagaaattttgttcgctatatattttcttacaaatttttttttttttgtttatgtgttaacaacatatataactacaaattcgataattttgtttgaatattttttctactagatacacacacaatagtttatattatatatatatatatataaatcttgacctaactaaaacatatagtttaaaagggtgttattagttcttaattaattaaaaaaaattcaagaatctgataaaatcatagattgtaaagaaatgaaagtttctaaactattattatagagttttctataatcttgttgattagtttttcacaatttctaaattttctcaaacaatctttcttttttaatgatacttttcgtaactttattttggaaaaagtgtagaaaatcataaaccaataacacaataatttaattcattgacaattatagattcttttgttttagctaaataatataaaatttataataattttataaaagtataaatccaataactatagatttatcaagattttaaattattttttacaaatcttaatattttaaatttttttaattgaataacaatagattctttataatattttaagttactaaaactttaattaaatcacaaactaataacactctttaatagtgtatactagtattattgttatgtcattatatagatttaaatccgcatattacattgctttaataagaaaaattacttaaaattgcaaagtggcgatataacatgttttatagatttagtacaaatatgttcctagtttaaatagggataaatgcagcaaaaaccaaattatattatattcttaataggcagtaacttaatttataagattgtgatttgtgcagtctttgttacaaaggtgaaaaagggtaataaataagattcttttggagaaagagaagtgaacacgtggcaaaacataagtggatataataacaaaaaccagtttttatatgaaataagagaagcatgagagagagataattaaaccatctctcaaaatggctttgactgttcacaagaaagctccccaaaaggagcgttgctttactctcctataaaaagaagctcttctacttcttctcgttaccacaaaactctttcaccgatcttctcgttccattcttcttcctaattacaccatgcccaacatcaccatgggtttgaaacccgacccggttgctccaacgaacccgactcatcatgagagtaatgctgccaaagagattcgttacagaggcgttaggaaacgtccatggggaagatacgccgctgagatccgagatccggttaagaaaactcgagtctggctcggtacgttcgacaccgctcagcaggcggcgcgtgcttacgacgcagccgcgcgtgactttcgtggtgttaaggctaagaccaatttcggtgttatcgttggtagtagtcctactcagagtagcaccgtcgtcgactctcccacggcggcacggtttataacacctccgcacctcgagctcagcttaggcggcggcggcgcgtgtcgtcgtaagatcccgcttgtgcatccggtttactactataacatggcgacgtatccaaagatgacgacgtgtggtgtccagagcgagtctgaaacgtcgtcggtcgttgatttcgaaggtggagctgggaagatatctccgccgttagatctggatcttaacttagctcctccggcggaataggccgtgagttttttttttcttatgtcgtttctttagacaaaaaaaaataacgtttcctttttttttctgcctaagaaaaaaatattatccgttttttagaagaaagtgtagaaaagctccaatataatttttagctgccgtgaaaaaaaagtcgttatgtatatattattatgaaaccctattataaatcgacgtaacataagaggatcttaagctttttttttttctttagtatttgccaaggaaatgcatcatcgtaaattcgtaattgaaaagataaagtattatagagctttttggggctcgtgtgtagaagaaatagataaagaatggtaatgttattattataagactaaatatagtgatgagtatcgtcgtcgtcggcttgaaaagacaatggtccaagtgtcgtgaagacacgcaccaatcgtgggaggaccggacccatcttctctggctgcggcgtacgttagaagaatacttctttacgcttacgtcattttcacagtttggactgcttttctaacttttgacttttgtgttttgcatcaactcttttaactccgatgatttattaacagatggttaagagtcttgcttaagttgaatagtattcgatttgaaatggtaaaaatgttttaaggaagttgaagataagaagagcggcggcttcataatgagagacaaaggaaggatgagatttgattttgattcttgtcgccaactttgtgatcaaaaaacgtataaaacagttatgctctatggtcgcagatccaacggctggaatcgtcatcgttaccacgtggacgcttaacataatttaaattcttatttcatatttttttaaagaagttagtatgttttaaaatatatatatatgcatgcgtacaaaatcgtgttaagggttataataaagggatgtaaaattggggcctctagaaagttgaatagtttcaattaagcccttatcttaacgacatttagccccactcaaccaaatatacacccatgtcatgtcactacgcacaactatggatcactcccataagtagatgttttatatcaattgacgattgcaacttttttacgttacaaatttaatgctggaccgaaggctaccatactaggatccgaaagcccgatccacgtgtggcgtcatcaggacaatgtttgcgacacgtcggctgaggtgtttggcgcggtgtttatgataacggcgtttacacaaacctctgtttatgagctctgtgactgtgactgtatgattttagtaaaataacgaaaacaaatactaggtcctttcgttctttgaccatttctccgaccaaaaagggaccacttactcatctacgtatattggataatacattgtattatcacctttaatgaatacgtgtcctctgtgaagcttcagtgacccaatgagaaaacaaaaatgctgatttagtgtgaccccaaattttatttattttgtacgtaaacaaatgttttcgttgactaaagaaactttgccattgggcgatggccttttattttggatgaaaactcaagaacttttgttttgctaaatttccttgttatgtttaggcctcaaatagaaaacttagcaaaactaaagatcttgagttttcaatttttcatcaaaaataatggtccttagtcttttgagtttatattgtgagaaagagagtcacggttgctatttatttctttgtatgttgctatttccagagtaacgattgaaagatatactcaggttgggacttaatcatctaaaccaagaccgagctggtattcctgagcatatgtttgactcactacaggtcctctcatggtaataacccttgttagtcaatttttttagtttacagctgcattgagttgtctgattcatgaaccacacaagttgccacttttgtagaagaattaacaacaaaagattgatgacttttgtcatatgagagagttaagagaaagaaaaacaaaaataatgattatgagtactggtatatgaatgaaatggtaagagtgattacatattatcacagataaaaggcaagcccttaattatacaactaagaatatgcttcctctctaaaaaaaaccaggaaggaaaaataaagataaaactaaaaaggccaaaataaggtagaaaatgccaattaaaaaaaaaaaaacttaaaattttataaatacaccctttttctgaaaaaaaattatacacataaataccaaaattcaatgcatcaaatcaatgtaagagacacacaaacaacattcttatgttctgtcttctgtgagtttctcaactttggttaagatcacgcgatgtttgacctagccatctgcaaaacacagaaaattaaataaacattgtaagttattactcagttttcgtttcaggagaaatgtttaatgctaatcacatcagtcaaaccttgagaataagaatcttgcaagtggactaaagtttgcattagaactaaattctttgctagcttgctttcttttgttctctgcatcattgttcattgtcttagcgaacacacggatcgccatgtcttgcacttctttcactgacacttcctttgtactgtatgaccattttcgagtttcattagatcaaacccagtattgccaatataaaacagactgatactgtatacacaagtgtgtgtatatgttcttttatagttacacttaccttcccaactgttcgatcagtttggcaataaaagcttcagaagaaccaggcttttcgcgttccattttaactaaggatctcgaaactctatgtccaatagttccttttgagtcgtcacccccaacagcctatattatttgcagcttctaactcaagaccgaaacttttttttctctaaattgaagatgactcataactcattgagagaagtaagatggcaaatgtgagcgtagtttatagcttacctcttttagggatggtaatagcaatagtgacaatgatgcagacaatgatgccaatttggagtcatcttcttcatcatcactcacttgttgtgatctcatgactggtctttgtttatcagaatgatcgcgggaatttctgcaaggtaacagctttcatgtcagaaataaccagacaactccttgtgaccagcagaagccttagtatacataaacacactaacctcaagtaatcagaattatctgttgcttgctctcttcttttgttaaccttcccattaccaagtctttccctagcattccctcttctgaaacctgcttcaagtgctaattttgcctgaaagaagaataacggaaatgaataagaacacaggagaataacttgtaatctcagagacaacttcaaaagattaagtttcaaacaacctctgcaagatttgagatgctatcctctgaggcactggaacttctttcttgaagccctagtctagatctcggtgttcgaggtgatccagaatcatcattctgcccacggacaacaactgttccacttgtagaagcatcatcaaaagacgtatacctggtagactacacagaagaactggaattagacatactaattgttggaacagaatgataggaccaaggcaaagtacacagacttgctttataagttgaaaaagagagaaagaatttccaataccccagagctttgatcacgaaacattgaagatgactgagagcttctcggcgatcttatgacaacagttccagaaccacttgaatcatcctgaaaattcagaatgacaaggatgagaaaagtatgatcaacctcgatccagttctttttattctgaagatgtgataatcctccaagtgaaagaaacttaaatcaaattgaaaaatggttaacttgaaacacagcagatcatgatatatttgtgaagttcaagaggattttcccgtgcaatgtctgctaataagaaagaatgggactgcatctaggcacacaagaggcaaaggaacttacttcttcttgatagtcattctgataagaatctcttttattaaaacctccttcagagatttcagggacaccaaaagtggatgacaattgactaccactggttcgtgatgttttttgagaagtctgattagaattaacttcttggcgcctttccctggcttgtggaggttttaaagctcgaacagttccagcaccctgcgaacccccaatgctaaagtcccaccccgcatttctgacagtttttacctgaaaactgtagctccaagttcttaagattttgacgaacaagaaagagagaagaaatcccaagaatagaccatttatccaaccatttatccaacctagttccagaagttccctggcctctctcatctttagccactctaacagtcccagatgattcagccggagcttttggaccgtttgttggaatctcttcgtcctcttttacttggtattttggccgctctcttcaaacaaaagaaaagaacagtattagaatcatcctgttctgtattttcgtttggcataaagcagatcggaataaatgaatcaactgaggaaacaataaataaaaaaacgcatagttaatgtcacacagtcaaataagcggagtaaataaactgaaaccacaaaccaacactgttgggagaacaaagatcacaccttattctttcaagtagtttcgggcttttcctagcattctttataaatctatgtttgagaagttctttggcatttggtctctgaaagtataaggaagagttgtatgagagattttggcatgtcactgctgacaataaagatcagagattgcactacaagtacaagtacctcagccggagcctttttcaagcagaacgaaacaaattccttcaaaggacgtgaaaaatgctcatctaactgtggaggatataaacaagttaaatatctagctctgaaaggtggcttcgcaatcaagacatatggcagtattaggttcgtctcaaacaatgcattccaactatctaacaagcctttctcgtgccaaaacaatatttagaatatgaaacctgaggagggctttcccggggaatgataaaaagcactctcataggatgaaggtcagcaaggggaggttctccttttgccatctctatcattgttattccaagagaccatatatctgcctggaaaagaccagaagcagaaaccgacaaaattagaaagggctagaaaacaagtaaagccagggtatacacagaagattgggtaaactagaagaacaacaaaagctacagcagatggacgagataccttctcattataaccttcggagttctgaatcacttctggtgccatccaaaatggtgttcctacaaatgtctgtcaactttatatcattagcaaatacagtccgaaagttgtataataacaccaaaccatcacaggcgagaactcaacataataaaattcttaacaagttcaaacatttgaatgacaagactatggaaaagcatgcacaaaattctgtgatgtagtgcatgggaactggaactgcacaaagccacagctataagggtaataaagtgagtgggtctataagagcacccctaattactggatcagtaagcacaataaatgatgaagaacgaaacacgatatagagtcaggagattcattagtataataagataagtacctttcgccttgatatagtccgggttaattgtgcagaaacaccaaagtctgcaacctaatatgcgtgaaagaagttccaactaaaccactcggatataaaagaaaatttaagaaattaatcaaataagtttaagaagtagaaaataccttaacatcaccgttctcactcaacaaaatattggcggctgcaaaaataggaaaaaaaaatagtcatgcaataagcgatcagaacacacagtatcatgaaaagccataagatgttaaaatatataagtagagaaaacctttaatatctctgtggatttttccctcagcatggagatattcaacagcatgaagtaggtcgcgcgtaatacaagcaattgaaatttcatccaatggattacccggttgaagctacactcgcaatatagttttaacagattattatttgcaccaacgagaattaaaggataataactccacagagatgtgtgcatcactacacaaacaattttatatctcaactcagcaaagaagtgaaataacatacaaggtcagcaactgagccaccagccatatattccatgatgatccataacttggtctggtgaaggtaagaaccatagtattcggtaatatatgggcaacggcattgtgacaatactgaaatttcctggggttcataacagaatgtgaacacgacaatcttgcacactactacttaccaacaaaactaacgtcaattcaagagataccttctgtatatcttcaatctcgtcttctctgtcacatatgaagtaaaagggctagttagaaaagggcactgagcattgtggtattcttgagacaaggatactacagctggaaactagagctattttatagagaaaaaacaaatgtagattaatgactttaagaatcacaaacaagtagcatataaaagattacctttgttcaatttaattacagagcaaacgaaatactatccaaaaattttaagtggagactacatatttgatactacataagactataaaaatacaaatacttacgattcttccagatcaataactttaatggcaacgtctttgttaagctccgtatcaaacctgatacgcagaggcaacagctcagcatataaataaggtagacgcaactaatcttagatagttatgattggacaagatagtaaactaatgcaaatcagattccacaaagaaacacacaattttcagttgctttctagtgggtcagattagtgctcacatatcagtattgttgtgtgataaccaaaaaagatgctttcatgaatatttatattcaagatgaaagcacatctatcagtcttactctattctttaaaagtaaagaagctactgactgcaaaatcttaagaactcagaatgaattttcagatacttacgctttgtagacatcaccaaacgatcctcttccgattagctcaaactggctaaatctggttccagctgcctcttgtaaaccagcaacatcatccatttccacaactaaaaccaccttcttccccctctgcaaatacttgattacatcaataaattcgccaattacaagcacaatctcacttgcaatcaaattcccaaaattgagtcaaccctacaactattacactacgcattcccaaaaactgagatctataactaaaatctgataatcacaatgcatatagactctttactcgattcaagcaaaaaaaccaaagactaaaattttttcccactataagatagcaaaaatttgaacatacacgtaatttgaaacgccttcattgaaatatctccaattcgatcaatcaccaaagcatacaagtccaatttcttctacgataacgatgtcaaaaatcagagaaattctaggatcgcattcagattaccttatatagttgaacgaagaagacgcgttgaatatatacagatcttacttttgttctatcaccttcccaagaaaattctctatccaatgcttctcgagcaccaagagatcgagaagatgaacaagaacttcgattatcaagttttctcgattttgattattcaatttttcatttttttgttttctacttctgttttttttttttttttaatttcctaaaaacaatacgaaaaacctttacgacgacccgacccgacccgacctgaacttcaccagtttactatccaagtaaagataaacgacctggcccgagttatcattaccgcttagtttaacgtagacctaatcttaacaagttataagataggcccagcccaaactttgacgagacattgattttgtgattttaattatttttacgattctgaatagtaattaattattatatgtttctaaattttaaagtttttttccttctaattttaaaagttttatgattttattgcttcttaatctttcatcaataatcaaaagaaaaaaaaactttgattactctaggtatttttggcttggagttccctagttattttgatcatgtttttacatcgtcactaattaatcgttctctgtgggtttttgaagagaaaaatgcaaaaagacaaacgttaatttatgtaagataacatcgtttggattgaatttttttgcaaaagttttgtctcaaatatttttttcccataaagtttgtttatattagcagaaaacacaagcaaatagattagagaaacattgaaattttgattatggacatttaataatcttctttttcacaccagcatcatcatttacaagtatctgatgaggctccattgcatgacactccctgcaagcaaacaccaccgcctttagaattctcttccaccacttcattaacttactacttattcctcttctctcctccgccttcttcggcttcttcctcctcgtcgacttctttttccgtccaccgaccttaatccctcctcccttacttttcaccgacccttctcttttaaagaccggagttatatgctgccaccgccgtgaatacgacccgtaaagctgagccgttacaatctccgtcgctttcttcctcttgcattgcggcaaatacgaaaccttatttgtcgtgtttacggctttaccattttccaccggtggtctcttctttagatccaatattaacgatggtttgtgatagtattctttgctgatgcaagtgtttgttttctttgaagaagttgcgggccttaggcacataatctcttcggaccgagtaccaaaacatgttatattagtctctttcccatgaccggtactagaacttgtgatcttgaagatattacaagtgcttgttcttggagtgtaagatgtcgggctgctactatcactgcttcggctgctccaactatcgctccggaaagtgttttcgctggtagtacgtgacactgaacgtgtcgttatcgtgctcgttggaaaagagtgtggtaatagacggccgttgaggaaaagatgatcagcgggagaattttccgagaaggggtcttgtgatggagatgtgggagtcaatgatccaaactcgaagtctgatgatagtgacgtctccagggacgtctctggtttggtctcgccggagtttggggtagttttccggttatcctccatcttcaaaacgtttcttacttgtgtgtgaatgtgtttaactgtttattagttgtgtttttataggaacaaagttaaagctgtacacgtggcggaatgagtacggcagtcaaagacttgccagatcagtgtttgacttttctgtgggggcataggaagaatgagatccaagtgaagtaatggatatggtgttcatgtcatgattttgtctaaagtgttgtggatccctaaacgatcccacatgttgcatctataattagatttttaataacgaggcattgtctagataatttcataaattatataggtaacactatacaaaatttgatattaaattagtgttaatataatagattatatttgttgtttgatgattttttttttaattgaagtctacagctcacagtcagagccagaggtacatactctttgaggttattgtagtgagggacacggtctcccaaaaatactcttataagttttagcagaaagcaacaatggctttatggaagtttattaaaaaaaatagttaaaggcaactaaaagaagagaaaacaaattatctactcgtaatctaaggtatcatatgcaaatggaatctatagtgcatatggatttagacctttgtggtctagattgagacacactttattagtacttttcatacaaaaatacacacatttgcttagtgatcaacttaaaatgttatctacatttatgcacatctaagaaatatgacacaaaattgcttacaaatgaagatggaaaaaaatattactttaggacttacgcgcaaaatcaaatatataattttcaatatattgatttaaagttttgaacacataatatattttgaccaaaaaagatacgaacacatcatatattatcaagaatatttttttacaaaaatataaggcgcattaacgcatatccttcattagataagatattcgagttatggattaaccatagtaaaacataatgaacgtagtgatcaattctttctcaatccttttcaaaactctatctgatttttgtctcttttatccgatcttacgagatcattactttgacactttgtaccttactcaacagacattttcactatccaatacaatttttttgtacagttataaatccaaacttctaatcatgactaccataatcaccagcttccaacaaaactagtggaaaatttagctattttttgcgtatcagtttaatttatgtatctatctttgtataaaacaaaataaaaatctaaaatatgtaatttggaaaatggagagggagtgatattttgaccataatgttccacttaaccctactaattatactaaagcttagtcacaaacacaccaactgtatttattattcacaatcttaatgtttgttccagctgatatgaagaagaaagtacactaaactgaagcaaaattaaagacaaagatctcactatgtggcttgttgtctcccattcgggtctttctttaggacacatcactggcccattctctagggattagttagggaccaccagttatcattaacacccatgcttaataatcttttactttcctttttattgtatactcgtcgattttgcttaaagtttaatgaacctttgacgtaattatgattcggtaattggaagaagttggttgtgtagtttacgccaatcaaagaacacacttaagtgataacaaaaccaatacatgcaagtagtttctatagtgctatatattatgcgttgttggtttcggagttataagcgacatttttgttttgtagtcgtatctatctgcagcacaactaaatcatattcgtttcgcagtcatcgacgacatcgaaaaactaactgcgtttagttaaaatttaaaatgctaaaaatgttaacgtttaaaagttttggacactagtcgctaaaccaataacaatataagtatataacaaccaaaatattaaatttttgttgattattagattaatcatttttggtgattaggtaaattcactaaattgctaattgttgtcgtttgtcattgttgttgtcaacaataaaacgaataaatttttattttagcataagcaaaaaaagagaaagaaagaatcatttcgatatatgataatgagataaacccaccatatgtttgggcttaattggcccaattaggacatattctcgttttcctctctctcgctatctcttgttgcattttcgaatttggctaaaattagagttgtgaaataggcagttaacaaaattgagaatattacgtaattaggcactttttggaaagttaattcctaataagacactttgaaaagatcaaacactttcgataggttatttgactcatttaccctttaaatatatttcttttttgtttcattttatttgtctctctccttctcctctcttttctctctcttactctcacaatcaagcgaagaaaataaaaacttttaccatgattttgatctctctctccccctcttcccatcatcagttaacttatcagttcgttcctcaattttgttataattgaatttctaggattttgttgaaatctgagattcagattttgctctttctctctctctctttactgcaaaattagaatgaatctttgctctctgggatagcttcattaatcaagtttcggattacaaaaacgatgtgaagcaatctgtcaccatcttaaggcgtaacatcaagcacatccgcgattggctcgaaaaagaatcctccgctaccttctcatagttagtactctctctctctcacatgattcctattgattttcatgtcattatctacaattctccatctaacacactaagcacatgtgttcatgtctttgatttatgtcattatctccaatgctccatcttacatttcttcaaatctttacttatatcttagattcgttctccagttaattctgggtatcaatttgatataagaaattgattaaaaaaaattgtttccttttttcattgttttttatgtttagcatctagatctgcaattgatattggtcgaatttcgtaaagatcacatttttacgatttgaattattccaaaagttttcgttttttttcccatcgaatctgattctggcgattatcgttcatatataaacttgtgtattgaaatgaaacgaccccgtgagtcattagatgaccacatggactaaacctgttggacgatcatcaatggacacatgttatctttgatttgctgtgaatttgttttatctctcagtaaaattatcactttcttgtttatgcttacaatatattttatggtttagagttttgttttacgattttggatttagtggataagtattaggaattgagggtttgggtttaattttagggtaaggaatgtaggctttagtgcagagccttaagggtataaggtttacacaccacaaaccatttgcttgtgtcaacgatattgtctcatattctaaaaaaaagtttgttgatggaccttgtattgatatatataaaatgaattgtttggataagtttatgtggacaatatatattggatacgttaatacgtaattaggaacatagtttaatatctgatatttgttcggcatatataatactacttaagctaaaatatttttatttgatttcaagcatttcatataatgtttacgtggacaatatatattggatacataattaggaatatagtttaatatatgatatttgttgggaatgtataatactacttaggcttaaatatttttatttgatttaaagcattatatataatgcgaactgtttggatatgtttacgtggacaatatatattggatgcataattaagaacatagtttaaaatctgatatttgttgggaatatataatattacttaggcttaaatttttttatttgatacaatatttgattaaactaaatttttacagatttgacaattaatttttaacttgttatctccatctaatgccacgtatattgcttttagtaattggcaacaaaattaactcatctacagttttttttccttctcacgtttgtaaagggtaaattggtcacaaaatcaataaaaaaaggtggaaaagtgctcactcactcaaaagtgtcccaaacgtccaaacttttgttataagtgccttataatggaacattcccttaaaaattctacctagtgaaatctctccaggaaagaatccgtcaaggtctaaaaccactcgttactacttgaatcggcgcatttagttcgtctttctttgcctctttgttgtttagttcatgagaatcggttcatttgataggatcttaggtttaacatgatgtttctctaagagtagttattaggaatttggagtagtaatagatgttgggggttaatctgataattcatgtaaaatctttcacttaaatgttaaaacttgttagaatttaaagttgctacgattattggttgtaaagatcatagcagaggatgattaggtcggttgcaaattacattcatttccaattacttgtgcagttgtgctccaaatttgtttgagaacatctcaaaagtcacattttttcttgtttaataattaatcctgttatctctaactttagtatagtcatatgtatttctgattcaaaatcaggtaatgttgcaaactggtcatgcatgccaagggaataagataattattgatgacgtctaaggagtctctcatcatagcaagtgatggaccctgaaaggtttgcttccactataatctactctcaacgatttactaataatggtaggtgtttattcaaatattctattctactactatgttggcaaggaaaagctaggatgatatatctccttcgtggctctgaaacttcagagtgaccgtggcttttggttagtagtttccctgtgcttttggataagtcacactccttactcgtatctgtattcaaaacgtttaccagttagcattcacacatcgactaggtagaagtattacacatatcattagccatatctttgaaacatacaagataacactcaaggttcaagtatagtcttagcgtttgcatatagctgataacattagagagtactagagagagtggtagttatttatttctctataacattgttagataccacaattttaggattctaagagagaagtttagatgacagaagagagagagcagacagcttctctatctaatctgtggtcgcttgaatgatgagtttggcataggaagtgtcatctctacccttgatctttcttgattctgcatcaccacctgaccattgattcctctccgacctgatccttctccataagtactctcaccagagctcttccttcttcgctcattgtgtccagctaagcgcctcctgcaacttctcttagcttcatcaaactcttggaggtcatgaaacctgtttcaagaactcaaaaaaaccattcaaagatccagacaaaaagttttttgaagggtaaattaggttgtacgttacctactgcattgttgacaaaagcgttggttaagtcctgagagaaagacagaagatgcctttgcatgaacttcacacactttgtgtctccggtgatacagttttgcctctttcatatcagctgtgcatctatctacttggcaaagccgcaacgagccaccacgattgatgctacctctagaccctctaactctatccctacctacttcctcttcttcatccgtatcagtctccatatcttcttccacaaggtaagacttctttttcatgtaaccttgtccttgtgatctcttaccctccattttggagtcttataaagatggtttgttggaggaaggaaactctaataggttaagcaatgtttgaggaatgggacttgatgatattgttgacgaaattgaagggtttaaaaggtgaagtaaagtcgggagatggaccactgtgttcttgtacgtttctctggtggaataagtgcatgattacgttgatgtgctagctcagaaaaataaaaattaaagtttgggaaagaaagaaaaagagatttacatagataagtattaaaaacattttcattagtttgtttgatttagattcaagaaataattgatagtaatatgaaaactaaagatcagttttcctagtttagtgtttgaagttcaatctgaaaatttgtttcaaatttaagatcttttttaccatgatgatatcattggttgcctttaagaggaagtctttattggcctgccactgtgtgcaatagtacatcaaggtccataatttacacataggcttaaactcataacaatctttttgttgtttaggaacaaaacaaaaagtactcctaataaattgatgtgactattgaattcgtttgcttgcaaccttgaggtcttcttttggtagactcttattggaaatgcatttaccgtaacttaggatctgatcactgtttttttgtttgatatatattgttttttagacatggataattatcacgtgtatggaccaggacaaacaaacgaatagagtagatgcttatatacgatctaacccttttgatttctttcttgtgttaacatttattattatcactattgcttatataaagattctatgtagaagtggaggaattacagattgaaagatggaaatagaacaaatgagatcacttactttaattaaagtgttgatgcaatagatatctggaaccattttaagacagagatttgttgtgagttctaatgcatgtttttcttttacttgttatcaccatgaaagtaataaaagcctctcacttttaccttcctttcttttttacagtgtgttgtgtggagaagcaatcactgacagattccactggcatcatcataattaactctctgtgaatagtcagtgaaacaaatgaaagtaactttgaatctttgagttgaataggtaaaaagaaccaacaaagcaggaaacagataagttcactgatttactcaagtgtgtaattttccttaaacattttacagtgttgttgtcttattgtttctgaagtactagaattagtgggtagtgaaagagacaagacacaaaggtttcacatgcgacattgtactctctctgactttctgccttgccttaccttgccttaccttgcctgacgcaacttagcttttccaaagccaaaagctgcctttttttttttttttgcataactgaataaactttgtccctatgagtttccggtttgggttgttcctgaaagatttatttaggttgattttcaaaccagaattagattgagatgtaataaacaaattaaatcacacatttctatattcattaaacattataacaattcggtttcgatttacaattgtttcctttgttttctgtttgtgagttgtgactgtccatgtgtcacatctctcttatatatgtgcaattgtaaaatttgtgtcataagtaacttacataacctatgggtaaaaacaagtgataacaatgattcacttcttggaatgttataatatgttggaacttgaaagtttttgttagtgtaaataaaagtggtactcttggaatcatctcaagtaaaaggttgatattcaagttttggactatctaacaaaaaaggtgattccaaattgtgacctggaaactttacatatgtatatgatccacgagaagaagaatatatattaaaaacagttttttttatataaaaaaaaatctttcaatctgagtgataagagtattatggatgatactaatttgttcgcattaaaacttttacaaatgttggattctttcctttattcatattctgcatttacttacttcgttcccccgcgtcgctctttttacgttagcaaacaaaacggacgtaactatccgtaggaccttgtccgtagctacacacctccattgattttttttttaagatgcctttggttttagaatccaaattatatgatttgtcgagctcagtgatcaattttgtcaaatttatgttttgccacgtatcaagatttgcatgggttataatatacaactagccagttaatagaatttgttcaagacatatatcatcaagatttgcatggattatatggctagttaatatttttattcgaaaacattttaaggtatttaaaactatatatgcgtaaatattatattacttctctacaacgtgtataatcatttagatcaaactattaaagatttctagtttaggtgcatatttatattttttataatgtttattctaaatgagtcgaatacattatacatgaattactcatgctaataataatcccagaaccggttacaaatttatggcaggccttactcaaaagtcaaaattataatttttgtaatcatttttgaatgtaataagcttataagtgaaaagaacgtgagaaagtttcataaaatttaagtcaaaaaatcagaacaaaaacaaaacaaagtttaactttcaataacctataattttttgagccctaatcgttgattggtttatgtgacctctggaccggccctgaataaccgtgataatcatacttattaattaaccttcaatatagaaaacaaaaaaataaaaccaaatatctgaatattggtccattaacttttggtccactatccacaacattgctagagtagtaatcttcaacaatactagagcatctttgtgtatgcttgtgaaaataaagttttggaagtagtaccaacagatttcgaatcgattcctgtgagtgccaaaagctatattattactttcgatcacacgaggaatgagatttgtctcttcgtttataggaatttcaacggaacaaatcttcttctcagattctttcatatatctaactatgcgatccagctatctcttttacatacaccaacaaaactatatccatttgcattctcatttcttacgtcataaatatttacacttgacaaaaacaaatttaaatttaaatagaatatattccaaaacgccatcttgtatttatccgatgttcaaaattccgctatacgctaatcgaatgtttcggaaaaaccttatcaaaaatccccctatgataattcaatttgaaattaattttgatacgggatttgatttttttttttcttataattaaatgatgttttttaaaaaaaactgaaaaataataaatacattaatcgatgcttaaaaatattaattagacagacgtctaaaacatcttgtaaccaatttatttctaacattttaaggaaaaaagaagaagaaaacaataatataatgagctcgatgatgagtgacatggaggaacatctggatttatgcatgtggacacttactattatgttatgttgtgtctcgttacgccatcaagtttcaccaaatctttttgtttttttcttgtttttcaccattttttttttctttttatatgtttgtttatttacatatatctcctatacgattacaaattacagataaacccatatatttctaacagagccctccttcaattctcatgttttacatattctcccgaatcccatatctttatcggctttcctgtataaggaacatcatttggccctgtatggaattcagtgtaataaccaagtttccggattagttaagtcggttctcggttatggttaacgattctggttcaattggttagtatactcgattgtgacaaacttttccaatcaatgaagcagaactgagcttatacaagaacaatttgacgtttcaagaaaattatcgtacgttgaaattgggaataaaacaccagccatgttacatgagaagagaacacatcatagagacaatgatcgttcatttcattatagagaacgagccaccgttttaaactcagtcaagcaagattgaagaatcttttgacgtttctgaagctgttggcgttcgttttgtagtaccacaatggctccaggagcaacgaacatgtccatgaacttgtcgtcattcactgcaaatagatccaatccaagtgccaccactagtctgtctcggctgcaaaaacaaacagaatatcaaatcaaaatgtttccttcctctactaagaaactaaggacattcatcaatagaaaactcaccaaggagttagaaatcctgagtttagagttgatgttacgcttctttcgacaagcacttcgcgaattctagcaaaatgttgtgcggctgatgaacatatctcagagtaagcagagcttgatttcattccgttatctgcattagcaaacataagcccaccattctgaactctaaatggctctatgttcctgtttccaaccattctcgccattctttttctagctccaacaccatcaggaccatttccaatttctttctttaccaaaccatacactatttcacatggttggtccggtgaaggagtctcagggactgttatgtggctttcccctccttttcctggtgttgtctcttggccattgttcttctcaggaggaatgttttcttggtctttcattggctcatcacggctggtatcagagagctcgaagcaaaacgaattaggtgaggcttggttgaatttgttataagcgccaaaagctcctccttggtggtagttattctcatagcacgccatggaatatggactggtcactgaatcaagatggtgtcttactaattgcttacactgttttgcaagattcttcacaaaacggctgtaacagttccgtacagcggcatgaaaacccacgtatccatccatattttcggttttcttctcatctgcaaagaccatttaatcatgaaatgcagggacactagcagaatttaaaagatccaaggaagcactgaaaggttcttacattctgagttttggttcaggtttctttctagagcaatttcaaagagacttcctaatacaaaggcaagtctgtcgcaggctgtgtcaagaagaggagcaagccatgaccgtgcagcggttcgagcaatttctgctgaagcttctgttactcctctaccacctccacgcccagcatgagcaagcagaatgtttgctacctgctcaattcaggctacttgtttagctttttcatttctatgaaaaagtagaaaatgctatttactgagaaaaggtgaagtgtaccttctctcttgacactggagggcactcgattgagtaggctgcacaacggaattc

SEQ ID NO: 89 - DNA, 85413 bp, Arabidopsis thaliana
aagcttccttcccacagctaatgaggttggatatacaaacgtttctcaaaactctttaccatttctcaacttatttggttgcttagatcattctgatatgtgcagttattaaaccaaaccgatgaagggtatagcgcacctgaagtatcaatgtcaggccaatattctttgaagagtgacatttacagttttggagtagtgatgcttgaacttttaactgggagaaaaccatttgacaggtaaactctattatgatccaaactaggcttgatgtatgtagttgagaaatgtgtttctgtttgaatcttacaactggttataatttgagcagcacaaggtcaagatctgagcagtcactggttcgatgggcgacaccacaacttcacgacattgatgctttagccaaaatggttgatccagctcttaaagggctttatcctgtcaaatccctttctcgatttgcagatgttatcgctctctgtgtccaggtaaactaatggtcacaaatcgagtcttgcaaattcaagaaagtcttttactgattttgggtcttgtttcttaacagccggagccggagtttagaccaccaatgtctgaagttgtgcaggctctagttgtgttagtgcagagagctaacatgagcaagagaactgtcggagttgatccatcgcaacgtgctggtagtgccgacacgaccagtgattacatgtaaatgcctctaccaagagaaaagacaaacactttgctccgtcggatgttaatcatagacaattggaagatagaaaaaagcaacctcatacattgtataatcccattgttttattgtaattgtatgttccaaaggtgtagcttctagatcctttacatgaacaaaattctttcttgtaatcttctacattggttctatttgggcttggttcaattcttgatcatcaacttgttatcaatttcaaaagacgtgaattcacaaaaaaaaaaaaacttaacaaagaatttatgaatccaaaagtagtagacattgaagaagataaacccgagttactggaataagttgtgaaacaagtactacaaaagagcttgaagggaagagacacaaacaaagaacaaagagtgtttcggagttttatttcggagttcttctatctgtctcaatctctctaattgtagaccatatacttgggagtggcactgaacttttggtaacctttaatgactttgttcactgcgtctagaaagtctttctcagtcacagtctttctcctagctctgattgcgtacattcctgcttcagtgcatacacttcgaatatcagctcctgcaaaaagacaagatttacaaaacccaaagtcagaacaaattccaaaagacagaaaagctgtttcatggtcaagggatcatcaatacccgttgagtttgggcagaggcgagcaaggagttcgaaacggatgtctctttcgcagttcatggttcttgtgtgaatcttgaagatctgtgttctgctctccaggtcaggtagaccaaactcaaccttacggtcaagacgtccaggacgtaaaagagctgggtctagtgtgtcaggcctggattgaagagttaatacagaaacaccaatgagtcaagcagtattattgggttttgtagtttacttgaagatggtaagagggaatcgtaactgacctgtttgttgccataagaaccttgatgttaccacgtgcgtcaaacccatcaagctgattcacaatctcaagcatagtacgttggacttcgttatcaccaccaacaccatcatcaaatcttgcaccaccaatggcatcaacttcgtcaaagaacacaatgcaggctttcttggaccgtgccatctgaaaagagagtattattatacaattcagaacaaaatatagcagcattggcttgacaaactcaagtagcaaaaaggagtgttcacaatcaattacctgaaacagttcacgaaccatcctagctccttcaccaacatacttctgaacaagctcacttccaataaccctgataaagcaagcatcggttctgttggccacagctctagccagaagagttttaccagtaccaggaggtccgtagcagagaacacccttgggaggatctattccaagcttcacaaatttctctggatgaagcattggcagttcaacaacctgcatcagcaaagacaacaaaacatcttacatcacactaacttaagtaagacattgtaagataaggagaggggatatcaacaaaatttcaacatacctctcgcatcttctcaatctgctccttgcatccaccaacatcattgtaagttacatcaggtttctcttcgacagtcatcatggtcacgctaggatcgattttgggaggtagaggaatctgaatctgatatttattccgatcaactctgcaagtataaatcagagacagaaagttctcataaatttgtatccatatgaaaaatttacaacgacaaaaggaattgaactgaagcaaacaaaacatagaaagatacagtgaggaacaggacatacccaacacgcatgccttcctcaatatcagtgggagaaactttatcgccaagtccaacaacaaactggaattaagaaccacaactaatcagtataaccaaacatcaaatggttcgaaaacacataattggttatgcagctaagggatttaatgtaccttagcaatttgtttgacatttatgacgtatttggcgtcttcagtgtttggacttataatctttgtgcatctcgcaacctggatagagaaaacgtcaaccctttaatctcttatagttaccatgaaataaaagacgattcagagaattatcaaagaaagaatatgcttacctgcagaggttgctcttcttgcatcatttgcttatcagatacaagatcccattgactgggaggagctaaaccagtatcagactccttgatacctgaaccataaaagcaaccaataacccttttagtcactagctaatcgaagtaaacccaaacaattgagcaacaaagagtgtgcacataccacatagatcgttgatcttcttggcgagatccttaatttctttctccactttcttgataggtgcagagtaaggccctaacccctgcagagaatgagatttaacaaggtcagcaacacaacatatggagagataacagatacaacaaagcatgactatgaatatttccacttggaataaattcaaacagtgaggcagattcactcatataagtagtaattagcaaaaaaaactgaaccaagtagaaaaatcaagctcatcaagaacatatctagctcaggaggaaacatcaaattggtttgcaaagagacgaaaccctcacattcgagtaactaaaatctagtgtagatccgaattctccgatgaatcagaagagtaaaaatcgaaaaccccaataaaacttagggttctaaaaggggaaggcttacataagtcttgaggagagcgatatcatcttcatcaagaggacgaggattcttctcgtctctaatctcatcttcaatatctctcaccattgtcgccggatttccaaatcggagatttgagattcctaaagttgagagaaaatggattacgatttatgtgtcttgctgaagaggaaaacaagttcttttttcttttcttttttctcgaaagggtaaagaagttctaatttgcgtttagtctcgtggtgacgtgatataagctaagaaccacacgtgccgctcccacgtgtaaaatgggctttttaagcgaggcccatattttctgtcttgttggagaggtcagatcaaaataatcccacgtgccagtcaaactaggttgagcgaaaaaaaccgcaaccaaatcaaccaaaactgaaccgaatttgtttgttaaccattttttttctttcttcttcttcttctaaattcggataactaaaacgaaattgaaacatatacccctaccaaaacggaatttgcatcaaacttaactgaattacaaatggttttatatagtttcaattattagataaaaaaatttaactaaaccgaaactaatccataaaccggattgcctacaaccctcacacgtgtaaattgagctgttaatttcggcccatattcgagtttttttttgtttttgtatcatttctttttttcctttttctgtgactcttgttttttccaatagttctgagaaaacttatttttatgtttagagtaaccttgtactcgttcaaaattctcaactgtttccaagtaacaaagaagtttttaaagcaacaaggaatcaaaagacaaaaaaaaaaaagaattggagcgtaagttatagcttcaaacagctaaaattatgttctaaaaaagaagcctaaaatgccaaaagagttagactagattgcgatatttaagaacatcgttcttattgagatcaaaggatttgcaaatctctattatggtcgcctcgtcgagtccttcctcgctagcttcacgaattagctgatataactcttccgatggaagcaaaatctgtttatgagtaaacaaagacaattaagaaccaaaaaaaaaaacttttgatttgagtatctttgatgacaaatagatcagcttacacaagtgggagattgagatttttgttccggcttggtgttgctgttcttgctttcatctgcatcatcagttgagtctggtttatcaggatttgcctcgtttgagatgagcttaagcagcttctcacttccctgaagtgtcaataaagatgatttcgggtttatataaacctctagataatggaagtatgtatcgagaagttatgacagacctgaagagcccgccagtgagaatatgtgcggaataagacccagaagaatggtatgtttggtaatggcaatacctaattggaaagaacaaaagggtttggtggttatgagattcgatgaaaataaacgagttagttgctaaggttcttgagggctagcttcatactatacataccataaatgcactggtcaatggaagcaaagtaactgaaccaactaggtacttcttgtgcaggattgttccactgcaaatccaattagaaaacataagtgttagaaggaacagggattctgaatctattacacgtgaaatcggatataaagtttcatcatttgagacaacgggtagcaaagtgatttacctcatggcaatgtgccgtagtctcctgcgtacgagtctaggatctaaactgaaaacatttgacatggattagctaaaacgataaccaatccaaattcaccagaatatatactcatgaagacattcataagagagatacttatcctcaagtttacagaatttcaagaaaaggagagtaaatagaacctcggaggataagtgacttgtacagaagtgacctccttagatatagacttcaagaaaatctcagaaggcttaacacgagccagaagcttcaatccaaacctatacattccaaccacaacttgacattaataagcctatcaacaaacaaagaccaaagcctcaagaaatgtctcaaaatacaaaaaggtagagattttacaaacccatgaatcttgttctttattgatccatcaggcgctttctcaagacccacccaagctttattcatctaaccattacaacaacaacaacaacatttcttcaaacttagtattggagaaatcaaggaggaagactgattaaaaaaagccattcttttatctcatttctagtggtcctaaatgaggttcgttgtcaaaaacctttaatcagaaacagaaccaaaagcttattcattggtcgaaatgttatacacccaataaatctcactagacgccacataaacacacgggtatgaattctataaagagaaaaaagtttcagacgccacatagagacacgggtatgaattctatagagagaacaaaatttcaatgtaattttaccttgtcagagatgaaatcgacgagaagctctgcgttggcattgatgggtttcgattcagatgatatcttcttccataaacctcgtacagtggtcggagtaacaccagacggtgattgagcagcgaaagggtcaacagatctgctgaaacaccatttcttccctttgatcggaaaaaccaccaatctcgctctcatgatcacttaactacgaaaaagctccgatctttagttatgaaatgtcaatttgtcatctgggtattgctttaaacgacgtgggtttcgtatattcaaaggaaaaatcgaaactttaaggtaacgagaccgacaaagcctaaaatatttcacgaggaaagacgaaaagaagcggcggcgcgtctcttggcatatatggacaagtttttatatataagggtctttgaaatcgacttaaaattttggtataacaaaggttgtctctttaaaaggcagtaatgacaaatggtgtactatttgcaatcatgtcaaatggttaatgacagattagaaggcagtaataacaaatggttagtactatttgctataactgaagcaatgataaactgacacatcactaatctcagattatattagaagaaactgtagcatggcttttactgtatgatatacactagtaaactatgcacataaagaagaagacaattaggctgttttgtgatgagaactcacaagacagagactaatttacgtgttaatctttttattcatgatctgctataaaattaggctgctcgtttgcgcagagatactcatcgcattctgaagcggttccccaatcttttctgagtcttaagatatcctctgtaaaagttgagcccgaggcaccaatgaacacgcttgacaatgcgcatatcgtcttatccaacattgcttccacctttaaaataagataatgccatgtatcattttgttggcatatgtatcaattcattcaatacgaaggaggaaagaaaacacacctgtgagtcgccctcgagaccatgtctgtataacaatgcatcccatttctcagctgaatcacgagctggtcgtttcacaagggggacagtctttccattcagtatcaacagtgattgtagcagaccagtttcgctttcggctgcatcagtagaaaggtataaaaccggtgcctcgaccttctcaatcagacgagtgatgcagctagcagcttgaggaatggggaaaaagcaacttggattcttggcattactggcacaccaagaaaatttcttagctaaggttcctgatttaatcttcgtaatgaaatgaactgagctacaccaaaagctactatgaaaattaaaaacaatccatcttacacaccatatagaaaagaagcaattacacaccatattcttcgtacaagtgatataaactcataatgctcatacttattcataaatgataacttggtcaatggaattcgcctaagctagttagatgtgcaactccaattatctattcacaaaagtacagccgcaattctaaatggttactataccaatactgctattatctgatcaagattaagatacctacattgtcatcaaatgtagagtgtagctatgcgcaaagttctttaccattatacaagagaacttagaagagtgaaggtcaagcataaaattctcactttcagttaccatctacggctactaccagagaagtagaaaatagatcataccaaaacttcaagaatccatgcctgcggaaatgaagagcaatgtagttcttgccaaggaaagtctggataaatctctgtgcagtgagtaaaataagccggtttggttcaatcaaagttctgcacttgtgagcaacaggaccaccaggctgcatcacccactctctctcaacattagcatagaacacatccccaatcgcaataacatcgtcatctgatctaaaattagcctccacttcctcagctgtcttgttgcttggcctcgcaatatcttcttcccatggtgtgtctagcttccctccaacagtgatccccaaagctttcaactttgtaatatgctctttatctacataacacggttccggtttcgagaagtaacatatgaatctattaatatgaacatgatgatgcttcttcctattcttatccttcttccaaaactcctcaaaagaaaccacaacagtccttcccaaacaagtattgattcgatcaatatcgatgattctactgtaatgataatcaaatctatgactagggatcacaagaacacgtttcagcaatgctgcaaagaacatatgcttctccaagcaaatcaagtggttactcatttgaccagacaaacaaatggcgaatagaaacttatccggcctcggcttccattgaatcgtcttcctcccattcaacttctgatccactttccggcaacttccgccggcgaagtaaccatctgatgatccaccgatatcaacatttccagttttatgcggcgatagtaatgcattttggatctgtctattcaacgaaatctgccggaaaactgcagatttcacgtcgtcgatcgttgataaatttgatacagtgtggttccagatagagaagagatcgctctcttgcttcctgagaagatacagtgcttgaagatccgattcatgaacccgacccgttaatgtatttgaccggaacgcagaattaggaactttgacggagaagtaattgctgaaatcggtagataagtagatgaggatgatgacgatagggaggaagataaaaatggactgtttcttagtgagattgagcttaaaactccgtcgtaaacgtgatcggagactctccacatcgaaggtaggtcgttgctctgccgcctcgtcgctgatacgaaattggtcgatttgagaatctgattcctcgaggagattctggagatcgctttcttcatctggagatgacgatgacgatgaagaagtcgtcgacgaggaaactttcaccattgatgaagtgacgcagtcgttgccggagatcaacccggaaccgtcaacccatataactacacttaagacttttatccaagatccgacccggctcacaccacgtggcttttaaaaggtgatattggtcgggtcattggtaattaaatagaacgacccagttcacattttagagaaagataaattggacttagctttcacagtatgattttgtccaaaaaaaaaaaaaaacctttcacagtatgattcgtagtaagtgttctaagatgatcatgtaatagtgttacattatgcaactcatctttttatatcattgtattatgtttaacagtaacaatatgtttcccaaatacctgttttattgtaatatgtttccaaaaaacaaaaaaaaaactatacaagttctgcaaagagattgaaggtagagagagacacaaaaggtaagagttgctgagttttgcatcaggagctttgtgaagaaaataaaacgacttctctctacctttctaaatgtagtaggccatatacttgggtgttgcactgaacttttgataacctttaacaactttgttcactgcgtccagaaagtccttctcagtcacagactttctcctagctccgattgcatacattccggcttctatgcatacacttctgatatcagctcctggaaaacagattaacaaaaacccaagtcagaacaaatctcattgagacacccaaataacagcatgggagctttttgatggttgggatcattaccggttgagtttgggcagaggccagcaaggagttcaaaccggatgtctctttcacaactcattgttcgtgtgtgaatcttgaagatctgtgttctgccctccagatcaggcagacaaaactcaaccttgcggtcaagacgtccaggacgtaaaagagctgggtctagtatgtcaggcctggagtaaagagagtgaaaaacagaaacattgagtgcgtcaagtcaagcgctttaatgtgcttttgtgtagtttgctttaccctggtaacaggattgtggactaacctgtttgttgccataagaaccttgatgttaccacgtgcgtcaaacccatcaagctgatacaaaatctcaagcatggtacgttggacttcattatcactgcctacaccgtcatcaaatcttgcaccgccaatggcatcaatttcgtcaaagaacaaaatgcaagctttctttgaccgtgccatctagaaagcgagtattatacaatttcaatattagctaagaaaaaaactgagatggcgagaaggagcttttaccactggactacctgaaacagttcacgaaccatcctagctccttcaccaatgtacttctgaacgagctcactgccaacaaccctgataaagcaagcaccagttctattcgccacagctctagcgacaagggtttttccgctaccaggaggaccatagcaaagaacacccttgggaggatctattccaagcctcacaaatttctctggatgaagcattggcagttcaacgacctacaatcaacaaagacagacgacaaaacttttaaaaaacttcttccttgaaaacctataccacaacaataaatttacaactctaggtgttaaacagagaagatctgaacacgggataataactaaactaaacatatacctctctaatcttctcaatctgctccttgcagccaccgatatcactgtaagttgcatcaggtttctcttcaaccgtcatcatggtcacactaggatcaatctttggaggtagaggaatctgtatctgatatttcttctgatcaactctgcaagtacagatcagagacataacgttctcgtaagttttcattcatatgagaaatgtacagcctcaaataggatttgaactgaagaaatgtacataccccacacgcattcctgcttctatgtcagtgggagaagctttatcgccaagtccaacaacatactgcagttaagaagcaaaactaatatcagcaataaaccgaacaacaaaaggttctacaacacagaactgatcgtgtagcaaccacaacgtagggatattgtttaccttgcctatctttttgatatcaacgacatactttgcatcttcagtgtttggactgattatctgtgtgcatgtcgcaacctggataggaaaacacatttattgttgccgtgagagaagaagcaaaattcagagaactaaaagaataaaaagcctacaagcagaggttgctcctcttgcatcatttgcttatcagatacaagatcccattgattgggaggagctaaaccagtatcggactccttgatacctgcaatgaaagtgaaagcttcactttagtcatgccctaaacagaagtcactaactccaagcaagcccaaaacttcagcaacaagagtgcgaacataccaagattgcagatcttctcggcgagctcattgatttctttctctactttctttatgcgtgcagagtaaggctcctgctaaggaatgaggattttgaagctttagaagtatgattatgccattcttctttctgccagatatgtaaagcacgttcgaatacgcattcctcaatgttcacctcaaaatgtgcttcacttgcctccgtactcccaaactctgtaatgtcagaaagcgcttcttcacttgcctctgtactatcaaactctatgatgtcacctgtctcgtaatcccggaggcggagcactctaccacaaccatatgccaaaaaactgagaactgagtttctcatacggataaggaagcaatgaaaattatcacttacgataagagaggttcaaagtctgaacgcatattgtgggggccctcattctcaggatcctccataatatctcttatgatcatctgcaacagaaagcattaaacatgatttgatttatcatcaaaagagagcaactacatcggtgatacttacagaattaattgcaacttcaacaggattggcagccatttcggcgaaggcctcgtttagttccagaaagtcaaattctgcatcccttatatcccaatcctctctgggttgcatgtcatctgtgacctcgaccttcggttttcccttgggggaagcgtctggtatcatcttagccagttgtgggggatcatcaaatggatctgtaagtatatatgtgtgtcgtatcctgatatctttatttggtctgttcttcgcatcaacagaagctttggctatacaagtcaaagtttcaaacccgctggtaatcttcccaaacacctgaaaaagaggcatattatatacacataaaaaaaaagaataggcatatcattaataattggtgcttacagtgtatttcccatcaagacagtctagatcatcacaaagtgtgatataaaactgaaaagaaaacagacaaatcagatgaagacatgcaataccacaaaagttgatccacggacccacaaagaacttggtaattcaagcaaaacgttttgactaacctgggaagcattgagattttctccaaaactagccatggcaacggtgccagtatttgaatgtttcaattcggcatgaatctcatcgctgaaaacctagcattgtcatctcccaaaagtctggaaattcaacatagggaaatataaagcagtagcagcacaactaggcaacacagagtataaagaatgaccaaaatagataagcagtctacatatcatcagaaggtaagaaaacgtcatcttactagtatattgagtctccacccgttcctgtgcctgttggatcacccgtttttgctatgaaatcctttacagtgtggataaggcactgatggtagtactttatcctgacaaaacaagtaagttaaaacccttaaagatagagatgtttcttaggtataggcaaaaggaacacttacttgcacagcttaagaaaattatagcaggtgctagggcattaatccgtgtagagatcaagaaacacaatccctaaatccgtgtcaattagaactgacatgtttattaatttctcgaacctgaaaccaaaaactgaacggtggaaggcaattgaaaagttagactactggataaactgatctttacaatccaaatcgaatatccaaacacaagtgtatctccaacaatcaattactcagtttaatccctaaattatctcatttccactgatttcctttgggaattctccagaaaagctatcaaatttctcatctaagcatcaaaggaacgatatagccaaccctttgcaaagttgcggttacaagaaacatcaacctgaccaagattcgcgagcaatgtcgtcttactatcgtaattgaatcagagtaggataagaagagatgatcaatgagatataggaactaacctcagaaacagatagcgagagaagaaaggttcacggcggcgatcttggagtagtcggactctgttgcgactgagagattctcgagcaatgtcttcgtactatggtaattggaacgagtagtagaagaagtgatggtcgatgagatttacgagctaacctcagaaccagagagcgagagaagaaaggtgcacgacggcgatcttggagtaaccggaaactgttgcgactgagagagattcttctgttacgcttttagctcttctttacgcgccttaggcctctaaataatcccttataaaaaatcattcaaaatgctataacatgcgtgctgttttcagatagaagagataataaaactacgtgatgttttcaattcataagtacaacccggtttagagatggtttgttgatgagatttaaaccggaaataaaaccgatattctctcaacgaggctatcccttattcgacggttgcgagcacagccaccgccaacaacccgagaccggagccaccaatcccgcaagccggaggaaccgtatcttaccgcaggacctaaccccatcacatgaaccgccgtcgctgaaactcccgaaaagagaaagcgagcacgaaatacctccgacgatagccgtcatcacccctcagctgcgggatccgccgctcgatttccgtcacagggatgatcggagccgcaaacccatacgcacgattgacctcgagccaccatcatctatcagctcggaatcaatagaagtggcgaccgtgagccaccgtgaaaccctagccaactccgcttcgagccggagaagaaactcggggagctacgtcgatctcctctagtcatttctaaactgcgatgaagcaggtgagagccgccgccgccaccttctacatcctccgacgatcggggaggtgaggaaacaaaaatcaaactgacttacgaaccaatgtaaatgattattattgggcctttttgggcccatatgttttgtcttacataaagtataaggttgtttttacataaagtagcttaatgactgttattacataagatgtttcttgttggcgtggccaaagtcgaaacgaagacaagtattcctaaacaatttaaaatacaagagaattgaaaatgaaaagcagactagtatgaccaacaaaggaataaaattatccaattaaccaagttaaaatgatgaacaatttccaattacaatccttggatttgcctaggaatattttcagagtggagacaaagcctatcgaagatctttagcgtggtggaggtagaactgtttgttgtggtcgcttctgtgaaaggataaaatctgcccatctattcagttgtggaattgtctgtgaaactgctagccatgaaaagctgcataaataatttacaagtcgtaaatgttaagtacttaagttgatcctttgtaactaataagaaagttaccttgctagcttcagtggcagactcgacttaaaatagcctcccttgaggagaaaatgtgttgaatcctctgtcatagtcagtccttggaacaaaagaatgtaagatagacacttatcaactgaaagaataaactagaccaagtattaaaacaatagttgaacacttacataagtttaaaattctcaacatagcctagagaggtgtaaactctcgtacgtttgaacatttcaacatcttgtatttgaactcttgtgagactcttgctctcaaggttgaagtaataaatgtaaaatgcgtatattagacagtactgtgacaacacaacttcacctccatcagtcattccaacaatggctaactccgtatgctgaactaagttgttccacaaaggaggcaatgcatagatacatttggtccatatatttttctcagcatttactagaacccagaacctaagacgttttggagacaaacatgtaaactgaagtgcacctagtttacccttgtagttgattagagtacaagagtcattcatcaacatgaatacatgtatgttgataaagctaaacttttcagacctcacatcaaagcacactaccatagaaacccttgcccgcatatcgaacccagctgtataatacaaaataccatctatgcatattccatcagatttaggataatggggtttgcattggattgttctccataaatggtttccattctccaatgtcaaaacttgatgctcatcacacgtatttgggatatcatcagacttgatgcacaatacctttagctgtttgcggaccggatcatatcctaaataaggtcttgtctcagtattaatactcttcagttccactttgggtaaggatacggactctcccgtgactgggttacaaattaccatagtatctagatttctcttacctcggcgacagatgaatccacaaagaggagaaccaatttcagaaaaagaatctgtggtatgttgaacatgataacgggtgggtacaagagacgtattctcgttacatggaatctgagggtgaggtgaagagaagaagaacaaattgccatcatcatcttggaaggtgaaaagaagcaacggtggacgaatcgaagacatagtcatgaacaactccttgaaatcaggacgacaaagtatggattcccagagtttggatacgcaacgaaacctagctatagactttgcaggaactctcgaaaagatatccatgaggagatcgatcgggatatatctaaaacaggaaacataacccacctggagaggttgcccctcttgcatcatttgcttactgagaggagctaaaccagtatcagactccttgatacctgcaagttacccgtatatgcaatttaatcattcggtaaatagaagtcactaatgaaagtaacaccactatctcagtgtgcacaaaccacatagatcgttgatcttctcggtgagttccttaatttctttctccactttcttgataggtgcagagtaaggcactaacccctgcgaaggattgagattttaacaaggtcagcaaaaaaacatatggagacgcaacatatcaaaccaagtataactatgaacgtttttttttcacttggatgacttattcaaacagtgaggcagagtcacccaaagctagttagtcatataagcacaaaaatgatctaaataggatcataaaatagcaattagctcgaaattactcatgagaaaacatcaaactggttcgcaaagaaacaaaatacagcaaaatttagggttctaaaagggtacacttacataagtcttgacgagagcgatatcatcttcgtcaagcggatcgtctacaatatctctcaccattttttttttttttttcggattttgatcggagatttgagatgtgagaagaagaaatcgaattacaccaacaagagtaccaactttgtccgagttattaaggtctagtaagtaagggccacgttaggtgccttgttggagaggccagagaaaataataccacgtgtgaattgggctatgaaacgcggcccattagcccaatatgcagtgatccgggtcgggtcattagagcgagccgggtctcgttatccatcgcctccctggttgctgcgtcaaagccagacacaagtatcttcgttgaaatttgctttttgtgtggcttatccttgtctgtcaaattcctgcaaaaactctcgcctctctcagacagtaagaggaacatatttccttaatgtattgttccgtataatcttacaagacatcctggttggtgttgcagagaagagtgtttcaaagtttcttcctttttcgttttcctggtctgaatgagctcccaatgccttctttaggtaccttttctggtaaagtttccagatatttacctcttaattttctgggtttgtgtttggttactgtttagaattctacttcagtattgagactctctttcttctcaattttgtttcttttctattggatttcatcattcttgagtatcaattatttgcatttgcaatcttggtctaaatgcgtataagaaaagactagtgattcgcacagtatctagagaatgtttactagctaatggagatgactctttggtttaatctttgcagatattgctactatccaaccttcatttcaagctcatcttgttccattgggggctcagagtattatccatgctaaaagtctacctaatccatggagacagtcttgtttctccaagaatttgaaattttacacgggtcatagtcatgtccgaagaggaaaagttcttattactgcagtggccactcttgaaaccaagtatccggctcaaaaagaaaacgaacggagctcttctttgtcttctgcttcttcgaaatcctcaaatggaagtgctgatgatggcgaagaacaagtggatgacagagaaaagttgagaaggatgaggatttctaaggcaaatagagggaacactccttggaacaaaggcaggaagcatagtccaggtgagtagtttttgcttattcgtatcttcagcaatctatcttcagttgcttctaattggaaacatttcataatcttttttcttttgcgtttatgcagagaccctacagaagattagagaaaggacaaagattgcaatgcaagacccaaaggtgatgtcatgtaagaatggttctatatgtttgctctatgcatcagaattttcaacccctcatagaacctttgtgtctttgtccttgtgcagatcaagatgaaattagcgaatcttgggcacgcacaaaagtcagtaccggtttttcgtttgcttttaaacctgttggagcttttggtttttgttatcataatactatcttcccaaatttgcatgatttttacagcaaggagacacggatgaagattggagagggagtgcggatgcgatgggcaaggaggaaggagaggagaaaagtgcaggagacatgtcatttcgagtggcaaaacttgttagcggaggctgctaaacaaggatatacagacgaagaagagcttcagtgggattcttacaacatcttggatcaacagaatcaactggaatggctggaaagtgttgagcagaggaaagccattaaaggagctaaaagtaacagaagagcgccaaaatctcctgaacaaagaaggagaattgcagaagcaatagctgctaaatgggctgatccagtaagttgtctagtcacttgatcaaatcaaacttgtttgatgttttgttcttggtcatatttaactcagtttgctttctcttatcagtcttaccgtgaaagagtttgctccggcttggcaaaatatcacggtatacctgttggtgtcgagaggcgtcgtagaagaccaaggagcgatgcagaacctagaaagaagactcctacaaagaaaagtacaagggattcagagtttgaacgtcaaagccaagttcaagtggtgaaagtaaggaagcgcaaaacacctgcgtataaagatcctttggcaagttcaaaactggaaatgatcaaaagcatcagagcaaaacgagtggcggaagaatcaaagaagatggatgctgtggaacgagcaaggtcagtacacttaaaacagaattgttaatatttctctgtttgcaactgtgagcagaagttaacaagaattaaccttttctcgcctcaggcttttgatctcggaagctgagaaagctgcgaaagtcctcgagattgctgctttgaaaagcccggttgctcaagcatcgttgttagagagtaaaaagctcatagcagaagcaacacaactgattaaatctttagagatgaggcagatagcttcagatgaagatgggacttacccatttcttctttcacctcagcctaatgacagtgaatctgaaaccaaagatacaaacgatcaagaacgaccaggagagattaatggaacacacacattgcagatcaacggagagagtcttcacatgaacatgagatctaacgatttaccgactttcgttatagaaggtactacaaaccagtttgtttctgatatggaatccaacacatcccaaggaggtagagaagatatcaaactcgggatagttgggcaaccaaacggaacgagagtccatccaccagcagagtctaatggagctatcagtcttgctgagaatcatcctcttccaaatggttaccacgggattgacgaaaaggctgcatctttggaatcaggaaacgtaacgaagaagtgggttcgtggaaggctcgtcgaagtcacagaagcagcctaatgtcgtagcaatttagcagagaaaagtcatatttttcaattagtaattcaaaattttggcttatatattggtcttatctcttatgcttgagagaagcagtttccagtttgtgatgtgccaattgtatctataactcaattgtatgtcagagtttcagcttagtaaacaattcttcatagctttccgattattaaagaattaaccaaagaaataaagcaaagagaactaccaataaacctcatcaaaagataccagaccaaaaaaaagaagaagacaaagatcgacaaagatcatgtgagttctgtttggaagaagtaaacacttagataagcttcacatcctctacatagtttgtaaaagcctgaatcctacacccacgaaaatttctaaaaagttgatcttcaagttttacaatggtgatgattttgctctcgagattgtagtacaaaatgaagaaaggatgacgacctcctataaagattgggtataacacaagttcgcaactaccagtcattccggcaggacgtacatgactgggtttcacgagccacggataagatattgcgtagatatactttgaccccatttatttttcttggcatcctccaaaacccacaactccaaaagattagtgttaatattaaaactacaagcacctaatttacccttgtagtcgatcaacgttaaagtgcaagaatctatctttactgctatgtcatcttgatcaatgttggtaaaactaaatttctcagacctaacatcaaagcaaacgatggtaccttcccccttatagatcattgctggataatacaaaacaccatcgatgcatatcgcagtatttatcagcactaacaacagaaacgacatcacttctggttttggatctctgaagaaactgccattgggccgtgagcccaccaagaaatctcctttgggccacgaaatgtcaaagccgaagcccatgtcgcagcaacggtcttcttctccaaatacagacaaaaccagagctggcaccatgacgtcttcgagctgtacgaactctgcttctcccataaaactcagcaatcgattctcagcccttgattcaagctgatgttcatctatccgttcaatcttagggtttctttatgtttgtccctttgtataaatagtaagcttaagcattgtaaaacatttaagccgtaatgcaaatcaaagcttcaactttcgtttctatgttttgattttgccttcatggtatcagagctcatggaaataagatccatggcgccgtatactgtcccacctctcaatatttccaactgtgtcacagtcacactcaatcaacagaactacatcctttggaagagtcagtttgagagtttcctgtcaggacaagggttgctcgggtttgttaccggctcgatctctgctccggcgcagactcgttctgtcacacacaacaatgtcacttctgaagagccgaatccggagttctatacttggcatcaaacggatcaggttgttaaatcttggctccttggttcttttgctgaagacattctcagtgtggtggtgaactgcttcacctctcatcaggtatggctgactcttgccaatcattttaacagagtctcttcatctagattgtttgagctgcaacgaagattacaaactctagaaaagaaagataacacaatggaagtttttcttaaagatctgaaacacatttgtgatcagttagcctctgttggtagtcctgttccagagaaaatgaaaatcttttctgctttgaatggtcttggaagagagtatgagccgattaaaacaaccattgaaaactctgttgactccaatccaagtctgtctcttgatgaggttgcttctaagctcaggggctatgacgaccgtcttcaaagttatgtgactgagcctactatctctcctcatgtggctttcaatgttactcactcagattctggttattaccataacaacaacagaggtaaaggacggtcaaactctgggagtggcaagagttctttctccaccagaggtcgtggttttcatcaacaaatctcccctacttctgggtctcaagctggaaactcagggttagtgtgtcaaatctgtggaaaagctggtcaccatgcgttgaagtgttggcataggttcgataacagctatcaacatgaagacttacctatggctcttgctacaatgcgcatcacggatgtcacagaccaccatggacatgaatggattccagactcagctgcttctgctcacgttaccaacaaccgtcatgtcctgcaacagtctcagccttaccacggttctgactctatcatggttgcagatggtaacttcttgcccattactcacactggttcaggtagtattgcttcttcttcaggtaagattcctttaaaagaagtgcttgtttgcccagatattgttaaatctttgctatctgtttctaaactcacaagtgactacccttgctctgttgagtttgatgctgatagtgttcgtataaatgataaggcaaccaagaagctgctggtaatgggaagaaatcgtgatggtctctactcgttggaggaacctaaactccaagtcctctactccacgcgtcaaaactctgcaagtagtgaagtgtggcatagacgccttggccatgcaaatgctgaagtactccatcaacttgctagctcaaagtccatcatcatcattaataaagttgtgaagactgtgtgtgaagcctgtcatctaggcaagagcactaggcttccttttatgctatctacttttaatgcttctagacctcttgagaggatccattgtgatttgtggggtccctctccaacaagttctgttcaaggattcagatactatgtagtgtttattgatcattactctagattcacttggttttatcccttgaaattaaagtctgacttcttctcaacatttgtcatgttccaaaagttggtcgaaaatcaattgggacacaaaatcaagatctttcagtgtgatggtggtggtgagtttataagctctcagtttctgaagcatcttcaagatcatgggattcaacaaaacatgtcatgtccctacactcctcaacaaaatggtatggctgaaagaaaacacagacacattgttgaattgggtctgtcaatgatttttcaaagcaaactgcctctgaagtattggctagagtctttcttcactgcaaactttgtgataaacctcttgcctacttcatctcttgacaacaatgagtctccatatcaaaagttatatggtaaagctcctgaatattcagctttacgtgtctttgggtgtgcctgttatccaactctcagagattatgcctctactaagtttgatccaagatctttaaagtgtgtttttcttggatacaatgagaagtacaagggctatcgttgcttgtatcctccaacgggtcgaatttacattagcagacatgttgtctttgatgagaatactcacccatttgagtccatttacagccatctccatcctcaagacaaaactcctcttcttgaagcttggtttaaaagttttcatcatgtgactccaactcagcctgatcaatcaaggtaccctgtctcttctattcctcagcctgaaactacagacttgagtgcagctccagcaagtgttgcagcagaaactgcaggtcctaatgcttccgatgatactagtcaagataatgaaactatctcagtggtgagtggcagtcctgagcgtacgacaggcttagattctgcttctattggcgacagctaccattcaccaactgcagacagttctcatccttcacctgcgaggtcttccccagcaagttctcctcaaggctcaccgattcaaatggctcctgcacaacaagtccaagctccagttacaaatgaacatgctatggttacaagaggcaaagaaggaatctctaaaccaaataagagatatgttttgctcacccataaagtttcaattcctgagcctaagacagtgactgaagctctaaaacatcctggttggaacaatgctatgcaagaggaaatgggaaattgcaaagagactgaaacatggactcttgtcccatattcaccaaacatgaatgtgcttggtagtatgtgggtttttcgaaccaaattacatgctgatggttccttggacaagttaaaagctcggcttgttgctaagggatttaaacaagaagagggaattgattacttggagacttatagtccagtagtaagaacaccaacagtaagacttatactccatgttgctacagttttaaagtgggaacttaagcaaatggatgttaagaatgcttttctccatggagacctcactgaaactgtgtacatgaggcaaccagcaggttttgttgataaaagtaaacctgatcatgtgtgtcttctccacaaatccttgtatggtctgaagcagtctcctagagcttggtttgatagattcagcaattttctcttggagtttggattcatctgcagcttatttgatccttcattatttgtttactcaagcaacaatgatgtgatcttactgcttctttatgtagatgatatggtcatcacaggaaataactctcagtccttaactcatctcttagctgctctaaacaaggagttccgcatgaaagatatgggacaagttcattatttcctgggaattcaaattcagacttatgatggtggcttgtttatgtcacaacagaagtatgcagaggatcttctcatcactgcttcaatggcgaattgttcccctatgcctactcccttgccactgcagcttgatcgagtttcaaaccaagatgaagtcttctctgatcccacttattttcgcagccttgcaggtaaacttcaatatcttaccttaacaagacctgacatacaatttgctgttaactttgtgtgtcagaaaatgcatcaaccatcagtgtctgacttcaatcttctcaagagaatcctgagatacatcaaaggcacagtctcaatgggaattcaatacaacagcaattcttcttcggttgtgagtgcctatgaaagtgattatgacttgagtgcctacagtgacagtgattatgcgaactgtaaggaaactcgtcgttctgtgggtggatactgcacgttcatgggacaaaacattatttcctggtcctcgaagaaacagcctacagtgtctcgcagctccactgaggcagagtatcgatcgttgtctgaaactgcctctgaaatcaaatggatgagctctattctgcgtgaaatcggtgtctctctgcctgatacacctgagttattttgtgacaacctctctgctgtgtacctcaccgcaaatcctgcttttcacgctcgtacaaagcacttcgatgttgatcatcattacatccgcgaacgtgttgccttgaagacgcttgtggtcaaacacattccaggtcacctccagttggctgatatcttcacgaagtcgctgccctttgaagcttttactcgcttaaggttcaaactcggtgtagacttccctcccacaccaagtttgcgggggtgtatcagcactaacaacagaaacgacatcacttctggttttggatctctgaagaaactgccattgggccgtgagcccaccaagaaatctcctttgggccacgaaatgtcaaagccgaagcccatgtcgcagcaacggtcttcttctccaaatacagacaaaaccagagctggcaccatgacgtcttcgagctgtacgaactctgcttctcccataaaactcagcaatcgattctcagcccttgattcaagctgatgttcatctatccgttcaatcttagggtttctttatgtttgtccctttgtataaatagtaagcttcaactttcgtttctatgttttgattttgccttcagtattgtcccaaaaaaaatgaattgcacaaccttgaatctttctccaaaagagtttttttattttcagtccctaatgtgagaacttgatactcattggacaagtgctctgagccagtacgcaaccaggtgatacacaacactttgagctgtttctcgattggatcatacccaaaagaatatcttgctttatcacataaccactctgacttattaatcccctttaaacttagtttcggcaagtttgaagactctcctgtgatgggattataaatcaccccaactgaattatactgacgacacagtacccgtccgcagacaggaccacatatctcatagaacttggtgttaccagtgttctgatgaagggtggctacaagagacgagttctcatccggattgtgaggctgaggtgaagagtaaaagaacaagattcctgcatattcgatggtgaaaaggatccgcggagctggggacttgatcgggaacaactggttgtaatttggacggcgaattatggacgaccagagcttcgatacgcagcgacacttagctttagacttcagcggcaatctcgataagatattactgatgaagagatcaacagggatcagaccaaagtattctatgtcttttccaggtgttgaagacggtttattggatccacatactgttaagtttacgtcggagacgtactgcttctgttttgtcattgcgatggacgaatccctaattgtgtgaccaaagtacgcgactctatcagttaaatatggcttaccctatatgcttcaaccttaccccataagatagacttttttaaggcccaataccttgagttttaaggttagtaaacatttttttatcaaagctgattttgacactaatatgatttggagaaattgactaaaccaagtcaaaaccccaaaagcgtgttctactaacttgtgtcccaactttttaaaaaatcttgaaccagtcttgcttctaatcgacattgtgtcgtgtgcgagtgacaaattcttcaaaactaatggacctccaatcagaactcaacatcaaaaacctctctttatctcaactcattcctttaaataaagcatcgattttcccggttttgatcagttcttctactcttcacaatctttgtcttgatgtgagaatctttttcgttttcctttcttcccacgcaaaaagtcttgatccaaattcattaattagggttttcactatttttcagcgacatggacgaagaatctgtttctaatggttctcttttcagcaaattcgaaggagaagagacgatgggaaaagttcttctattctcaatcgtatcgattttcacagggattctattcctcctcttgcttcatctctacgcaagactcttttggtggcgtgtggaacaacatttcaacctaaacctaatccaatccgacgatcctggctccacagtcatcggacgtaatcctcgacgacgtcgttttgtcttcgctcaaagtcaagaagatcctcttcacaacgctggacttgattctaaaattctccaatctatccatgttgttgttttcaagtgtacggacttcaaagacgggttagaatgcgccgtttgtctctctgatctcgttgatggcgacaaagctagggttttgccaaggtgtaatcatgggtttcatgtggattgtatcgatatgtggtttcagtctcattccacttgtcctctctgtagaaacaccgttggttccgtggaagatacgacacatggaggaagtgagggtttacctcaaaatcaaaactttgaatcagggcactcgactaatcagcataatccatctcaagatcagagctttgttcatgagttttcgacagaacctctgagttttccgacaaatgtactggtttggggagatcagaatcaagttagaagtgcaggcctcgttgttactgaagaatctccttctggaaattttgcagcttcgtataacgatcatcaacaagaatctagtagtaccagatcacaagaagtgacggcggttgtggtggacattccggataattcaagtgagaatttatccgagagaatcgacgaagaagaacctaagtcaccgatgttcacaaggttaagattgcttaagaatgttttgagtagagagaagaccaacaacaacaatgtttgaataaataggtaatcttgaacccattcaagaattatctcgagaaattttgaattggttatatatctttgtatatgagaagtgtgacataaacatcccatgtatagtttgatttgattcaaatctacattagttgttttcttataagagagatgatgattacgatggttaatatagtttgaaatccaattcttgcaatggcaaattaaataacactatatgtctatatgaaaagtaatggtttattttaaggaacagatcaagcaagtctcgactttatgaagttctaagcataggtgtcacattctctacataatctataaagacatgaactacagaatgctgagatgcttcaaatcctcgtatttcaactctacgaatagtgttcctctcgggattataatagaaaacgtaaaaagggttgaaaagaaagttcgaggacaatacgatttcacctgttccattaatcaggccaacaaaacgtagatcagggtcatcaggctcccatcacccattggggaatttgtaaaaacgcttcgaccatatatgttagtctctcttaccaaaatattacatatattgtatagaagtatgtattccggtccaaagcacaaacaaacaaaaaaaactttggattctaaaactgattttagaggactacattaacaaaaaaatatttaagaaaaagcacaattttgtttctcagcattggaccggccctggtaaatacgtatatatatggatttagtatttacattagcagaaaaaattcatatatcacgtgaccgtatcacatgagctcattgcccaagaacgaataattggcgacgagagagtagtcaaaaagaagagcacatgatttcacatagacaattcgtaagatcatataataaaatattagtgagtatgtaaaatgtataagctcaagagcaaattgtatacaattacaataaagtattaagttaagtatatgcttgtataaatatctcttgaaatcgataccataataaaaccctaaagacttatcttcacaacaacatcgaaacaagctaactagctcagagccgccatgaaagaagctttgaaacttatcgctattgtgctattgactcttgttattttaactttatcgggtcgacccgctcccgaatctgcgacactagtcgggtcatcttctcgagtatttcggaatcgctccaaaatgaatccattcgatcaaatagaccctagtctccggaagattccacgtagcggcgcaaatcctactcagaacaagtagcaactcgttataacaggttttacatattgtacaagtttgtctacactatacatatatgctagatagatttttagatggaagtaatcaagaagagattcagagatctctaaaaatctttaagttttttttttatgtaatatatatatatatatatatatatatatatatatatatatatatatcaattccctctttagtatttggcctttgtaatctctttttttgttcttgataaaactcaccttgtaatattgttattgtaattttgaatcgtgttgacattcaagagtagaggtgttctatatatcaagttttttttatgaaggaaatctttaagttctatattctttggttatcatcaaactcaaaacaagtatcgcaaagatgtacgtacgaattctagaaaattgaaataaagacgtgctatacaaatagcagatgttgttgatcagtgttgacctttttttttttcctttacaaaataaaaatattatgatatcattcctgctaaatcctcgtgagtcgacataaagaattacaaacacaagaagcctagttttgaaaagatacggccaggtccatttgtaataatagtctttttgtacctatgtaattagtaacttcgacattaatcttacggtttttaatttttttttttttttacgtttttttaatcttgggccgtatatttgtaggtaaaggtttacttagttattgtaagtatactgtaccatattctgtatattatggattgttatggttcgtcagattttatagtatacattgatgcgaaaaaggttccaaaacaaccaaaaagaaatagaaaaataaaaaccattttttgtccaaaacaatccaattctaaaagttgtttttagatttccttgtgctgtatatgaaaatgcccaaacagagaaataactagcagaaccgtcccttgaaccaagtgggtcaagcccatgcatgtggccaattaaaaaatttcagatcaatgttaaattgttggaggacattcaaacataatatgttactgtttctccttaccaaaaccacacttaaaacatccgagtttatacttatgcatcgattctggagttttaaatttaccgcgcgcaaactatcactaaccagatgaaatgtttcatttttcgatgacgtttttatttatgtctctatctttctgttctgttttttttttctctattcagaatttctcttttttaaaaatattcttcataaacttatcattttttgggagttttaatagtgtatgaattaaggccccctgactaaatttcgatattcgacaatatttatcaacgtaacgtcaataacttaactagcaaaacctccctataaaactagaatctctaccatatagtatataaaacggagtatatatatattaaaaataatttctaatagtaaatgtgaaccaaacgtgcatgataattgatacatgtatctggaatggagagccaccatataatgccagctttgggatcaattgattgcaatcattctctctcggatataattgcgtgtatatggctctttctagatttcatggaagtttcgctaaaaacagcttatatactttttgtgacgcttctaaaaaaagactttaataacatgttgaaagtttatgcttctttttaaacaatttgggctttcattttagaaacacagcattgcaaatacatataacatatagttatttctgatatattctttaaaaaaaaatcccaaaaaactattgtagagctgcatattattttttgtctttgaaaagtgttgcttaaactgattgtttttatcatgtatatgatttggaagtgattaattaaaataaacaaaattttgatactaattaaattaattgatttggaagtgttttttaacttggaagtgaagtgattaattgaattaaatattaatatagtaatatttttcgtgaaagtatagaattttttttttcgagaaattaataacagttcatttaccatactgagaatgaatatggtaatataaatttttcatttcgaaaaatacgaaatatgtttaaatcatttcttagtataatttggtatattgtattgaactgttaaaaaaatgaaggataggatgaacatttttctcaaaaaatcctaggtttgaaattgattccttcatttttgttcttaatttaatagaaaacttgttatagtttttcctgattttaaggttataatttttaaaaatatctattcaacgaaataattcttttaatattttatatttttaattataatttcttttattattatttttaataccaaggtagtaaaacattagtaagttacataataagttaattttgaatgaaagttacaccactcatcctgaagaattagtctgatggtaaaactggatcatctctgattatcaatataataaataaaattgtacagtatgaaagaggaagagaaagatactcatatttatgttttaggtaacattgcattaaatgaacaaaattgtctagtaattgaattttgcaaataaacaaggcgcgatctacggagatatttgcgattataaaattccacgtacatgtttataacaacaacaaaatgcaaaaataatggagaaaatttaataatttcatgataatacggaaataattacgacgatgatttgtcaatgcattcaaccacccataatttttcggcgaaataattgattttctatcaatccaacagaatcacaacgttttaattttctataactctaaaattaagaatcaaagaaggaaccaaaaggatggtattaagtacaatgatggttctattgtattttggctttaaattattttttggtagaataagttattttctaaaattgaaatatctgaagtctgatcgatttcggacttatagctagtcccagaaacattcagtttatatatatggtcagaaaaagaaactagactaaaacaggaaaaaaaaaatgtcgtcgtcgtcgtctctaataattaagttgaatttggcttagctgaatgtttctggcgttgtccaaatgtgggtgcccaacaggcaacgctcacgtggttctttctcaataccccaacatttatatgtataagttatcctcttcttcttaatatacttatgcttcttaatacgcgtgggttagtttatttgtgtcaccaaaatatttttgaaaacgagactagctagggataaaacgtctttgtggatgaataatgaagttaacatatataagaaaccatgggattttaacaaaaaaaaaaaaaaaaaacatggatcccgtgacagtctgcgcgcgcgcgcgcagcatagtagaggccaagagcgaatgttatttgattcacttttgtttggttcttttgtcaacattcactctttatttcgatactcttgcttccgtatcatggatttttttattacgttgacaactagaatatatgttttattttttttgaaaaagatactatatgttttatcgttcaaaaaagatgagtcaagtactacaatttacctatcattttttttttttgttaaaccataactttcaaattgatccaatgtttcaggacacttactttcaaagtttatcaacacctattgcattttattttcttaagatattaaattttctgtaattgtttatctaaagcatggttagtattctgattttttgacaaaaggaaaataacgacaacatcactaatatttcaacgttccttttttttcctccacaaaattcaacgtttcattttacgcgcacagatttttattttttctatgtatattttgtaacgatttttttaaaaaaatatttgtaatagttattagtatatgctaaatattgaatacaattaatttgctaatttcctttgtagttggtcatgacatgatatctattggtttatgctagttttattgttattcaattttaaactcaaataatgcatattattgatgaaaagatatactacaatattaaacaaaagttaacatagttactgaggaaaatggaatacggagaaattaagaaatgatatattatgtgctatattattattagtcgcaatgatatctttataataaaacacctattaaagaatatttgtcgtttccagttacatctaagatatataatatatatttttttcctagcataaattcccggaaacagcatgtgatgaaggaatatatcttgaagtttatagttgttgaccaaaaaaaacattaattctattatttctatagttataaatttagttagagtatgaaaaacaacaccatcttattcatgataaacacaagacgtataaacacgacaaaaattctttaagaagagttttatttcgatatgattcaaaaagtttcaaaagctgttatagttcgatttcggtgtgttatccatataactaaaaagttggacagctttcattgaaatatactactcaaagaataagaaattactagatttattatgttgtctcatcatgtttatgacttatatgagtatcaacgtggatgaaagtggtcgcttcttcctcatcggaaatcaaaataccgcatgttcatacaaatcaagaaaattataatttacaaatattgtaaagagctaattattttataaacataggatatcaaatgtggacctaaaaaagtttgaaaatgcaccactcaaataattaatgcatacagccaagcaagtaaaacattagaaagacaaaaaataaatacttttaaacaatttatattatatagtttttcatctcaaaactcaacaatataaaccctattccaccatcttctattccctcacaaacaacaacattgttaagaataatggcaccaatcaaagaattcatatccaaattctcagatttcaaaaacaacaagaaactcattctctcctccgccgcaatagccttgctattattggcctccatagtcggaatcgccgccacaacaacaaaccaaaacaaaaaccaaaaaatcacaactctatcttcgacatcacacgccattctaaaatctgtttgcagctcaacactatacccggagctctgtttttccgccgtggcagccaccggaggaaaagagctgacgtcacagaaagaagtcatcgaagcgtcacttaacctaactaccaaagccgtgaaacacaactacttcgctgtcaagaagctgatcgcgaagagaaaaggtttgacaccgcgtgaggtcacggcgcttcacgactgtttggagacaatcgacgagacgttagatgagctccacgtggcggtggaggatcttcatcagtatcctaagcaaaaatctctgaggaaacatgccgatgatctcaaaacactaatcagctcagccattactaatcaagggacttgccttgacggtttctcttacgacgacgccgataggaaagttcgtaaggcgttattgaagggtcaggtacgtaaatagttttactcttttaaaagtttagattatagtattatcttcgacatacgacttactcggtaaaataatgtagtgattatagttggtccataattagagcacttaactcttcaaatacgtacccaaaacatttgttttactaggaaatcttttaatatgtaacagctttataatattgaacggtatcaaaacaggtacacgtggagcacatgtgtagcaacgcattagcaatgatcaagaacatgacagaaaccgacatagccaactttgagctaagagataagtcttcaaccttcaccaacaacaacaaccgcaagctcaaggaggttaccggcgacttagacagtgatggatggccaaagtggttatccgttggagacagaaggcttcttcaagggtcaacaattaaagcagacgctacggtggcggatgacggaagcggtgactttacaacggtagccgcggctgtggctgcggcgccagagaagagtaacaagaggtttgtgatacatataaaggcaggagtttatagagagaatgtggaagtgacgaagaagaagacgaatataatgttcttgggagatggccgtggcaaaactattatcactggaagtagaaatgtcgtcgatggaagcaccactttccactccgctactgttggtaaatactgttcttctttgattttatttttaaggaattaagtaaacagtagtatcacgtaatagctaacaacacatactgacatacacatttgtttgtatgtaaaaagaatgtaataatgacgcatgtgtaacgttttgttggtagatgataacgtagacacgatcgtaactcatttccacggttaaatgatagtactgttttctattgactgtagctgccgtcggcgagaggtttctagcgcgtgacatcacattccaaaacaccgccggtccgtcgaagcatcaagcggtggctctccgagtcggatcagatttttccgctttttaccaatgcgacatgtttgcttatcaagacacactttatgtccactcaaatcgtcaattctttgtgaaatgtcacataaccggaaccgtcgatttcatcttcggaaacgcagccgcggttttacaagactgcgatataaatgcacgcagaccaaattccggtcagaaaaacatggttaccgcccaaggacggtctgatccgaatcaaaacacggggattgtgatccagaattgtcgtattggtggcacgtcggatcttttggccgtgaaaggaacgttcccgacgtatcttggtcgtccttggaaggaatattcacggacggtgataatgcaatcggatatatccgacgtgatccgacccgaaggatggcatgagtggagcgggagttttgcgttggacactctaacttatagagagtatttgaatagaggaggaggggcaggaactgcaaatagagtgaagtggaagggctataaggtaattacaagtgatacagaagctcagccatttacggctggtcagtttattggtggtggaggctggttagcgtcgaccggttttcctttctcgttaagtctttgaaattaaaagattgacttattattttaataaacattgtatttctctatctacatgtatcattaaatcgatgttcatatatgattctcaagttgaaccaagtcaatgcataactcgggctggtatagttttaaggcctaaataaccggactttacggggtttattgggttgattacttgattctaattcataaattaagataaaccgggaatcaaacacaatgttggtgttgtgtcacttgtcggcattaaagccctaaagagatagagatagggacgccacatgttagagacgcacatggccattttaatatttgctaagataatgttctttgttttcttttaatttgtagacattttcatgtgtttttttttggttctctccaatgtgtatgcttgaaaaatataccgaggaacccatagaattgtaaagaatgttcgctttctatggacctactacggatgtagacgactttgacatatacataatacataaaaccattttttgtctttaaaccaaattacaatataatcaagttgattaatcaaaataattacaacgttatcatgaatcttcacatgcaagatcctacacacacacttagacgacaagaagtcaccgtggaacaagcgcgtcacgttcatcattcacatttacttaatcccacttaaaaaggcaaacaacaacatgtcttctctaacataaacaacagaacataacaaagcccaaacaatcttagtaataatcccaaaaaccagaaaaaaaggagctttgcttttgtaggaattaatggattcagtgaactccttcaaaggatatggaaaagtagacgaagctcaagatttagcattgaagaaaaagacaagaaaacgtctacttctactatccatctccgtcgtagttctcatcgccgtaataatcgccgccgtagtcgccaccgtcgttcacaagaacaaaaacgagtcaacaccgagtccacctcccgagttaacaccatccacttcactcaaagccatttgcagtgtaactcgtttccctgaatcttgcatttcaagtatctcaaagcttccatcttccaacacaacagatccagagactctattcaagctctcattgaaagtaatcatcgatgagcttgattcgatttccgatttaccggagaagctatcgaaagagactgaagacgaaagaatcaaatctgcgttaagggtttgtggagatctgatcgaagatgctttagatcgactcaacgacactgtttccgccattgatgacgaagaaaagaagaaaactttgtcatcttccaaaatcgaagatctcaaaacttggctaagcgcaacggtaacagatcacgagacgtgtttcgattcgttagatgagttgaaacagaacaaaacagagtatgcgaactcgacgattactcagaatctgaaatcggcaatgagtagatcaacggagttcacaagtaacagtcttgcaatagtatcgaagattctttctgcgttaagcgatttggggattccgatacacaggagaagaagactgatgagtcatcatcatcagcaaagtgtggattttgagaaatgggcacgacggaggttgttgcaaacggcaggtttaaagcctgatgtgacggtggcgggtgatggaaccggtgatgtgttgactgtgaatgaagcggtggctaaggtgccgaagaagagtttgaagatgtttgtgatttatgtgaagagtggaacttatgttgagaatgttgtgatggataagagtaaatggaacgttatgatttacggtgacggcaaagggaagaccattatttccggcagcaagaacttcgtcgacgggactcctacttacgaaacggcgacgtttggtgagtcctcttcttcccttgttccttattattatctttgattaagttgttaagattagtgaagaggtcaaatttgatttggtttaggtaagaacaaaaaagacttgacattgttacatagtttaccaatttagctatggttgttaagtttctcttttgatgcagctatacaaggcaaaggatttataatgaaggatattggaatcataaacaccgcgggagcagcaaaacaccaagctgtggcattccgatcaggctctgatttctcagtctattaccaatgctcattcgatggttttcaagacactctttaccctcactccaaccgccaattctaccgtgactgcgacgttactgggacaatcgacttcattttcggaagtgctgcggtcgttttccaaggctgcaaaatcatgcctcgccagcctctttctaaccaattcaacaccataaccgctcagggcaaaaaagatccgaaccaaagctcggggatgtcgattcaacgatgcactatctccgcaaacggcaatgtgattgctcccacgtatcttggccggccgtggaaggagttttccacgacggttattatggagacggtgattggagcagtggttcgaccgtccgggtggatgtcatgggtttctggagttgatccaccagcaagtattgtctacggagagtataagaatacgggcccgggttcagatgtaacgcagagagttaaatgggctggatataaaccggttatgtcggacgccgaggctgcgaagtttacagtggctacgcttttacacggagctgattggataccggcaacaggagtgatcaatcagctatcttaatatagtgacaatacaattggattcgtagcttgtttttgaaaacatccggttgtgatctactttatatttgtttgacacttatgcatgatctgtaattttttccaacatagttgtattttgtgtatcccctaatacgatatcttcttgatgtagaactatcaaagctactcgctttttgtagctcacaccttgaactcgaattataacacaacgatgatactgttactaaccattactcaccttcatatccttgtcatcgggacattgtcgacgatgttactaacaaacgggatgatcataaatccgataaaaatctaattatctgatggcgattaattaggagccggctcctaaacaaaaatctaactcaatactaatctatccacactaaacaaaaccagaataaacaagattaacttgtggagcaagccagaataaatctatccatatagtcaggacaaagccaagtcgaagagcaagtaacaaaacgtaagtggtaggaaaggaaattttataagtcacaaatccgaaaggttattgaatgacatgggagccaaaagattctcttacacaaccgactaaaatgtgacatgatcctcaatctaacagacaaaagtaacaagttttgtgacacaagctgataggtaaattacccaaattgagttttttcaatcaaagacgagcgatgactgcttcgacttcttgtggagtgtagagatgataagctggtgctaccttggcaatatccacgttatttggagtcacctatcaccaaccaatacaattagattgagcaagaacttctgtttacagttttggattgtaaaatttgtaccttttcttccataacttgctttaggatagatacagcgatagtctcagcttcttgtagagacaaatcctgcaacaagttaatgaaactaaaggttttaatggcaaataaagtgatgtaatcaaataatttattgaaaaacaattgggaaaaagttcaagttactttgttgaattgctcttgaagagagctatcagctccttcagaacctgaaccaattgcctttgcattgcactgccagaatgttcctgaaggatcagtgtagtacctgtaacaagacagagtcatttacaagaagataaactaacttacacaagtgaaccatttcagtagaagaaatccaactgaaggagaacttacaagcttggtccattttcatcatggccagcaatgagaagagatactccaaacggccgagactgtagtcacattaatgacaaagagaatcagtacacacaatacaacgactaaatatggatatccaacttatcaaggttttgttctaatcagtaattccaattttgattattaccattgattcttcctctccttcaccaaaccgtaaagccagatcacacagtgcttgtgttgtggactctacagtcatcggctcaccatacgagaatctatggttctgtacaagagcaaaagaagccgtcaataacacataaaagacctgttgaagctaaaagaaaagaccctagagacagaaaccttacttgagtttcaactctagcatgctcaacaagtgtgcgcgcgtcagcaattaaaccgctcatagcacaaccaatatggtcatcaatttccataatcttctccacactgctcggttcctggggaaaaagaaaaagcatttaacatatactgagaaagctaatatcaccataactaacatagaaagcttatatgcttctgcttgatcatatcatcagattcaattcaaattgttccaaaatagtgaatcacaagaaaaattctgaaaaacatagaattcaaagttagcaagcaaaccagcaatggcgacgtgatacgcttctcgacagcaagcacaactccttcttttgtctttactccaattgcagtagaaccaagctgcaacaaaattcaacactcatcagagtctcaacaaaattcaacaatcccttttacaaatttgaaatgcaaactacatcgattaaacaaggaaatgtgagctagaacttgtgcaaataagctaaagcaatcaaagaaaaccgtaaatcaaccattaccctttcttcaaaatttctcgatttccataggaaactaacaaattgaggaatcgaaaagttaccttgatagcttcaatggcatattccacttgaaatagccttccttctggagaaaaagtgttcactcctctgtcatactcagttcttcgcacaacaaaatcagaaaccaccataagcaaaacaaacgattgaagtaaaggaagaaaatttcaatgaacccagaagtagatagagatacctagtgagaaacatcttcttcttctcttccgatttcgatctgcaaaacctcttaaagtccttcgcacaacggaatcaaaaccctagaaaaacaacggatctgagttaatccagagattcagagaaaataaaaatcatcacaatgaacttgttgagagtatagaatcaaaccagctaattgatctgcgaatcggagaataaacagaagcttttgctctctttttagctttcaaagacgcacttcttcttgaagaacaagttagattgtttctaaacgcagcgttttttataatgggctttcatgggcctaactatattaagcctgggtcacccaattaggcctttctttgtatttttgaaaaattatgagacagctatagaactgactggaatttgaacatgttccaatttatctcaatgtcagaagttaagtgtaacaataaaagaaaaagacaaaaattggcagtccaggttattatttttttgctgtacacaaataaatgttttttttagaaataattagttttagtgaataaaaccaaacagaaaagtacaaaataattgaaagagtgttgtctcgtaaaagtatgggaacgatgaaaagctgtgacttgttgcgagacttcttctccttccagacgcaaaagtttgtctttggtcagtctctcttatttctctaaacacttttgcatgataacaactattcgaatttcgttactaaaagacaacaagaacaaaactccttatatatattaatggaaatagtcttcactagtgtttgtgttttttcctaccaattttagaactccaaaaaaaaaaaaaaaacttatatattctagtgatttgttctagtacacttatgtttaggttttggtttcgatctctttcgatttaggctttaaaatttctgttttgtaatgtgttcatgtttcccctttatagggttttagactccaaaaaatttacgttttcctccagctttagttttcaaggacttttctctcgtacgtcgactttagtttccgatgacttttctttcgtccatcggcttagcttcccttgtttgaaatttgtatttcaccatggttccaaaacaagtttcagatgaaagaaaaaaaaagttctagtacacttattttataccactcaagttcaacgcacaaaattacaattctatgttcaactttttttcgtttaattctgcaaattaatttacagaaaaaaatccgtttttttgaaaagaagttttgcgattcgttattccatatcggctttttactttcttgcataaacaataaacgaacatacatgttgataattgaaacacataaacagtaatttcttgtgtttgtttatgtgtattttactctcttttactttgactgagttaatgacaagtattattgcaaggtagacaaccacatgagctacggccggtaaccaaatagcctcggcggtttgtcaatttcctcgccgtctcggccgctttctgcatctgctcaacatgttgctgcctcgccgtagctctccaatcttctgctctccggtgcaccatatccattctcttcattaatttctcctctaaatttgatctcatcttctgtattttcacctacaacaataattaccaccccaaatatcacacattaattatttaaaacttcatcactcaactacatttatggactattaattatgattatatagctagataattatgattaatagttaataattaaattttagtctccaaattctcaagagaggaaattactaattttttcacatgggacttgcacaaattacaagtacgactatcatgtagctactacataaccaccaaaatcgcagacattaattcttgaaaattaatcatttcaatatagctacatttatttttaaagtttaatccaaattatgtagctagatgatagatgattgataatttaatctaagactccaatttcccaagagagtaaatcaatcttttcacatgggacttgcacaaattacaagtacaggctacaaagatgtcatcccaattttaaaattagaaactcaaagacttttgcctaataaagcaacaaagactagtcaatgaaactaagtaaaggactccgaacattactctaatattggcgcgtggctccacaattccgttagaacataacaaaatccgtatttctacaccgtatatctcaacaaaatatacgtatacacatacacatacctcaagctttctagattgagcttcggctttagcgttttcaagattaacccatgcttgaattttggcctcttctctttgataccttcaaaaaaaattcaacttttcaattttcataatttcatcaagattttttttttcaccatcgtcaagattttaagttcagacctttgacaaaacttgatcttgtcgtcttcatcatcccataaaggagctttagattcagacacacttctccttaactcactctccatatcgaaatgtcttaaactcttcgatatctcttcttcttcttcttctctcgagttccaatgactcgtcaccgagtaacaatactgactcgttgatgacccactgagtctaagcttgtcttcgaactcggatatatctataacgtttttggtttccgttaacggaccagacaattgagaaggcgtgttgtgtctcgctggagaggaacttttaaacggcgtgtgacatcttgaagtcgttacacttcctattggtgtcatctctgttcccatgtctctgtgttgaacttgagcttcctcgtaccggagaaacttgtcggaatctttgaatataaacccttccgttgatggaagaatctgaggaacttcgtttgctaacttatctaaaagaacacagaactttcaattcatcaaaatgatcaaaacttttcaagattctattagaaaagtttcttctttttatatacctttaaggataagatcttgtggagataatgagacagatccatggaaacattcttctgtaaccctagatttctctgagtatacaacttccacctacaaaaacacattcttgatttcaattttactgctacattctcatttaaagattcgaactttataagggttcttgcagaagcaaacctggtgtttaaacccatcaaattggttgtttttgagagaatgtgctggagagtcatgaccagaggaagtgacccatttctcagcatcaatccatttagaagggaagtttcttcttctaccagagacattgctactgaaactgaagactcctctacctggagtacaaggagactccattaacatcaatcttctttgtccattgcttcttccttctccaatgctcttttgtgatgagaaacttggtcttctctcgtttaccatctcattgctgctactactgctttggtttgatgaaattggaagtgacttgatgaaatctgtagtttcctttagattgattctgcttgtaagtgagtcttctgcaaatgggttggcgctaacatttgagtttttctcctgtaaacaaacaaacaaagagagactcaattagaacaatgaaaagaagatactttctgagttatgtaatcaaaagacattgtgttcttttaccatattagggggaaacagaagctgagtttggggatggagcttggtgttgctgtttcttgtgaagtccatggagttttcttttgttttgtttctaccactgttggattattttggtttagttgttgtctgcatctaatgttgttgttatattggttttagaagagtgatgaaagagaagttgtaggaaaatggcatttgctttttagatgtctatagaaggaaaaaggcttgaccagtttttcagagtagaccattataaagggtactagttttatgaaatagcagtacacatttagattttcattattctttatttttttgttctatcattttcaacttgttgttttatactactctttagattctgatatgcatcactataaaatgacaaaattgtggataataaacaatgtttaaaaagaagaagatggtagaatggctaaacaaacaaacaaaaataacaaattctaaaacaacataaatttttctgatagtttactttaaacttaaacacatgtttgactctaagaaaaataaatgtatattgtaatcactttaatcgtgttctcatttcatatatacagaattatggacttatattgataaatgataatactagtagcaatataagtcctatttttttttataaaaatagatgtcgtgttttaaaaacaagaacttaaacttgttgagttaaaccatggttggcttaataaattgaaggatatatatcaaactgaactaaatagatttggatagtaatttagtaagcagaaagaattggaataggtaagccttttaacaaaaaagagaagaaagaattggaataggtgaagaagataacagtagagtaattagagtagtagtatatagagtggtcatggacgcttcactcttgggagaagtacgaatgcatcaaaagatgtggcccctgtctctatattcgtaaaatgattatcatcacaatatcatataaaggcccatgggttaataaagactataaagggcccgtagagtgatctcagaaacagcttttcttattatttgagaagtttttttttgttgtctgctaaacttgtaaataacattgaaaatgaagtggaagtattacaaaagcattacttaaactagagtaaccttggccaaaaagaaaataaaaaacaaggttacaatacttagaattgatgatagaaatttatctgatccaaagtaacattagagatctctaacgcttccgaaagcgccttcccgtaatggtgttgcgaatctcgatcaattatttgagaatatccacaccaaaatccatatatttatttcataaataaaaatgtagattgttttggtattcaagaccagatctgatttctccaaaaactttaaaacttcgggttcaactggttgagctattccatctcaggtaacaccgtaaaaaaacaagatatttttttgcacatgtttcaatcatattaaaaaaaaatgcaagatcttttttagttaaaattttgtatgtgaacaaatgaatattaattgctaagtttagttgacaaaaaagcgttgacgaaagaaaaatgctaagtttctgtgaatgaaaatgaaaaaataaaaatatctaaatttatttgcaaagatagattttagagagaaaaatctacaccacaattttcaaaatatgattaaacaacaacttataacatctaatattatgaattataacgtatggacctgatcctgaaatgatatggacgtaacttgaatctgtttctagctttagctagtttgtctgctactcgattattacacccatcaagtttgacatatttctgtcttttcttcaacataaatcacaagctgttgctagccaccttcaatgatgatcaaacggattccctgacatcaaagacattggtaatgcgtgaaggaaactgaaatctttagcttcaataggatttacgctctttgatatgtccaatagatgaacttcttgcaaacatgaagacatctaagtcgtctcgagctatccaacccaaacccattggagcattatttgcttctttaaaactgcaatcgtggttgcattttctccatccgttagatgggtggtgccaagttcaagttgtatttgcctgattcgttgtaagggaatgttatagatcgttttggtacttatctcctgggatattcacattcgtccactcttttacaccgtctcgtacctttctcacatccgctaggagatttttatatatcctgaaaaattcaagtaattttcttaatttccaaagtatctccaaataggccaaaatgtgaaagcaacgactcaacattgtcttctaggttgcaacaagtatagtttaattaattgatgatatagcgggacgttggaaatccttcaagcagccaaaatatgtgaccaattgaagaggacgtgatgaattgtctccctaacttggcaccatcgttagcaacatggggtcaatggttattcctatagaacttctttttgtgcactatcatatcaagaaactgtcagcatttaccagcaacgagaatgcaaatgcaatgaaccgaaatggacgaccatttctaagcttatcaactaatagttctattactatatactatattgtatgtgacgatgtgcacgatatatatttttctaatactcgaatctcacacgtgacaacgaccttacgtgtatgtacgtgttgaatagaattaagatacgttttataaacttctcttatctcacatattcaacatgtggatgaagatcttcgtattttttattttaatttttatgatacacccataaactgaattattactagctagtagaggctataaatacgaagaagatatctatatatatactatctatcagtgccaaaaaaaagtttttcaatatatgcaaatatacaatcctatttctccggtgaaaaccatggtgaagatttatcctcacctggcgtttccggtggatatggacgtcgtacaagacaagattttgccctacttaacgacggagcaagagaggttcacgatttggatgaaatctttggtgttcaatagcaaaggctgcacagtttttgattccaaaggaaacttaatctatcgagtggataattatgattccaagagttggagtaatgaagtttactttatggatttaaacggcaaaattttgtttactttacgtcaaaaggtaatactaaacatttcatcaatgttttctaagaatttataagttcctataattattattttattttaccttgcaagttcatttttgttgtgtgcatgtatatatatagaaactgggattcttcaaatcttgggaaggatataactcaaccgggaccagatttcgactaagaaagattttcaagattttgccaagagaatcatcttcgtcttacaaagttgtaatgggatcacgcatagttgatggtgatcaacaatcttgttataagattgtaaatcgtggatcagttttcgcaatcaaggatggatcgggaagattaatggcagaagttaaaaacaaactatcggatattagtggtttggatcttggagatgatgttttgacaatgatggtggagccacaactagatcattctttaataatgggtattgttatagcttataaacttaccaaatgtaaattgtgataatcaggtggtaatcttgaaggtaagcatgttttaaagctaattaaacgttggcataaaccccaaatatctggcttgaaattggatattgaaaagattgcaccagaatgcggagaagctcggcatcgttcatcctcataaaagtcaaaacaaccaatcagttctctctttttttatattttggtatggaaacctaattctcttacttaatattcaatccattcttttcctccaacttcttcgtaaatggcggatgaaactataaccctgtttcagcttattgccaaacccgaaccgcgcaccatggaatagtactgatccaacgagtatgtttgaacaagctcaagctgccattcaatcatcgctatcatgaccgtgattactcgttttcccggtcgtgagaagaccctttaagcgtgatttttatacggatgtatgttttactaatactagtaccaattccacaacataaaccaaaagtgttttgaaattagggtcatgtttctgttaacaatatctttaactagctgagttaaccataattgaattactaaaatatttatcaaactgaattaaatagatttggatggtaatttagtcagcagaaagaattggaattggtgaagaagataatagactaatagtaaaggggtcatggaagttatacgaatgcatgaaaagataatagagatatcaatcatacgattttattaaactaaaggaccatgtgatcagattgtaatttgtaatagcagaatgagccatctcatattccatacatggttttaaataggcttgtccatttcggtactgttcatatactgtatgttccaatttttatcccatatttgtgtgtttaaaaaaaataaaaatagctacttgaaattgtttatagaatgagatatatatatgtattattcgtttggttattcagcttttataaaattaatgaaaatcatctaaatatgtaagtttttcagaaatacccgtatcgaaagtgacctttaatttaaccgtcccgacatcaagccttacccaaattagtaagaatttgaataataaattttgctacttaaatttcttgaactcgttccgcgacccaaaattctcgtccctatcttatcgaaaattgtcatgaatgttttttgttatgtgaattacttgctctcgatttatgtgttattttactgtcctgatatcaagatgtacacgcctagttttaagtggcaacaacatataatttcttacgcatgtttcaattttcaaacacaaaaaaaacgtaacctgtgacactttgacattattttttgggtatgcgaatgaattgaaattaatttatagtgttctagagaataaaagaaagtgccctaaaagaaatgatatcaaatttatttgcaaatacaaagaaaaaaaaaaacacaatttttgcaaatataaacaatagcttttacagttaatcttcctgtcaaaacattcttttgtgcagtatcattccgataaactgtcagcattggacaacggatagaacacaaatggaatggaccacaactgaagaccgattctaagcctagcaactaataatttgaagttatcttattatattgtatgaacagttttttcaatattttttgctctattaatcgaatctcacaatcacattagtcacgttacaacgaccagacatgtagtaacaaacaaaaaggaccatacatttttttttgtttaacaaaaacgaccatacatgttatcgctacatgattttctctgttatttttattttgtatctcacattgaacatgtggacgaagaccttcgtatatatatattttctaatgacacaccaaaaactgaattactactactagtagaaagtatatataaatgcgaagaagacatataactatcattcagagccaaacataaaaaaaaatcaatacatatgcaaatatatagcaacaaccgaacgatgaggaccaaattttcacttaatctgatttctccggcgaagaacatggtgaagattcatcctgacaaggcgtttcctgtggattttagcgtgggagaaggcaagacttcgccgtacttaacgacggagaaagagagtttcacgatttggatgagatctcttgtgtttcatagtaaaggctgcacagtttttgattccaaaggaaacttaatctatcgagtggataattataactccaagagttgtagtgaagtttaccttatggacttatacggcaaaatcttgtttacattacgtcaaaaggtaaacaataaaacatatcatcttatgttcttatagttttcttaaaagtattttgttctaactcttttattttcttggttatagaaattgggattattcaaatcttggaaaggatataactcaaccgggacaagatttcaactaagaaaaaacttcaagatattgccaaagggttcatcttcatcatacaaagttgtaatgggatcgcgtatagttgatggtgatcatcaatcttgttataagattgtaaaacgcaaatcggttttcacaatcgaggatggatcaggaagattattggcagaagttaaaaagaaacaatcaaatatcaaaagtttagatcttgggaaagatgtattaacaatgatggtggagccacaagtagatcactctttaataatgggtattgttatagcatatagtcttctcaaatgtaaattgtgataattagtaggggtgagattgaactattgtgtaaactttagggtcgtaaatgtaaatatacaattttggagagccaaatgataatattattgttaatgaagttcttaaagctaaattaaatgttattacaggcatgaggcataaaccccaaagtctctagcttgaaactgagattttcgaagaattcatcaaaatgtggagagaatcggcttcgtttatcctcgataagcatcagaacaacaaacccatttctctaactcattcaattgattctcctccaccaccatctgcttcaatggcggatgaaaaccctaaccctaatcctatttcggcttattaccaaaccagagcggcgcatcatggaattgtgactagcgagtggttggagcaggctcaagccgcggttcgacgttaccctgatcgtgattccttagtttcgggaagaccctttagcgtgattgaggactttaatagttggagacagcaacctgatttggcggaggctgttgcggcgattcgtgctcttgcggctgttattagggctagtgaagctactactatgatggaacttgaaattgaactcaagaaagcttctgatactctgaaagtaagagactttcttctttgtgttgaaatttgggttctgaattttggatgactctgtattgtgattcaatctttaacgaactcttagcattgagtattttggttcatgccctgacgataacttaggattagcttgcggcgtaaatggtagatgtgatcatcatcgtggcattgcattgacttgtcgagttgtgaattttgcttggcattatatgtccgagtaatctctgcattgtggattttattgatggtgttaagaatctctggttgctctatttggaaagataggttgaaagtttaatctttttggatatcttgatgctgatgcttctggttttacttcacttcttctgtgatgctatacttctttgaaatattctgtttgttttgaaatgagcaattggttgtttcctttgatttgagtgtcagattgtacatttgagtcctgctcaaatcgtagctttcagtttttaatgaacatgctattagtttgcaacttagcattgattattttgacaaaaaatcaggtttagtttgtgtcaaaatggtagatgtgattatggcattgcattgacttgtagagttctgaattgtacttggcatttctgcgagtttcttgatcgctaagactctctggtggctctaaagggaaagataggttgaaagttttatctttcctggatgatgtgtttatggttttaatttacatcttctatgatgctatacttctttgaaatattatgtctctatggaaattggtagctgatggatttcgttagtcctgagtgtcagatggtattatttgagtagctttcagtgttttcgaggtagaactctaaaaatgtaagattgtcttcatgtttcagtcatgggacacaacgtcgatatccttaacagcgggatgtgatctattcatgcgctatgtgactcgaacatctgctttagaatttgaggacttcaactctgcgaaatcccgtgtgcttgaacgtgctgagaaatttggggaaatatcttgcaaggtcagtgttctcttcgaacgggaattgtttacataaatagttagtagaagaagagtttgaacagtaactggaaattttgcaggcccgaacgataattgcaatgcttagtcaagatttcatatttgatgggtgtactattctggtccatggtttctccagagttgtgtttgaaatactaaagacatcagcgcaaaacaagaaactctttcgagtgttgtgcacaggtacttttcttaagacttagagatcaattggatatgacatcttccagttatctcattctgattttcctaactgacaatcacatttccgttgcatccgtggaaacaaaatacagagggaaggccagataaaacaggtgtactgctagctaacgagcttgcaaaacttgatattcctgtgaagcttctgatcgattcagccgtggcctatagcatggatgaagtagacatggtgtttgttggagctgatggagtagttgaaagtggcgggataattaacatgatgggaacttaccaaatcgccctagtcgcacagagtatgaataaaccagtctatgtagctgcagagagttacaaggtaacctcccaaaactttaaaagttttaaaaacttgattgcaaaaacatcaatgatccatcatcttctttcttgttttcttgcaagcgaagtttgcacggctctacccgttggatcaaaaggacttagaaccagccttgcgacctattgatttcagtgttcctgttcctcctaaggttgaggtagaaagatctgcaagggactacactcctcctcagtacttgactctactcttcactgatcttggtgttctcactccatctgtagtaagtgacgagcttattcagctttacttgtaagtgaagctgtctaattcctatagctggtctgaaatctctcattttttgtataaaaataaaaacaaaaacaccatatttttggctatacacagacatagtttgtctctgattcttactgctaatgcacattttttttggtagtagcgagatctttgtgacttgtcatctttactcaaaatttatcacccaagtttcaatatatagttactagtatatattatagtatgatcatttctggtttttgatttcttgattagagatatgtattgctatattgttttattattgttagaatcatttgtgtttttttgcaaaagtatatatatccttttaacactttaaaatgtttgcacaaaaaaaaaaatggtatggtatgcgctggatattgaaaagttgcaattattgcagtgtagtgataaatgacctataatgtaacatggaatatcatatgatttgatgttttgaaaatgagagcatgagaaacgtgatagaattaaagatggtaaattcttagtattattttaatgcttggtctaagtaactactccctctgtttcataatataagttgttttggaacaatttttttgttttactatataagttgttttcaagtttctatacaaattatatattattttaatattttatgattatttatgttatgtagtctcttttgtgattagtagaattttttaaaagtaaatatttttaatttgcgtgtttttatttaaaacaatttatattgtaaaacagatggaatattattataggctataggcctatagctaatgtttggatctaactgctaacgttgtaagattcataaaacaccggccacttacaatcccacgttttttttaaaaatattacgttctttcctggaattacccatatacacgttttttttgttatcttcgtgctcaactgtttacaaaagtatactgtattcgggaaggtgaaaaaagataaaattatttcggaacatctaatatactaacacaataaatgaaattaaaaatatatttgtaaagacattaaagatggcaaatatatctgtccacaccacattttaattcttttttatatcattagtctataacatttgattaagtttcacgttttagaaaagtgattatgtataaactaaaaatataaatagattactttacaacaaacttttttttagcattttacatttgttcatttaacaacaactataacatattgaattcgagtttttttttccttttcccaatcattccattgaatgtatgagtttaggtcttagggttattttctgatgaatagcaaaagtagtaattcccgacaagaaattggccaatgtcgaaaaagtcaaattccacattttaattgagacataaaagacacatcactcaatacagtaaaatatctacttttatatattcccaaaaaccattcggcttctgcttccacttcatctctctctctctctcccttctcacatttctctccactcagatttccaattcctaaagatagagagaatgactaaaatctctgttggattgcaacttgtgacaagagattcgagggaaaaactaaacaatatagtgatcaaatcttcactgagactaaaccgatccaatccaaacatctcggagctttgtttccttaaaacatgtcatctctgcaataaacaactccatcaagacaaagatgtttacatgtacaggtacgatatttttttttttttattactatattatatactctttgtaaacgaaagatgttctgttcttgattctcaattttttttttttgttgaaaacagaggagatttgggattttgtagtagagagtgcagagaaagtcagatgttgattgatgatagaaaagaactagaggcttcgacgaagatgatgttggcttcgtacagacgatgtaataacggcgccggaaaaagcgagtctcggaatttgtttgatgatctccggcgacgacgtcaattatttatagttccttgaggcttctttaagcaatatctaattatagtttttttggttacacatcttatgaaagttattagtaaaagaaagagaattaaattgtatctccggttgtcatttttcaaaatcttaaatgttaattggacagtttatgtggtgatctcattctcaggtggtttaattactgatttagtaaaaatgctcattaattagttaggttaattgtagctgttgaccaaaaataaagattacttgtagtcacacgttaattagtgagataattaaatgatacaaagtgtcatatgagatatgactcatatttcataactaaatctgattaattcgaagaacattttaatattcagattggatcgtgacatgatggatatgaactggataaagaattattttaaagaagaaaatctctctgataaataaattattcgatttgcttcttttttttttatgtatgggagatattttaaatgtatgtgacagggacatagacactctttggttgagaagatatgaacaactcatttagtcacgtgttgaatatgtacaggccaaaatactgtattttaaacaattggaattattgttttacttgtcaagtgatcactttgttcaacccaattccccaactaatttattgttttatagtgtcacactgtcacgagtaactaagcaggttcgtggtctcggcccaattaaaaggccaatcaattaaactaaatgcaagtgcctataactcgacctatgaagcccactatcttagcgattcggcccaaaaagacaacttgccttgtgtaaaatgatttcactttgtatccatccaatgattccaattaatgagaagttatgttcagatttaagaattccagttagtgaacaaaaaatcaactactggaatttgttttgcttcttataaatttggttagaaaaacaaaacataaggtttatatctataaacacaaagaaattgtactaatgtacagttccgaaacgagtatagtcaattattaaaagttaaaatagtgaaacaaataattgctccatgaatgacatattgacatcattatctgtttctttgagataagctaatttaggaacttgtctcaatcctgtaaaatgatttggaccctacctattttattcatctgtctttctttgcgttcacaatttgatcttaatatataaatatatagtacatgattgcactaatatatatatatatatatatatatatatatattatatgtagtataactatacacgtatgaagttgaattttataaaataaaattttcttttaactgaatttccaatagttgtttatacataatttagaaagttgcaaccataaaatatatttcaccataaaacaacaaaatatggtttccacgtacacatacacataacacatacctactgaatattccgtaatttacgatgcctgataatttggacctaataaagttagttaagagtaaacagaattacaaggaaattttaaattgagtttaagaaaactagtaattgatttggaatgctagttatcaaacaaaaggacaaatatatttttcggattatttttaataacttttttgtttgtcacgaaacgacaaaagctttgtcataaaaaccaaatcctatcaacttgctcaaaaagcttcaataatatcgtacgtgtcctgcacacgcagattcataaatgtgtttctatgcttttacaattttagccttatgcataacagcataaggtcttaatggtcctctctcctaatcaaaattacattcaaaagttgttgtatagtttttcattatattttcaataattcatttattttgtgcctatgttaaaacattttcataattcatttataatattatttaaatttaaatgttaaatatctgttctgcgttggctactcctgaatgcaaacaacattgcaaaagtatttagttgtgtttttaatgcctaatcacattaatagatactagatctaagggaaatagactttatgaaaaaatcaattgacgttaggtaaaaatttgtttagactatttttgtctaccagcagacaactctgactaaatttttaatcttatttactgcaactaactattaataaactaataaaatcctaatttacaatatagatctacagtaaatgaatataaaagtctggtagtaccgtaaatagtacatcaagataagggtataatagtaaacaaccatcgtactcgcttcatcttttattttactctaaaatctctttctgaagaaaacaacaaagcaaagcgttgaagagagaagaagaagcaaagatataacccccaaaagtatcaattagtttccattttcgccgctaagattctgttttcgaacatttacaccctcaagaatcgccgccatgtgtggaggagctataatatccgatttcattccaccgccgaggtctcgccgtagaattggaataggtaagccttttaacaaaaaagagaagaaagaattggaataggtgaagaagataacagtagagtaattagagtagtagtatatagagtggtcatggacgcttcactcttgggagaagtacgaatgcatcaaaagatgtggcccctgtctctatattcgtaaaatgattatcatcacaatatcatataaaggcccatgggttaataaagactataaagggcccgtagagtgatctcagaaacagcttttcttattatttgagaagtttttttttgttgtctgctaaacttgtaaataacattgaaaatgaagtggaagtattacaaaagcattacttaaactagagtaaccttggccaaaaagaaaataaaaaacaaggttacaatacttagaattgatgatagaaatttatctgatccaaagtaacattagagatctctaacgcttccgaaagcgccttcccgtaatggtgttgcgaatctcgatcaattatttgagaatatccacaccaaaatccatatatttatttcataaataaaaatgtagattgttttggtattcaagaccagatctgatttctccaaaaactttaaaacttcgggttcaactggttgagctattccatctcaggtaacaccgtaaaaaaacaagatatttttttgcacatgtttcaatcatattaaaaaaaaatgcaagatcttttttagttaaaattttgtatgtgaacaaatgaatattaattgctaagtttagttgacaaaaaagcgttgacgaaagaaaaatgctaagtttctgtgaatgaaaatgaaaaaataaaaatatctaaatttatttgcaaagatagattttagagagaaaaatctacaccacaattttcaaaatatgattaaacaacaacttataacatctaatattatgaattataacgtatggacctgatcctgaaatgatatggacgtaacttgaatctgtttctagctttagctagtttgtctgctactcgattattacacccatcaagtttgacatatttctgtcttttcttcaacataaatcacaagctgttgctagccaccttcaatgatgatcaaacggattccctgacatcaaagacattggtaatgcgtgaaggaaactgaaatctttagcttcaataggatttacgctctttgatatgtccaatagatgaacttcttgcaaacatgaagacatctaagtcgtctcgagctatccaacccaaacccattggagcattatttgcttctttaaaactgcaatcgtggttgcattttctccatccgttagatgggtggtgccaagttcaagttgtatttgcctgattcgttgtaagggaatgttatagatcgttttggtacttatctcctgggatattcacattcgtccactcttttacaccgtctcgtacctttctcacatccgctaggagatttttatatatcctgaaaaattcaagtaattttcttaatttccaaagtatctccaaataggccaaaatgtgaaagcaacgactcaacattgtcttctaggttgcaacaagtatagtttaattaattgatgatatagcgggacgttggaaatccttcaagcagccaaaatatgtgaccaattgaagaggacgtgatgaattgtctccctaacttggcaccatcgttagcaacatggggtcaatggttattcctatagaacttctttttgtgcactatcatatcaagaaactgtcagcatttaccagcaacgagaatgcaaatgcaatgaaccgaaatggacgaccatttctaagcttatcaactaatagttctattactatatactatattgtatgtgacgatgtgcacgatatatatttttctaatactcgaatctcacacgtgacaacgaccttacgtgtatgtacgtgttgaatagaattaagatacgttttataaacttctcttatctcacatattcaacatgtggatgaagatcttcgtattttttattttaatttttatgatacacccataaactgaattattactagctagtagaggctataaatacgaagaagatatctatatatatactatctatcagtgccaaaaaaaagtttttcaatatatgcaaatatacaatcctatttctccggtgaaaaccatggtgaagatttatcctcacctggcgtttccggtggatatggacgtcgtacaagacaagattttgccctacttaacgacggagcaagagaggttcacgatttggatgaaatctttggtgttcaatagcaaaggctgcacagtttttgattccaaaggaaacttaatctatcgagtggataattatgattccaagagttggagtaatgaagtttactttatggatttaaacggcaaaattttgtttactttacgtcaaaaggtaatactaaacatttcatcaatgttttctaagaatttataagttcctataattattattttattttaccttgcaagttcatttttgttgtgtgcatgtatatatatagaaactgggattcttcaaatcttgggaaggatataactcaaccgggaccagatttcgactaagaaagattttcaagattttgccaagagaatcatcttcgtcttacaaagttgtaatgggatcacgcatagttgatggtgatcaacaatcttgttataagattgtaaatcgtggatcagttttcgcaatcaaggatggatcgggaagattaatggcagaagttaaaaacaaactatcggatattagtggtttggatcttggagatgatgttttgacaatgatggtggagccacaactagatcattctttaataatgggtattgttatagcttataaacttaccaaatgtaaattgtgataatcaggtggtaatcttgaaggtaagcatgttttaaagctaattaaacgttggcataaaccccaaatatctggcttgaaattggatattgaaaagattgcaccagaatgcggagaagctcggcatcgttcatcctcataaaagtcaaaacaaccaatcagttctctctttttttatattttggtatggaaacctaattctcttacttaatattcaatccattcttttcctccaacttcttcgtaaatggcggatgaaactataaccctgtttcagcttattgccaaacccgaaccgcgcaccatggaatagtactgatccaacgagtatgtttgaacaagctcaagctgccattcaatcatcgctatcatgaccgtgattactcgttttcccggtcgtgagaagaccctttaagcgtgatttttatacggatgtatgttttactaatactagtaccaattccacaacataaaccaaaagtgttttgaaattagggtcatgtttctgttaacaatatctttaactagctgagttaaccataattgaattactaaaatatttatcaaactgaattaaatagatttggatggtaatttagtcagcagaaagaattggaattggtgaagaagataatagactaatagtaaaggggtcatggaagttatacgaatgcatgaaaagataatagagatatcaatcatacgattttattaaactaaaggaccatgtgatcagattgtaatttgtaatagcagaatgagccatctcatattccatacatggttttaaataggcttgtccatttcggtactgttcatatactgtatgttccaatttttatcccatatttgtgtgtttaaaaaaaataaaaatagctacttgaaattgtttatagaatgagatatatatatgtattattcgtttggttattcagcttttataaaattaatgaaaatcatctaaatatgtaagtttttcagaaatacccgtatcgaaagtgacctttaatttaaccgtcccgacatcaagccttacccaaattagtaagaatttgaataataaattttgctacttaaatttcttgaactcgttccgcgacccaaaattctcgtccctatcttatcgaaaattgtcatgaatgttttttgttatgtgaattacttgctctcgatttatgtgttattttactgtcctgatatcaagatgtacacgcctagttttaagtggcaacaacatataatttcttacgcatgtttcaattttcaaacacaaaaaaaacgtaacctgtgacactttgacattattttttgggtatgcgaatgaattgaaattaatttatagtgttctagagaataaaagaaagtgccctaaaagaaatgatatcaaatttatttgcaaatacaaagaaaaaaaaaaacacaatttttgcaaatataaacaatagcttttacagttaatcttcctgtcaaaacattcttttgtgcagtatcattccgataaactgtcagcattggacaacggatagaacacaaatggaatggaccacaactgaagaccgattctaagcctagcaactaataatttgaagttatcttattatattgtatgaacagttttttcaatattttttgctctattaatcgaatctcacaatcacattagtcacgttacaacgaccagacatgtagtaacaaacaaaaaggaccatacatttttttttgtttaacaaaaacgaccatacatgttatcgctacatgattttctctgttatttttattttgtatctcacattgaacatgtggacgaagaccttcgtatatatatattttctaatgacacaccaaaaactgaattactactactagtagaaagtatatataaatgcgaagaagacatataactatcattcagagccaaacataaaaaaaaatcaatacatatgcaaatatatagcaacaaccgaacgatgaggaccaaattttcacttaatctgatttctccggcgaagaacatggtgaagattcatcctgacaaggcgtttcctgtggattttagcgtgggagaaggcaagacttcgccgtacttaacgacggagaaagagagtttcacgatttggatgagatctcttgtgtttcatagtaaaggctgcacagtttttgattccaaaggaaacttaatctatcgagtggataattataactccaagagttgtagtgaagtttaccttatggacttatacggcaaaatcttgtttacattacgtcaaaaggtaaacaataaaacatatcatcttatgttcttatagttttcttaaaagtattttgttctaactcttttattttcttggttatagaaattgggattattcaaatcttggaaaggatataactcaaccgggacaagatttcaactaagaaaaaacttcaagatattgccaaagggttcatcttcatcatacaaagttgtaatgggatcgcgtatagttgatggtgatcatcaatcttgttataagattgtaaaacgcaaatcggttttcacaatcgaggatggatcaggaagattattggcagaagttaaaaagaaacaatcaaatatcaaaagtttagatcttgggaaagatgtattaacaatgatggtggagccacaagtagatcactctttaataatgggtattgttatagcatatagtcttctcaaatgtaaattgtgataattagtaggggtgagattgaactattgtgtaaactttagggtcgtaaatgtaaatatacaattttggagagccaaatgataatattattgttaatgaagttcttaaagctaaattaaatgttattacaggcatgaggcataaaccccaaagtctctagcttgaaactgagattttcgaagaattcatcaaaatgtggagagaatcggcttcgtttatcctcgataagcatcagaacaacaaacccatttctctaactcattcaattgattctcctccaccaccatctgcttcaatggcggatgaaaaccctaaccctaatcctatttcggcttattaccaaaccagagcggcgcatcatggaattgtgactagcgagtggttggagcaggctcaagccgcggttcgacgttaccctgatcgtgattccttagtttcgggaagaccctttagcgtgattgaggactttaatagttggagacagcaacctgatttggcggaggctgttgcggcgattcgtgctcttgcggctgttattagggctagtgaagctactactatgatggaacttgaaattgaactcaagaaagcttctgatactctgaaagtaagagactttcttctttgtgttgaaatttgggttctgaattttggatgactctgtattgtgattcaatctttaacgaactcttagcattgagtattttggttcatgccctgacgataacttaggattagcttgcggcgtaaatggtagatgtgatcatcatcgtggcattgcattgacttgtcgagttgtgaattttgcttggcattatatgtccgagtaatctctgcattgtggattttattgatggtgttaagaatctctggttgctctatttggaaagataggttgaaagtttaatctttttggatatcttgatgctgatgcttctggttttacttcacttcttctgtgatgctatacttctttgaaatattctgtttgttttgaaatgagcaattggttgtttcctttgatttgagtgtcagattgtacatttgagtcctgctcaaatcgtagctttcagtttttaatgaacatgctattagtttgcaacttagcattgattattttgacaaaaaatcaggtttagtttgtgtcaaaatggtagatgtgattatggcattgcattgacttgtagagttctgaattgtacttggcatttctgcgagtttcttgatcgctaagactctctggtggctctaaagggaaagataggttgaaagttttatctttcctggatgatgtgtttatggttttaatttacatcttctatgatgctatacttctttgaaatattatgtctctatggaaattggtagctgatggatttcgttagtcctgagtgtcagatggtattatttgagtagctttcagtgttttcgaggtagaactctaaaaatgtaagattgtcttcatgtttcagtcatgggacacaacgtcgatatccttaacagcgggatgtgatctattcatgcgctatgtgactcgaacatctgctttagaatttgaggacttcaactctgcgaaatcccgtgtgcttgaacgtgctgagaaatttggggaaatatcttgcaaggtcagtgttctcttcgaacgggaattgtttacataaatagttagtagaagaagagtttgaacagtaactggaaattttgcaggcccgaacgataattgcaatgcttagtcaagatttcatatttgatgggtgtactattctggtccatggtttctccagagttgtgtttgaaatactaaagacatcagcgcaaaacaagaaactctttcgagtgttgtgcacaggtacttttcttaagacttagagatcaattggatatgacatcttccagttatctcattctgattttcctaactgacaatcacatttccgttgcatccgtggaaacaaaatacagagggaaggccagataaaacaggtgtactgctagctaacgagcttgcaaaacttgatattcctgtgaagcttctgatcgattcagccgtggcctatagcatggatgaagtagacatggtgtttgttggagctgatggagtagttgaaagtggcgggataattaacatgatgggaacttaccaaatcgccctagtcgcacagagtatgaataaaccagtctatgtagctgcagagagttacaaggtaacctcccaaaactttaaaagttttaaaaacttgattgcaaaaacatcaatgatccatcatcttctttcttgttttcttgcaagcgaagtttgcacggctctacccgttggatcaaaaggacttagaaccagccttgcgacctattgatttcagtgttcctgttcctcctaaggttgaggtagaaagatctgcaagggactacactcctcctcagtacttgactctactcttcactgatcttggtgttctcactccatctgtagtaagtgacgagcttattcagctttacttgtaagtgaagctgtctaattcctatagctggtctgaaatctctcattttttgtataaaaataaaaacaaaaacaccatatttttggctatacacagacatagtttgtctctgattcttactgctaatgcacattttttttggtagtagcgagatctttgtgacttgtcatctttactcaaaatttatcacccaagtttcaatatatagttactagtatatattatagtatgatcatttctggtttttgatttcttgattagagatatgtattgctatattgttttattattgttagaatcatttgtgtttttttgcaaaagtatatatatccttttaacactttaaaatgtttgcacaaaaaaaaaaatggtatggtatgcgctggatattgaaaagttgcaattattgcagtgtagtgataaatgacctataatgtaacatggaatatcatatgatttgatgttttgaaaatgagagcatgagaaacgtgatagaattaaagatggtaaattcttagtattattttaatgcttggtctaagtaactactccctctgtttcataatataagttgttttggaacaatttttttgttttactatataagttgttttcaagtttctatacaaattatatattattttaatattttatgattatttatgttatgtagtctcttttgtgattagtagaattttttaaaagtaaatatttttaatttgcgtgtttttatttaaaacaatttatattgtaaaacagatggaatattattataggctataggcctatagctaatgtttggatctaactgctaacgttgtaagattcataaaacaccggccacttacaatcccacgttttttttaaaaatattacgttctttcctggaattacccatatacacgttttttttgttatcttcgtgctcaactgtttacaaaagtatactgtattcgggaaggtgaaaaaagataaaattatttcggaacatctaatatactaacacaataaatgaaattaaaaatatatttgtaaagacattaaagatggcaaatatatctgtccacaccacattttaattcttttttatatcattagtctataacatttgattaagtttcacgttttagaaaagtgattatgtataaactaaaaatataaatagattactttacaacaaacttttttttagcattttacatttgttcatttaacaacaactataacatattgaattcgagtttttttttccttttcccaatcattccattgaatgtatgagtttaggtcttagggttattttctgatgaatagcaaaagtagtaattcccgacaagaaattggccaatgtcgaaaaagtcaaattccacattttaattgagacataaaagacacatcactcaatacagtaaaatatctacttttatatattcccaaaaaccattcggcttctgcttccacttcatctctctctctctctcccttctcacatttctctccactcagatttccaattcctaaagatagagagaatgactaaaatctctgttggattgcaacttgtgacaagagattcgagggaaaaactaaacaatatagtgatcaaatcttcactgagactaaaccgatccaatccaaacatctcggagctttgtttccttaaaacatgtcatctctgcaataaacaactccatcaagacaaagatgtttacatgtacaggtacgatatttttttttttttattactatattatatactctttgtaaacgaaagatgttctgttcttgattctcaattttttttttttgttgaaaacagaggagatttgggattttgtagtagagagtgcagagaaagtcagatgttgattgatgatagaaaagaactagaggcttcgacgaagatgatgttggcttcgtacagacgatgtaataacggcgccggaaaaagcgagtctcggaatttgtttgatgatctccggcgacgacgtcaattatttatagttccttgaggcttctttaagcaatatctaattatagtttttttggttacacatcttatgaaagttattagtaaaagaaagagaattaaattgtatctccggttgtcatttttcaaaatcttaaatgttaattggacagtttatgtggtgatctcattctcaggtggtttaattactgatttagtaaaaatgctcattaattagttaggttaattgtagctgttgaccaaaaataaagattacttgtagtcacacgttaattagtgagataattaaatgatacaaagtgtcatatgagatatgactcatatttcataactaaatctgattaattcgaagaacattttaatattcagattggatcgtgacatgatggatatgaactggataaagaattattttaaagaagaaaatctctctgataaataaattattcgatttgcttcttttttttttatgtatgggagatattttaaatgtatgtgacagggacatagacactctttggttgagaagatatgaacaactcatttagtcacgtgttgaatatgtacaggccaaaatactgtattttaaacaattggaattattgttttacttgtcaagtgatcactttgttcaacccaattccccaactaatttattgttttatagtgtcacactgtcacgagtaactaagcaggttcgtggtctcggcccaattaaaaggccaatcaattaaactaaatgcaagtgcctataactcgacctatgaagcccactatcttagcgattcggcccaaaaagacaacttgccttgtgtaaaatgatttcactttgtatccatccaatgattccaattaatgagaagttatgttcagatttaagaattccagttagtgaacaaaaaatcaactactggaatttgttttgcttcttataaatttggttagaaaaacaaaacataaggtttatatctataaacacaaagaaattgtactaatgtacagttccgaaacgagtatagtcaattattaaaagttaaaatagtgaaacaaataattgctccatgaatgacatattgacatcattatctgtttctttgagataagctaatttaggaacttgtctcaatcctgtaaaatgatttggaccctacctattttattcatctgtctttctttgcgttcacaatttgatcttaatatataaatatatagtacatgattgcactaatatatatatatatatatatatatatatatattatatgtagtataactatacacgtatgaagttgaattttataaaataaaattttcttttaactgaatttccaatagttgtttatacataatttagaaagttgcaaccataaaatatatttcaccataaaacaacaaaatatggtttccacgtacacatacacataacacatacctactgaatattccgtaatttacgatgcctgataatttggacctaataaagttagttaagagtaaacagaattacaaggaaattttaaattgagtttaagaaaactagtaattgatttggaatgctagttatcaaacaaaaggacaaatatatttttcggattatttttaataacttttttgtttgtcacgaaacgacaaaagctttgtcataaaaaccaaatcctatcaacttgctcaaaaagcttcaataatatcgtacgtgtcctgcacacgcagattcataaatgtgtttctatgcttttacaattttagccttatgcataacagcataaggtcttaatggtcctctctcctaatcaaaattacattcaaaagttgttgtatagtttttcattatattttcaataattcatttattttgtgcctatgttaaaacattttcataattcatttataatattatttaaatttaaatgttaaatatctgttctgcgttggctactcctgaatgcaaacaacattgcaaaagtatttagttgtgtttttaatgcctaatcacattaatagatactagatctaagggaaatagactttatgaaaaaatcaattgacgttaggtaaaaatttgtttagactatttttgtctaccagcagacaactctgactaaatttttaatcttatttactgcaactaactattaataaactaataaaatcctaatttacaatatagatctacagtaaatgaatataaaagtctggtagtaccgtaaatagtacatcaagataagggtataatagtaaacaaccatcgtactcgcttcatcttttattttactctaaaatctctttctgaagaaaacaacaaagcaaagcgttgaagagagaagaagaagcaaagatataacccccaaaagtatcaattagtttccattttcgccgctaagattctgttttcgaacatttacaccctcaagaatcgccgccatgtgtggaggagctataatatccgatttcattccaccgccgaggtctcgccgtgttactagcgagtttatttggccggatctgaagaagaatttgaaaggatcgaagaaaagctcgaagaatcgttcgaatttcttcgattttgacgctgagttcgaagctgatttccaaggtttcaaagatgattcgtctatcgattgcgatgatgatttcgacgtcggtgatgttttcgccgatgtgaaaccattcgttttcacttcgactccaaaacccgccgtctccgccgctgcggaaggtaaatatttagggattgactttagtttgagcgattgaattggttagaaattaagtttcgattctatttagctctgttcatagatacctttatctgcttacgattttgattgttgtataaagcatgaggtttgatttgtgtgatatttatatgcatatgaggttgagtgatgagacttgatttgtgtgatgagatttgattagagattgttgatgagttatttatagaagaactcttttgttttgttgttgtttcactactaggttcagtttttggtaagaaagttactggcttggatggggacgctgagaaatctgcaaataggaagaggaagaatcagtaccgagggattaggcaacgtccttggggaaaatgggctgctgagatacgtgatccaagggaaggtgctagaatctggcttggaacgttcaagacagctgaggaagctgctagagcttacgatgctgcagcgcggagaatccgtggatctaaagctaaggtgaatttccctgaagaaaacatgaaggctaattctcagaaacgctctgtgaaggctaatcttcagaaaccagtggctaaacctaaccctaacccaagtccagctttggttcagaactcgaacatctcctttgaaaatatgtgtttcatggaggagaaacaccaagtgagcaacaacaacaacaaccagtttgggatgacaaactccgttgatgctggatgtaatgggtatcagtatttcagctctgaccagggtagtaattctttcgattgttcggagtttggttggagcgatcaagctccgataactcccgacatctcttctgcggttatcaacaacaacaactcagctctgttctttgaggaagccaatccagctaagaagctcaagtctatggatttcgagacaccttacaacaacactgaatgggacgcttcactggatttcctcaacgaagatgctgtaacgactcaggacaatggtgcaaaccctatggacctatggagtattgatgaaattcattccatgattggaggagtcttctgaagagatccagtttcatgtaaataaggctgcatgtttgtgagtttcccgcatcgttcgtttatcaacctccaaaactttctaatgtctgttacttgcatcttcttctgctgtctctgtctgtctctctcaggagttcctgtttgcattgcgagaagccatgagcctctatcttgagggtagttgtgatgaagttaagtagaggcttatttttaggggttgtggtagtttttgttttagtgaatcttttgaattcgtttgtgttttgtttttgttactttatgccccaaaactcctttaacatttgtcataatgtgtttgaacctctcatctgtttaatcaaataaatcttctttgtatgctactaagagtatgtgagaactgttgaacataacaaagaagtcacaagctaagtttgaaccaaaccggttctcgtaaatttgtgatcagaaaaaaagcggtgatcaactgatcatcaaagtgattgcctagagaagtgcgccacttttgttattttgtggtacaatgaatctagagggaacaaacgttgaaacgacgacgttaaacgacagaagaatctctaaaggttgaactctctttttgcaagtggtaactggtgagtttgtgtctttctcgtgaccgtttccttatgataacagaaaataaaagagagtaaattaactcttctggacagttctgcttctttaggtcattttcactctgtataaatatctaagcattagcacacattctttattttttactgaaacatatttatatgtatttggtaatttaatctactgatttttcatataaattgttgttagttaccgtattactgtcaaaatgtagcccaaaatgtaagtgtcaaggtgctttgagttgtgtgatgacaagtttgacataacatttggtttctcctattattgtgaagaaatgaaattatcttatggtgatacttgcattaatattactaatcaaaccatttgacttcttttcaaaagtctttgtatataagtgtggacacacattttatatcataaataaatacatagtcttgtcgacatgtctataagttagatttaaaaagcaaatgatttggtctatataacacacacatcacgagtctttagaattttgtggtgaatgagagagtcaactttaatggagaaagtcacaaggagaactatctcctccttcatcttctttatcgtctcttctaccattctttttctcgccggaaaatcctcggccaaaatttctcataacggtgacaataatgtgacggccttgttcctctttggagactctttcttggatgcaggaaacaataattacattaacaccactacacttgaccaagccaattttccaccttatggtcaaacattctttggcctccccaccggaagattctccgacggtcgtctcatctctgatttcattggtgagaagattatatttcttattattcatatattagctcgtggtcttatttaaagatataatattgacggaaatgtacgttaatgatagcggaatatgcgaatttgccgttaattccgccgtttttggaaccgggaaatagtcaaaagaagctttacggcgtcaactttgcgtctgctggtgctggtgctcttgtggaaacgttccaaggttcggtacgttttttttatcttttactttattttattttaatttctgtgggatttttttagtaatagttttgcattataatgtatcttaaaatagatatatcatttgattgagtttcgtaactttcgtttgcttaattgatccatgagtttgattgaatgtagttaacttttctatacctaaattgttgattaaatgattgcatatggaagtgggttttgagttttgacccgattattgtggctaaattaattgaacaatcttctttaaaatgtagttttttggtcccacctacgatttgttgtatccttttacatgctttatttatttataaagatagtagaattccttttcaattttattaaattgcaaaatatgtagtacccacttacttatttaggacaattagatttttaaatttaaggttaggtcagatatattattctatgttgttcaacgtggtaaccaattcctaataattgtaaggttataaatttgagaacacaattggatcactacaagaaagtggagagattatggaggacaaactttggtaaagaagaaagcaagaagagaatctcaagagctgtctatttgataagcattgggagcaatgactactcaagcattttcttgaccaatcaatctcttcccatttcaatgtctcaacatgttgacattgtcattggtaatctgactacattcattcatgtaagttcatcatcatcataatataaaccttatttttgttacattcatttatccattataagattttgtaacaggaaatatacaagattggaggacgtaaattcgggttcttgaatgtgcctgacttgggttgttttccggctttacgaattctacaaccgaagaatgatgattcttgcttaagagatgcttcaagattagcaagcatgcataacagagctctgacaaatctcttgtttcaaatgcaaagacaagtcaagggattcaaattctccctatttgacatgaacaaaagccttagactcagaatgcaacatccttctaaatttggtaagtgagctctttgtgaattttgttgggctattccacttatgatattcatttaaggggccattaaagtatatgttcataacccaataccatttttgtgataaataaaagggtttaaagaaggggaagaagcttgttgtggaactgggaagtggagaggagtattcagctgtggagggaagagaattgtgaaagaatatcaattgtgtgagaatcctaaagattatattttttgggattcacttcatctcacacaaaatacatataaccaattcgcaaacttaatttggaacggtggacacatgtcagattctctagtggttggtccatacaatatcaataatttatttcagattccttgatttgaatgtattacactataatacacatggaattcaatttagtgttcattttttacaacttttttttcaattatggatccaaaattcaatatatgaaatgtgatgtcatgttttccccggtctctagtgctatatagctaataacatgtttaactggtgagaataacaggtttacactagttagtatggaaaatgatttgtattacaagaatttagacggaacgaatttccctatattgctaagagtgataaaaattaagaaaagctagctttcccatagattatgtagtatatctaaaaaattaggtagaagttgctcaaaagttttttccctctagtgaaccacgctacgagtgaactatttttgtataattacattcaatttatcttccggaccgttcaacaagggcttatatctttcatttttggatgtttacatcaactccaatttatatattcataacgagacaaaaaaaaaaacacatacctggcgagaagaatagattatcgaagatttttacaaaaataaataaataaataaataaaggaaatgaaaaataaaagtagccattattttaaaaccaattgcaacaaacaatggaataacgcacaaacaagaaaggtacaaatactactaattcttttattttattttaaagagataaattaagcaaaaacaagatacaaaacatcttgaatttattaaaactccactagtctttgacaagaaaacagaaatacgaatataaatcctccaaattagccgccaagtcttagagacgctttatcaagtgaaggatcgagtcgttctggatgttgtagtcagctaaagtgagaccatcttcgagttgcttgcctttaaaaatcagcctctgttggtccaccgggatgccttgtttatcttgaattttggccttgatgttttcaatagtgtcgcagttctccacctctaagacgattctccttcctgtcaaagtcttaataaaaataaacatgacttcatgacgaaagtccggcccattatatccaccggttggattttcgccgatattgaggtcgatggttttggagctatcgacctctaggttgatcattgtgtttttgtccacagtatttatagaaagatgcatgactttaccatgaagaatgtccggtggaatattttgactgatcgtcgggtcttcgtcgattttgaggttgacggttttggagctatcaacctctaggttgatccttgttttcccatccatagtctcctgataaatctgtattctatcacgtactcacaagcgaaggtggtaaaaaataaacgggaatgagatctaagcacctcttagactaaagctcatagggggttaatatagatcgttgtgggaatttatttggttaacaattccctatactcatttcatttattgttatgacggctttttggaaacgtcttcttgactgagatgtaatcaaccgttgtgaagaaaccaagtcgtgcgtgactctttggtttcctttccggagatgttacaaatttagttttcccattaattataaaaagacaaaaacaggccgtttatgatactacgattgacctatcagttctgtgggaaaaaaacatctattatagttccattacagtgatttcttaaaaaaattatcaaagtttttacttaaatttctcaatctttctagaccatcacacatgaaggctcaacaacaggaatttggagtggaccatcgaatgttagcggaccttgtaatctcaaatggattgaagtagagtttgtcgatgtatacatatataggtatgaaaataaaaggaagaggttctatcttgtctagtcctagctattagtcatgtactcatgcatgttctttatgtctttatgttgtttataaatagtaataattgatgaacgtttgcaataatatgaacaatctgctcaaaatgtttattttttttaactacaatcacagttacttagaccgcaagaaacctgtattagaagagaaatcatgggtttatccgtttatgttaggcgagagcgtttagttattcagagaagaagagattggacaaatcttgcaggtttcataaattattttccatcattttattaaaatagacagtgcaaacagtcacttggtttcatctctgtgttttatctggttccatctttgaaattagtgggatcctccactataacaaaagtcttaaagaaaacctccactaattttaaatgtaatttccgatagaacaaagtcttaattaaaaaccaaaccacaccgataaagttccaaatgttaccaaaaaaaaaaaaaaaagctgcaaaatgcaaactaaaaaagggtaaaaaaaaacattccagcaacataccaccaactcttcaatctacttaccgaagacgatgcgttttgtttaatcatcgcatgctatgtcagtatgtcacccacaaataaaatcctcatcatacaaagctccgcttgcttagccatcatcttcgtcaatgtgttttccatctctcgcttctttggtccatctttgaccttcccccagcttgcaatccacttggcttcatcaataccaaaacaattcggattctcagccttaacaaaagaaacgaactcttgacaaaagggcttagtactctcgtgactcggtttggtggttgtcttagaaccagaaggcttgctcacaacactggttttagccggcttcttgaaatgctcttctttctttgattcttcaagaggtttggattcctcagactcttcatcagaagaaccagattcatattcaatagaaccaggctcttcttcttcttcggattaatcattcaattttatttcgactcggttatgaagccaagattctgccgcttcgatttcttttaaaagagatctgcaattatacactttttgtgctccctcgaccgttagtacttgttttccacagcacaagttatttttcatgagcctagaatccaaattcctgcttgttgttgtatactagtttccctcgaccatcaagaaccctagtttcttgtcttttaagactaactttcagcttgacacaaagcttaaccaccaaattgaattcgaggggattagggaaccgttaaccaaagacgtttttccccggtttagtgtactggttttgatagagatatttaaatcaggtatataaatcccctcttgtaacatagttcgttatcaatatcagaagtagttacactaaaacgttctgtttctagtggccgtattgtatacaacaataactgcacgtacgcaatgaccacaatgattggattgctcaacagctcaaaatccttaactttttcacaacacttgctttataaggtttcagacagtataggttaaaataagaacaaacgacaacaacataaaattcaaaacaaatgggcagttagaagatctattttacaacactatttcttagaacaacttgaccacaagaaaaaaaaacaattctcatcaatcaaccaattttattgaaataaactattgaaaaaattcaaaaaatatataagaacaaaaacagagcacttgctattatatgaagaccaaaacagaacatttgttttatataaacactaaacagtaataccaagaacacaacattaaacatggaaaactctcgatcaactttgatcatcttctttgcttacacaacaatcatattaatcggttctatcaactgtagagacaacaacaacaacaatctggtaacaaaccaatccgctttgttcgtgtttggcgattctgtgttcgatgccggaaacaacaattacatcgatactcttcccagtttccggtctaattactggccatacggccaaaccactttcaaattccctactggaagagtctccgacggtcgtacaattcctgattttattggtaaggtaacaaaattactctgttttgtttcccggtaaatttttaacggctttttaaaaactaattgccgacgtggcagcggagtacgcatggttaccgttgatcccagcgtatctacaaccaagtaacggtaaaaatcaatttccctacggagttagttttgcttccgccggtgccggagctttagtcggaacctttcccggaatggtaataattatcaaacttgtttatttttattagttgaatcaatgataactgttttgactttctacactcattttttctctcatttttaccactcaaggtgataaatttgaaatcacaattaaacaattttaagaaggttgaaaaattgttgagatctacgttaggagaagcacaagggaagatggttatttcaagagcagtttatctgtttcatatcggagtcaacgattatcaatatccattctctacaaactcttccattttccaatccagtcctcaagagatatacgtcgattttgttgtcggtaacacaacggccgtgatcaaggtaaatcataagttgatggttggattctcttgtggacaaggttgatgatcagttaatgtgagcttgtgtttatgttcttaggaagtgtataaaattggaggaaggaagtttggattcttgaacatgggagcgtatgattgtgcaccggcctcattgattatagaccaaacaaagataggaacttgttttaagccggtcaccgagctgatcaatctgcacaacgagaagcttgagagtggtttgaggcggctagagcgtgaactatcgggattcaaatacgctcttcatgactatcacacttccctatccgtacgaatgaacaatccttccaaatacggtaacaaaaccttttgcaattttatgtaacagattctttagtataactttttttttgtcaacaactatattagattgactcatataagccaatgagtctttagtataaccttgtgaatcattttgtttgatttatagggtttaaggaagggaaaatggcatgttgtggaaccggaccattgcggggaatcaatacatgcggaggccgaatgggagtatctcaaagttacgagttatgcgaaaaagttacagattacttgttctttgatcattttcatttgactgagaaagcacatcaacaaattgcagagctgatttggagcgggccgaccaacgtcactaaaccttataatctccaagcgctatttgaacttaattaagctcaatcaccagttgcacctggattttcatgtttttagtgtgtgtgttttattgtcataatgattgattaatctttacaataataataagaatcgaataagaaattggccatatgtatgacatcttgcagttttcttacatcatttttccttgtcaagtcagaaaaagtttccaagataaacatctacttatgatgagatatttaaccagagtaaaccgagattgtcttggtcaaagattgaatgagatttggcacagtgtgttttcctatattagtagaattctcccactccttctggtttttgtatatttgtttagttggcagttgaaacgattttcttattggatagagaagagaaaatggtgaaaagtcacttatgttttgttcttatatacaaaatcgtatcgaaatttatctcaaaaattgtttttgtcttcttccaaatgagagttcgtctttcttttcttaggaagtgtataaatttggaggaaaaaaaaaaattggaggaagaaagtttggattcttgtatttcgaagtgtacgagtgtgcaccagcctcattgattgtagaccgaaacgaagataaatctgcattacaagaagtttcccaatgtttaacggcgagtaaatcgtgaactatccggattcaaataagcacttcagggttatcacgcttctctatccgaaagaatcatcaatccttcaaaattaggtaaaagatatctaaattgtgtttttgttttgtttgaagggtttaaggaagggaataagacatgtttgtgggactggaccattgaggggaatcaatacatgtggaggccgagtttcggcacaagtacaaggctacgagttatgtgaaaacgttgcggattacttgtttttgaattcatttcatttgatagagaaggctcatcggcagacgacagatcgcagggattatttagagcggacaggccaatgttaccggaccttataatctcaaaacagtggttgagttcaagtagactttgtcgatgtatatatatgatataagtatgaaaataaaagacgaggtaaatatcttgtctagtcctagctattagtcttgttatttgtgataaataatataaacaagatctgctcaaaagaaatttattgagtttggaaaaaaaaaaaaaaatattgaactacaatcactgttccttagaccgcaaaaaacctgcatgggaaattgattttcttggtttactttttaagacgtgttttggtgtgtgaaaaacaaaaagtgatttaagaaataaattattaactaattttattaaatcctcggctcccagtaaatcgatttcattttcattttcaaatatttaggattagaaatcgaccatgcctagtctttagaaaagataaagatgactttaggaggactctttgctaaatggtctattagcatctaattgcaacatttctcattttttataaatttgaaaatttagttatatggttgagatgaggactagtgaaagactatttggttcaacgtgaaaagaaataagggaggaagagtgagagaatatataggaacacgaatattgtatttaaaactctaccaccatgtttttagaacagataagtagctttattttagaaaaaacaaaaaaaaatcagcagatacaaccattctgcataatgacaaggttcgcgtcgggcttgatgttgtagtcagatatggtggcattgttcttgagcttcgtgccaagatggtttagatcctgctgatccactggtgggcctccctgatcatggatcatggacttgagttttttaatggtatcggaccccttcacctccaggataaatgttttctcctttatagtcgatacaaaaatccgcatgagtacagccggaccgagacgcagtaccaattgacgtgtcggctctccattgatcttgaggtcgatcgtgtctgagctatctgcaacctctaggtttatgctcttaccctttactgtcttgatcgaaatctgcattgttaacatgaattctcctagactctttggggttttcttttatacatctttggagagtgagttatttaatttgtttacaatttcccatgttattatttattcgtaatgttgaccgtttatttattattattgtgaagaagcaaatgctgccttttggcgtgttttttttcttcggatatttactttttgcaatttttgtttttcttcagttgttacttgttagtaaactctctgtaaaatcaatatttaaggaatttaggaggttaaattggttgtccacgccttttcaaatttctccttttcggtacgacgataacaaaaagttactcgtgatactttccctccaatggtgaatcggatagctacggagcttcacagcattttatggtgtattgcccgtaataagagtcgttaaataaattttagttagtcataatatacacgatgtgtgggagccatacccttgatagaattacggctcattagtaatttaggttaagattttaaggtaaccgaatcgaggaaataaccgatctcaattatataatctttccgatcggtttcatcaaataaccgaacccgaacagattttcccaaacctcagatgtggacaaaccgggtcgggtttaattcgcagggctaaaagaaatagttgttgagtttcataaatcattatccttgtaacgtcattgaataaattaaacatgcaattttattgattggaaatcgaacaccaagtctttagaaacgataaaaaaaacaaacaaaaaaaacaggaaatgaaaacaagttacattttagcaaccacattgatgtaacgttatgtgaagggtcgactcatgcttgatgttatagtcagatatggctttactatcctcgagtaccctgccttgaaagattagcctctgctgttctactggaatgccttctttctcctcatgcttggccttgagttctctaatggtgtcagaccccttaacctcgtaggtgttggttctccccgtaagagtcttaataaaaatcatcatgatcgcacccgtatctggagttggactcagatccacaaccaattcacgggtcggctctccatggatcttgaggtcgatggtgttggagctatcttcaacctctagctttatcctctttccctccaacgtcttaatcgaaatatgcatagcaaactcaacttttatctctctctctctctctcctctctgtctttttttatacataccactttgcaaagagatttatttgtcttacagttccaataatacttattcgttgttttgactatttttctttggaaacgtggtctttgattaaaagctattaattgatcagtgaagaaaccaaatgctgccccttcgatttcttttttatcttttttttttcaaattttcaatttttgtgttcctcgaccgaatgtagaaggtttacaagttctatcatgacttcataatcttcataaattcgaccaaattttcaatttgaccacaagttttctttatttagtcgaattgacacagcacttgctattccatgacgaacgaaacaaagcattcatatacaaataaaacagagcatttacagtaaaaccaagaacacaatattaattattaaacatggaagacaacaacaacaacaacaacaacaacaacaatctggtaacagaccaatccgctttgttcgtgtttggagattctgtgtttgatggcggaaacaacaactacatcgatactcttcccagttttcgatctaattactggccatacggccaaaccactttcaaattctctaccggaagagtctccgacggacgctcaattcttgatttcatcggtaccaaaaatactatgttttgttattttattttgtttctgaaaatgttatcaacttatcgttgacgtggcagcgaagtatgcatggttaccgttgatcccgccagttctacaaccaagtaacggtaacaaccatatacttatgaggtaaatttttgcctccgccgatgccggagctttagtgggaacatttcccggaatggtatatatattattaataaaaattaatgatcattgcataattgtttgaccttttaaacccttttaaccactcaaggtgataaatttgagaacacaattatgcaatgattatatcaagagatgtttatctgtttcatattggagttaacgattctctgtatccataatctacaaattcgtccactttccaatccaatcccaaagagaaatactgtacgtacattttgttgttggtaacacgaccgctattatcgaggtaaatcatatcaaagtttatctacaaaattgcttgtatgaaaaatcttggtccgaaatttaagagattatgtttcttttctttggaagtgtatcatagaactataaatagaagggaggaagtttggattcttgaacatgggagcggacgattgtgcaccagcctcattgattgtataccaaacaaagataggatcttgttttaagcgagtcaccgagctgatcaatttgcctcttgcttcttcactggtgggacctggtcatggatcatgttcttgacttgttgaatgatctcagatcccttcacctctaggttgaatgttttccccttaagcgttgatacaaaaatactcatcatttcaccctgaggtccctgacccagacccaaaaccagttgacgggtcggctctgcatggatcttgatgtcgattgtctcggagctatcctcaagctctaggtttatggtctttcccttctctgtcttgataagaatcttcattgcaccacctaacgaggaatctgaaaaaaaaacaaaaaaaaagcaaaatcaaagtctgagaacaaatatttgaaatttggaggtttttaaagagaataaaaaatatatttggagacagctaagtcaaggtctcttttatgtttccttttattacccctccatggtttaacattctactaatatttgtttttaccgttctaaagaaacggctagtcttatttgaaatagatgataatattacttatttgacccaaaaagatgattgttacttattccaaaagaaacttgttagttactgctttttactacacacaaaaaacaactacccatttggcaattataaaacttacaagttatcatataaccaaattttctattaatcggtgacgaagaagaatcgaaattttcaagtcgctgcgaccaaacgcgatccacggtccagtttggcggcaagacgtcgctcgttcgctctattctttactattttatcatgtcaaaagtgacacatgcatatgcttttgattctagaaaagtattaatttgaagttttgactaatcataaagctt

SEQ ID NO: 90 - DNA, 89035 bp, Arabidopsis thaliana
gaattcaatttagtgttcattttttacaacttttttttcaattatggatccaaaattcaatatatgaaatgtgatgtcatgttttccccggtctctagtgctatatagctaataacatgtttaactggtgagaataacaggtttacactagttagtatggaaaatgatttgtattacaagaatttagacggaacgaatttccctatattgctaagagtgataaaaattaagaaaagctagctttcccatagattatgtagtatatctaaaaaattaggtagaagttgctcaaaagttttttccctctagtgaaccacgctacgagtgaactatttttgtataattacattcaatttatcttccggaccgttcaacaagggcttatatctttcatttttggatgtttacatcaactccaatttatatattcataacgagacaaaaaaaaaaacacatacctggcgagaagaatagattatcgaagatttttacaaaaataaataaataaataaataaaggaaatgaaaaataaaagtagccattattttaaaaccaattgcaacaaacaatggaataacgcacaaacaagaaaggtacaaatactactaattcttttattttattttaaagagataaattaagcaaaaacaagatacaaaacatcttgaatttattaaaactccactagtctttgacaagaaaacagaaatacgaatataaatcctccaaattagccgccaagtcttagagacgctttatcaagtgaaggatcgagtcgttctggatgttgtagtcagctaaagtgagaccatcttcgagttgcttgcctttaaaaatcagcctctgttggtccaccgggatgccttgtttatcttgaattttggccttgatgttttcaatagtgtcgcagttctccacctctaagacgattctccttcctgtcaaagtcttaataaaaataaacatgacttcatgacgaaagtccggcccattatatccaccggttggattttcgccgatattgaggtcgatggttttggagctatcgacctctaggttgatcattgtgtttttgtccacagtatttatagaaagatgcatgactttaccatgaagaatgtccggtggaatattttgactgatcgtcgggtcttcgtcgattttgaggttgacggttttggagctatcaacctctaggttgatccttgttttcccatccatagtctcctgataaatctgtattctatcacgtactcacaagcgaaggtggtaaaaaataaacgggaatgagatctaagcacctcttagactaaagctcatagggggttaatatagatcgttgtgggaatttatttggttaacaattccctatactcatttcatttattgttatgacggctttttggaaacgtcttcttgactgagatgtaatcaaccgttgtgaagaaaccaagtcgtgcgtgactctttggtttcctttccggagatgttacaaatttagttttcccattaattataaaaagacaaaaacaggccgtttatgatactacgattgacctatcagttctgtgggaaaaaaacatctattatagttccattacagtgatttcttaaaaaaattatcaaagtttttacttaaatttctcaatctttctagaccatcacacatgaaggctcaacaacaggaatttggagtggaccatcgaatgttagcggaccttgtaatctcaaatggattgaagtagagtttgtcgatgtatacatatataggtatgaaaataaaaggaagaggttctatcttgtctagtcctagctattagtcatgtactcatgcatgttctttatgtctttatgttgtttataaatagtaataattgatgaacgtttgcaataatatgaacaatctgctcaaaatgtttattttttttaactacaatcacagttacttagaccgcaagaaacctgtattagaagagaaatcatgggtttatccgtttatgttaggcgagagcgtttagttattcagagaagaagagattggacaaatcttgcaggtttcataaattattttccatcattttattaaaatagacagtgcaaacagtcacttggtttcatctctgtgttttatctggttccatctttgaaattagtgggatcctccactataacaaaagtcttaaagaaaacctccactaattttaaatgtaatttccgatagaacaaagtcttaattaaaaaccaaaccacaccgataaagttccaaatgttaccaaaaaaaaaaaaaaaagctgcaaaatgcaaactaaaaaagggtaaaaaaaaacattccagcaacataccaccaactcttcaatctacttaccgaagacgatgcgttttgtttaatcatcgcatgctatgtcagtatgtcacccacaaataaaatcctcatcatacaaagctccgcttgcttagccatcatcttcgtcaatgtgttttccatctctcgcttctttggtccatctttgaccttcccccagcttgcaatccacttggcttcatcaataccaaaacaattcggattctcagccttaacaaaagaaacgaactcttgacaaaagggcttagtactctcgtgactcggtttggtggttgtcttagaaccagaaggcttgctcacaacactggttttagccggcttcttgaaatgctcttctttctttgattcttcaagaggtttggattcctcagactcttcatcagaagaaccagattcatattcaatagaaccaggctcttcttcttcttcggattaatcattcaattttatttcgactcggttatgaagccaagattctgccgcttcgatttcttttaaaagagatctgcaattatacactttttgtgctccctcgaccgttagtacttgttttccacagcacaagttatttttcatgagcctagaatccaaattcctgcttgttgttgtatactagtttccctcgaccatcaagaaccctagtttcttgtcttttaagactaactttcagcttgacacaaagcttaaccaccaaattgaattcgaggggattagggaaccgttaaccaaagacgtttttccccggtttagtgtactggttttgatagagatatttaaatcaggtatataaatcccctcttgtaacatagttcgttatcaatatcagaagtagttacactaaaacgttctgtttctagtggccgtattgtatacaacaataactgcacgtacgcaatgaccacaatgattggattgctcaacagctcaaaatccttaactttttcacaacacttgctttataaggtttcagacagtataggttaaaataagaacaaacgacaacaacataaaattcaaaacaaatgggcagttagaagatctattttacaacactatttcttagaacaacttgaccacaagaaaaaaaaacaattctcatcaatcaaccaattttattgaaataaactattgaaaaaattcaaaaaatatataagaacaaaaacagagcacttgctattatatgaagaccaaaacagaacatttgttttatataaacactaaacagtaataccaagaacacaacattaaacatggaaaactctcgatcaactttgatcatcttctttgcttacacaacaatcatattaatcggttctatcaactgtagagacaacaacaacaacaatctggtaacaaaccaatccgctttgttcgtgtttggcgattctgtgttcgatgccggaaacaacaattacatcgatactcttcccagtttccggtctaattactggccatacggccaaaccactttcaaattccctactggaagagtctccgacggtcgtacaattcctgattttattggtaaggtaacaaaattactctgttttgtttcccggtaaatttttaacggctttttaaaaactaattgccgacgtggcagcggagtacgcatggttaccgttgatcccagcgtatctacaaccaagtaacggtaaaaatcaatttccctacggagttagttttgcttccgccggtgccggagctttagtcggaacctttcccggaatggtaataattatcaaacttgtttatttttattagttgaatcaatgataactgttttgactttctacactcattttttctctcatttttaccactcaaggtgataaatttgaaatcacaattaaacaattttaagaaggttgaaaaattgttgagatctacgttaggagaagcacaagggaagatggttatttcaagagcagtttatctgtttcatatcggagtcaacgattatcaatatccattctctacaaactcttccattttccaatccagtcctcaagagatatacgtcgattttgttgtcggtaacacaacggccgtgatcaaggtaaatcataagttgatggttggattctcttgtggacaaggttgatgatcagttaatgtgagcttgtgtttatgttcttaggaagtgtataaaattggaggaaggaagtttggattcttgaacatgggagcgtatgattgtgcaccggcctcattgattatagaccaaacaaagataggaacttgttttaagccggtcaccgagctgatcaatctgcacaacgagaagcttgagagtggtttgaggcggctagagcgtgaactatcgggattcaaatacgctcttcatgactatcacacttccctatccgtacgaatgaacaatccttccaaatacggtaacaaaaccttttgcaattttatgtaacagattctttagtataactttttttttgtcaacaactatattagattgactcatataagccaatgagtctttagtataaccttgtgaatcattttgtttgatttatagggtttaaggaagggaaaatggcatgttgtggaaccggaccattgcggggaatcaatacatgcggaggccgaatgggagtatctcaaagttacgagttatgcgaaaaagttacagattacttgttctttgatcattttcatttgactgagaaagcacatcaacaaattgcagagctgatttggagcgggccgaccaacgtcactaaaccttataatctccaagcgctatttgaacttaattaagctcaatcaccagttgcacctggattttcatgtttttagtgtgtgtgttttattgtcataatgattgattaatctttacaataataataagaatcgaataagaaattggccatatgtatgacatcttgcagttttcttacatcatttttccttgtcaagtcagaaaaagtttccaagataaacatctacttatgatgagatatttaaccagagtaaaccgagattgtcttggtcaaagattgaatgagatttggcacagtgtgttttcctatattagtagaattctcccactccttctggtttttgtatatttgtttagttggcagttgaaacgattttcttattggatagagaagagaaaatggtgaaaagtcacttatgttttgttcttatatacaaaatcgtatcgaaatttatctcaaaaattgtttttgtcttcttccaaatgagagttcgtctttcttttcttaggaagtgtataaatttggaggaaaaaaaaaaattggaggaagaaagtttggattcttgtatttcgaagtgtacgagtgtgcaccagcctcattgattgtagaccgaaacgaagataaatctgcattacaagaagtttcccaatgtttaacggcgagtaaatcgtgaactatccggattcaaataagcacttcagggttatcacgcttctctatccgaaagaatcatcaatccttcaaaattaggtaaaagatatctaaattgtgtttttgttttgtttgaagggtttaaggaagggaataagacatgtttgtgggactggaccattgaggggaatcaatacatgtggaggccgagtttcggcacaagtacaaggctacgagttatgtgaaaacgttgcggattacttgtttttgaattcatttcatttgatagagaaggctcatcggcagacgacagatcgcagggattatttagagcggacaggccaatgttaccggaccttataatctcaaaacagtggttgagttcaagtagactttgtcgatgtatatatatgatataagtatgaaaataaaagacgaggtaaatatcttgtctagtcctagctattagtcttgttatttgtgataaataatataaacaagatctgctcaaaagaaatttattgagtttggaaaaaaaaaaaaaaatattgaactacaatcactgttccttagaccgcaaaaaacctgcatgggaaattgattttcttggtttactttttaagacgtgttttggtgtgtgaaaaacaaaaagtgatttaagaaataaattattaactaattttattaaatcctcggctcccagtaaatcgatttcattttcattttcaaatatttaggattagaaatcgaccatgcctagtctttagaaaagataaagatgactttaggaggactctttgctaaatggtctattagcatctaattgcaacatttctcattttttataaatttgaaaatttagttatatggttgagatgaggactagtgaaagactatttggttcaacgtgaaaagaaataagggaggaagagtgagagaatatataggaacacgaatattgtatttaaaactctaccaccatgtttttagaacagataagtagctttattttagaaaaaacaaaaaaaaatcagcagatacaaccattctgcataatgacaaggttcgcgtcgggcttgatgttgtagtcagatatggtggcattgttcttgagcttcgtgccaagatggtttagatcctgctgatccactggtgggcctccctgatcatggatcatggacttgagttttttaatggtatcggaccccttcacctccaggataaatgttttctcctttatagtcgatacaaaaatccgcatgagtacagccggaccgagacgcagtaccaattgacgtgtcggctctccattgatcttgaggtcgatcgtgtctgagctatctgcaacctctaggtttatgctcttaccctttactgtcttgatcgaaatctgcattgttaacatgaattctcctagactctttggggttttcttttatacatctttggagagtgagttatttaatttgtttacaatttcccatgttattatttattcgtaatgttgaccgtttatttattattattgtgaagaagcaaatgctgccttttggcgtgttttttttcttcggatatttactttttgcaatttttgtttttcttcagttgttacttgttagtaaactctctgtaaaatcaatatttaaggaatttaggaggttaaattggttgtccacgccttttcaaatttctccttttcggtacgacgataacaaaaagttactcgtgatactttccctccaatggtgaatcggatagctacggagcttcacagcattttatggtgtattgcccgtaataagagtcgttaaataaattttagttagtcataatatacacgatgtgtgggagccatacccttgatagaattacggctcattagtaatttaggttaagattttaaggtaaccgaatcgaggaaataaccgatctcaattatataatctttccgatcggtttcatcaaataaccgaacccgaacagattttcccaaacctcagatgtggacaaaccgggtcgggtttaattcgcagggctaaaagaaatagttgttgagtttcataaatcattatccttgtaacgtcattgaataaattaaacatgcaattttattgattggaaatcgaacaccaagtctttagaaacgataaaaaaaacaaacaaaaaaaacaggaaatgaaaacaagttacattttagcaaccacattgatgtaacgttatgtgaagggtcgactcatgcttgatgttatagtcagatatggctttactatcctcgagtaccctgccttgaaagattagcctctgctgttctactggaatgccttctttctcctcatgcttggccttgagttctctaatggtgtcagaccccttaacctcgtaggtgttggttctccccgtaagagtcttaataaaaatcatcatgatcgcacccgtatctggagttggactcagatccacaaccaattcacgggtcggctctccatggatcttgaggtcgatggtgttggagctatcttcaacctctagctttatcctctttccctccaacgtcttaatcgaaatatgcatagcaaactcaacttttatctctctctctctctctcctctctgtctttttttatacataccactttgcaaagagatttatttgtcttacagttccaataatacttattcgttgttttgactatttttctttggaaacgtggtctttgattaaaagctattaattgatcagtgaagaaaccaaatgctgccccttcgatttcttttttatcttttttttttcaaattttcaatttttgtgttcctcgaccgaatgtagaaggtttacaagttctatcatgacttcataatcttcataaattcgaccaaattttcaatttgaccacaagttttctttatttagtcgaattgacacagcacttgctattccatgacgaacgaaacaaagcattcatatacaaataaaacagagcatttacagtaaaaccaagaacacaatattaattattaaacatggaagacaacaacaacaacaacaacaacaacaacaatctggtaacagaccaatccgctttgttcgtgtttggagattctgtgtttgatggcggaaacaacaactacatcgatactcttcccagttttcgatctaattactggccatacggccaaaccactttcaaattctctaccggaagagtctccgacggacgctcaattcttgatttcatcggtaccaaaaatactatgttttgttattttattttgtttctgaaaatgttatcaacttatcgttgacgtggcagcgaagtatgcatggttaccgttgatcccgccagttctacaaccaagtaacggtaacaaccatatacttatgaggtaaatttttgcctccgccgatgccggagctttagtgggaacatttcccggaatggtatatatattattaataaaaattaatgatcattgcataattgtttgaccttttaaacccttttaaccactcaaggtgataaatttgagaacacaattatgcaatgattatatcaagagatgtttatctgtttcatattggagttaacgattctctgtatccataatctacaaattcgtccactttccaatccaatcccaaagagaaatactgtacgtacattttgttgttggtaacacgaccgctattatcgaggtaaatcatatcaaagtttatctacaaaattgcttgtatgaaaaatcttggtccgaaatttaagagattatgtttcttttctttggaagtgtatcatagaactataaatagaagggaggaagtttggattcttgaacatgggagcggacgattgtgcaccagcctcattgattgtataccaaacaaagataggatcttgttttaagcgagtcaccgagctgatcaatttgcctcttgcttcttcactggtgggacctggtcatggatcatgttcttgacttgttgaatgatctcagatcccttcacctctaggttgaatgttttccccttaagcgttgatacaaaaatactcatcatttcaccctgaggtccctgacccagacccaaaaccagttgacgggtcggctctgcatggatcttgatgtcgattgtctcggagctatcctcaagctctaggtttatggtctttcccttctctgtcttgataagaatcttcattgcaccacctaacgaggaatctgaaaaaaaaacaaaaaaaaagcaaaatcaaagtctgagaacaaatatttgaaatttggaggtttttaaagagaataaaaaatatatttggagacagctaagtcaaggtctcttttatgtttccttttattacccctccatggtttaacattctactaatatttgtttttaccgttctaaagaaacggctagtcttatttgaaatagatgataatattacttatttgacccaaaaagatgattgttacttattccaaaagaaacttgttagttactgctttttactacacacaaaaaacaactacccatttggcaattataaaacttacaagttatcatataaccaaattttctattaatcggtgacgaagaagaatcgaaattttcaagtcgctgcgaccaaacgcgatccacggtccagtttggcggcaagacgtcgctcgttcgctctattctttactattttatcatgtcaaaagtgacacatgcatatgcttttgattctagaaaagtattaatttgaagttttgactaatcataaagcttctttgtttctaatcctaaatattttcaaaacattatcatcaaattatcaagtaagtaatgattatgtgtgaaaatatgaagaacaactacttttccttttgactatcaagcccttttgttctaagtttttttgttgattttcaaggtttgtaaggttacgttttaccggttttgatttaacgtcgtatctatttatttaaatcgaacacgtgatttgaaatatataaacacaaatcgataaatctttggaaatttccattacaccttttgtgtttttatcctcattaaattgttaaaaaaataaaaaaaaatactttgattgctacaataaactttactagtttaacttgtcatatggtattgtcgctgtattagaccgatcacacttacactataataatctatatgactacaatatttcgttcgcataatcattcgatcgtatcctcacatttccacaacaatttggtattaattttcggattattatttttgtatgataactcgttttattttctagattagatggagtaggttcttatatatttctatatacataaataaaaacaaattcgaaaatctatgattaaaacatgtatgttgtctttgtcacctacatactttaatcaacaagacatcatatcgattttgattaaagccgtgcatcggaaaattttgctttagaacaacaaacttgaccatgcataattaagaatgtctatactctataaccaagaaaaaaaaaactgttagaacaaaactgttataaaaaaaattataaatatatatattcaacaagtgctagcttgtggacagaacataaacgttaacgattaaacatggttcgattagttttgatcatcttcttcgtctacacaataatcttgtcgatcggctcaatcaactgcatagacaataataatctggtaacaaatcaagctgctttgttcgtgttcggagattctctttttgatgccggaaacaacaactacatcaatactgtctcaagtttccggtctaatatctggccgtacggtcaaaccaatttcaagtttcccaccggaagattatccgatggacgtttgattcccgacttcatcgttaacataacaaaactactctgctttgttatttttatttcctaggaatgtttaacatttttttattcactaattgctgacctggaagccgaaaaggcatggttgccgtcgatcccgccaaatctacaaccaaacaacggtaacaatcaatttacctatggagtaagttttgcttctgctggcgccggagctttagccgaatcctttcttggaatggtaaatatcatcagttttttactactgttccatttcactagaaatgttgttttgatattcttcatgcgcaaccttaaatgtttctgtttttatgtacttacaaaaactattaactcttggaattttggtttatttcataattgatgttaatgaattttcattttgactttaatagatattgaaatattagttaatggtatttatttgaaagagaaaaaaatttagaaagatatttaaattgaaataaagggcgtagaaattaaaacaattgtgtaatttttattactttaaccgatgatatatagtgttatttgattaattgatatgttccacttcttcttttttatcatgtaaggtgataaatttgggaacacagttaaacaacttcaaagatgttgaaaagagcttgagatctgaactaggagatgcagaaaccaaaagggttttctcaagagctgtttatctgtttcatatcggggccaacgactatttttatcctttctctgcaaactcctcaactttcaaatccaactccaaagagaaattcgtcgattttgttatcggtaacattacattcgttatcgaggtaaacaaaaatcggaaaataatttcaaatatttaccttttttctaaaactgagttatatatatatgttatgtgatcttaggaagtgtataaaatgggaggaagaaagtttggatttttgaacgtgggaccgtacgaatgttcaccaaattcattgataagagaccgaacaaagataggatcttgtttcaaacctgtcgctgagcttatcgacatgcacaacaagaagtttcccgatgttttaaggcggctacaacgccaattatcgggttttagatacgcccttcatgactatcacacttctctttccgaaagaatcaacagtccttcaaaatatggttactaaacttggtatttacatatatgtaagagatcgatctataggttacctttaagaacattttgtgttatgtttgttaatttttagggttcaaggaagggaagaaggcatgttgtggaagcggaccactgagaggaatcaatacgtgtggaaacagaataggaccgtcgcaaggttacggcctatgcgaaaacgttaccgattatttgttctatgattcctctcatttgacggaaaaggctcatcgacaaatcgcagagctgatttggaacgggccgcctaatgtcactagaccttataatctcaaagctttatttgaacttaggcttacataaaaatcgcctatatgtatgtatatgaaaataactgacgaggtcactatatattgtctaataatgttagtcatgtaattttttgagttaggataataataaaatcgattagtttttttgtgtggaaaggagaacaattctatggtgaaagtaaataaacttgatgaaatactaaggtacaaagacaattagatagacacaagaaacaagcatgtcgtagcagaaaccttattattagggcttatttgcgttgacctttcttgcacgggaagattagccgccagcgcgagaaaaaccattaataaccctacgacgattgttaatttttttgtacgaatgtaaatttgattcaccaaaaacaactttgtttacattatgcaataatttgtttaaatttaaatgttgagcttaaattttaattaggaaaacagtttgtattttgaaatattagagacgtcttgtggcaaaccagttacacaaagcatcatcaaacttgcctttaccgtgagtctttagatcggactgttcgatcgatatccttgatgaggttagtcgctgttgaaagttgttcctcatgtcttctcatatttttttctctacatattgtataaactgcaatttggaaagtacatgacctcatatgtgttgatgtgtgagactgtagtgtgaaccagaaacttcggcagtcaccaacgtgttgaatagtaatataaacagttgagtttttcaattatatacgacaaataaaatgttaccatattagacggatctactatatttatcatgtgatggatccaaatcgttttactactattttatggaattaattatcaacattgaacgtagataaaggagagataaagtcaagatcggtgtgttgcttcaattattgagatttttaaattatactatttcaatttgtatgttttaacttatgtccagatttagcgtcatttttttcttatttaaatagaaaaaaaatacttaaacttatgaccagatttagcggatgagatttgtttggtcttattatatttttattttcctgtcgcttatgatccacaaaatcagatcactaatgcccactatatgtatttactgtaataaaataatcccaactggtaatgatatttattttcagtttgggagtattatattttcccagctggtaaaagatactttatcatattcgttttataattataattagcttattgttgggtcaaaagaaaccaaaaggaattagcttattattttaattcggtgtcataaaacgaatcagtcatatatttttacataatttatacttactctgtttctttttgtttaattgtttagaaaaaaaattatttcaaaaatattgattttttagatttttaatacaatagttattagttataattgataaattgtaaacttcaatacaaattagtaaatatcattggtttagagttattgaaaattgtaaatcacaaaaaacaatacatttaaaagcaacatttaatatattttcttaatatttatgttttttctaaaaaatcaaacaaaaatgaacagaaggaatataagatatcgaatagattagagtaaatcgatagactaatgaactctcgataaattccaggacgtggaaagagttgataagatcaatcttttattatagagaaaaactcactagagaaacaggaaaacattgcaaatcaaaaacatcaagattccgattttgattcggttataaattaactcatgaccattgtagaaaacctgattgaccctaaagattgagttttaaaaagactcagtaatactcgtaaccgcggctagtggacgagctagagtcgctggcgtggacagtagctggcgttggaggcacccaaaattcacgcatgggttcatcgactgggtaaacagtaagctcacggacgttcatcggttggacaacatttgtatcggctccaaaaagaagatgggcaaacatttcttgcgccttctcggagttgtgacgtccgtcgaagaataggaaagaccgttggtactcacatagcttcgaatgcacgttaggtaaaccgcaaccataagcatcgtgagatccaactccgcagcacgatgcgttcgtgacgaaaaaccctaagaatgacaaatattaatgacttggtattagaagttataaaactaaaacaaatgaaattaaaccatgataattaaccaactcacggaagttttggttcctctgcgtcctagtaagaacggcattgtagaaatcaaagacggtgaattggaaaggagctgatgcaggagagtttctagccatttcgttcaacatcggtccaattttttcgttgtgttgtttagccaaatcgttgagtttctcatagcattgatccatcccggtgttgtattcttgtctgacgatgggtaagcaacccaatggagctaaggtttggatcacgaatttactcgctcctgatgaatacaacgcgctaatatcgttctttaacttgttggtcacggaagtaacaaaagcttgttgagcagatgcatcagcggtagggttgttcttggtgaaatttaagtaatcgtttgcaccaatgtatatcataaatactgactttgccacgaaatcatcgttccaatttgctgctttcatttgattgaattttttcacttgttgattcagagtcatctaaagaaccaaaaaagagaaaaagacaaaaattaaaccaatattataagtgcaattaaagtaaagcttattgatattaagtcacatgcttttctgtgaagtaaaacaaaaagaatcccgcttagtatgaccgggtcaataatagacagatataattgattttctttgaattaggtgttgactatagatatatacatgactcttatataataagaaattaagtttacttacagattccaccggagctccgagtagagtagcaccttcgacggcgaaactagctccacgtgagacattgacgttcggttgaagcgccggcgcgatcgcgagcggaatcttcatgaatttagctgcattttgtattttaaaaatattttagtttttcatataatatcaaatcattccttgtactacatctccgaatctgttgacgaaaataataaataaaatttcatagaatgtgtcccgaaaagtgaatagccgctgaaccaatgcatttataatcttttttttaatcatactatttactattttttaagtaattcactagtagcatacttaaaatgcatttataaatactactgtttatgattatttttacgtaatcatactatttttaacatacttaatgttttaaagattagagtaggattcgattagaaaagaagtcgtaccgaggaagtccggagtgatgaggccgtcggagaatttgccgttgggatcatctcgagattttccgtacggccagaaaccttgagcgactaaggttttggtgagagtctgtttgtttccggcgtcgaagttggagtcaccaaaggtgaacaaggcgaccaccggactattctgtccggcgacagtgatggggttgtgaaagagggtcaataccaaaattacacatagaacactgactaaattacagttgtttgccatcatttagagagagggagaaacagaactgtgaaaagagaagaagattgcttttgtgccttagctcgtagaccgattcgttatatttatattgcaagtactacaatttggcaatgaaaataatagttcattttactatacaaataataacgtgtagcgcgaggttcattttactatacacctatttaacgcactagcaaacgattatcgatcaattatattatatagttcgcttaatcacgtctgacgcattactggtttctcttctactttatttttaattctcaacaaaatatctattgttactacgagtaccaagaaagatcgtgcttttttttttttggttcaacaacaacttacaattacacaagagtctgaatacacataagctttaacccaatccggcaatatagaatacaatttgggatcataattcagaaaagaaagagattccctagcaattctatctgccacacaattcccttctcatcgggtaaaagtcactttaacctcttcgaagtgctgaaaagatcgtgcatttagaggcaagaagtagaattaaacatacaaatttcacggaaatatagggtgtaaatggtaacactaaaccagattcagtaatttctgcagtaaccatttgcataaaactaaattttgctgactagccaaattcaacaaaaaaatttcaacaccaacatatacgtagatatgtttatttctgctaaaacttttggataatttacgagtacacaactcgaattaaaatatttttaatatcaaaatacatatcaaatagatatttttaaataagtcagattatactgatacgatatatgaataatatagatacataaaatatcactaccagaatagacaagagacgaatatgttcggataattatagataatttggataataattttaataacgtttagataacttaaatcaattattaaaattttgcaaaaacaactcatacctatgctaagatattctttaaaagataaattatagtaatttccttaatcatcctcatcatattattgattaaattacttgaaaacaattaaaaaaaacaattaacaatctatattttatcatcatgttaatttttgaaattattttcttaatagtgttttgacaaagattttcgttaattatttacatatttttaatagttcaaatttaaataagaaagaataactcaattttgcgttgacacaatcttaatagtataggtaatagcttagttatgtatatataaattataaaaacttgtggagagttgttccttaagatttacagtgaagattagagaagattaagttttgagagagtgtctatatcaaatacagaagagttggtccttattcgtttgtaagttctagtaattatcaatttgattggaatcattagaacgacagaaaggtgaacaattttgtttctaaaagagtgcagaaactagataaaaataaaacacatttgcttacgtgaagatgaagttttatatgaagaacgcctcatttgtttggttcatctattatctatatatatgatttttggttttatttcatatgaaaattaactgtaaatatagccggccccaaagccagatgtataaacttatcttttctggaactttataatttctactttttattttctttgttgccaatcatttcgaatattaccttgcaagaataattgcaaacaaaaaaagagggtaaaaaaggtctcaaattgaatccactaccttcttaaattgattccaccaaaatttatcattttgttctaatggagtgcatgtggcccgaaacttgtctaatctgagcacaaagcaggtcattggacacgctttggttcatattgtcaggtttatcacgttactcattgagatttttcttatggaaaaaacagagttgaggttacattattattttaaatctcaacaaattaataacagcgcatttcaaattccaagagctcgttcatggtatagagatggaaaatagtgagctcaagaactaaacgagttagatagattcactagcatcgacgtcgacgtcatggactaacgatgatattctcatccattggatcctcccaaaactcacgcataggctcattaacaggatacacaatgagctcacgaacattcataggttggataacatttgggtccgctccaaaagataagatgatgagaaaacgcttcttgtgccttctttttttaattatggaattaccttttaatatgtggttgacaaaaaaaagaaataaatttatgtaaaagttttgtttcttttaaataaaagatttgcaaggggtaagagttgcagagatcaatcttttattatggaggaaaactcactagagaaacatgaaaacattggaaattaaaactactcaagattccgatattgatccagttataatttgactcataacccttatagaaaccccgatcgatccctaaatattgattttagagactcagtaatactcgtaaccgcggctctccctgagttgaacggtggctgacgttgggggcacccaagactcacgcataggttcatcggcagggtaaacgacaagctcacggatgttcatcggttggataacatttgtatcggctccaaaaagaagatgaccaaacatctcttgcgccttctcagtgttgtgacgtccgtcgaagaataggtaagaccgttggtactcgcatagcctcgaatgtacgttaggaaaaccgcaaccataagcatcatgtgtcccaactccgcagcacgatgcgttcgtaacgaaaaatcctaagaatggcaaatattaaacacatggtattagaagttataaaaaaatttaaaaatgaaattaaaccatgataattaaccaactcacggaagttttggttcctctgcgtcctagtaagaatcgcgttgtagaaatcaaagacggtgaattggaaaggagctgatgcaggagctgttctagccaattcgttcaacatcggtccaattttttcgttgtgttgtttagccaaatcgttgagtttctcatagcattgatccatcccggtgttgaactcttgtctgacgatgggtaagcaacccaatggagctagggtttggatcacaaatttactcgctcctgatgaatacaacaagctgatatcgttctttaacttgttggtcacggaagtgacaaaagcttgttgagtagatgcatcggcgttagggttgttcttggtgaaattcaagtaatcgtttgcaccaatgtatatcataaacactgacttcttcacgaaatcatcattccaatttgctgctttcatttgattgaactttctcacttgttgattcagagtcaactaaaaaaacaaaaaaagacaaaaagacaaaattataattgcagttaaagtcagatgtctttaataaaacaaaaatatgccgtttagtatgatccaggctagtccataagacaggtcaagcacatgctttagaccagaagatatatactaaatcattcgccaaaaaaaataaaaacagtaatttggtaaaacctttaatatattttatatcattaagaaggccatcttccaattgtgctaaggccacctgaaggtaaattaaggaccggctatgtatgaccgggtcaataaaagacagacatggttcatttattttgaataagatgattatagtaagaaattaagttgacttacagattccaccggagctccgagtagagtagcatcagcgacggcgaaactagctccacgtgagacattgacgttcggttgaagggccggcgggatcacgatcggaatcctcatgaatttagctgcattttgtacattaaatatattaggttttcatataatacaaatataatctccgaatctgttaacgaaaaaaaatcaaaaaaaaatccatgtgtttcgaaaagtgaataccagctgaaccttttttatttttaaaatattttaaccgttatttttagtaattaactaatatccaacactcgtcatttgtactaacgttttaaatgataaaaaatatcattttgcatgttttatgttttgtagaattcggattaagatctttcagttatacaaacaaaaaaatgtcgcaccgaggaagtctggagcgatgaggccgtcggagaatttgccgttgggatcatctcgggattttccatacggccagaaagtttgagggagtaaggttttggtgagagtctgtttgtttccggcgtcgaagttggagtcaccaaaggtgaacaagcccaccgccggaatattctgcccggcgacggtgatgggtttgttaaagagggtcaataccaaaaatacacatagaacactgactaaattacagttttttgccatcatttagagagtatacagagagagagaaagtgaaacagaacagtaaatgagtagaagattgcttttgtgtcttagctcgtagaccgatacgttatatttatattgtaaatactacacaatttggcaactgaattttttttatcaaaaagattgtttttaagaaaaaagcaatttagcaattgaaaaatattgttatttaaatatgaatatatgataacgtgttgctcgaggttcatttttttcttttttctacacacctagttaatgcacaactggtatcccatttctattttatttattcttaattttcaagatacatttattgttactagtatcaagaagatcgatcatgcattgagggcagaagaagatttaaatgcatattcctatatttcaataaaatatataaaaaaacatgtcaaatggaacctctcacctatgaaaacgtaactaagaaaatactccatgcatttcagatcaagtgttcgttttttttaaatactacaaactaaaaaaaaattgttttactatgattaattcattctagttaacacattaaaacagtataaataaaatttggaactttaaccaaaattttatattaaaacctaaaacaacacttattataaaataattttggaacagttaaaaattgaaaccatttccactatttcattacaacaagaattgcaaaaaaaaacaaaaaaaaaagtaaataaaatgactcaagtgagttatgtaatttgaaatccataagtcttaaatgattccaccaaattcaatcatttcgttctaatgagtgcgtatggcccgaaacttgtctaatatgagcacaaagcaggtcatatatatgctttggttatattctcaggtctatcaaattacccattaattgattatttttttcttatgaaaataagcagagttgaggatttaaacagtattaattattttacttcgcaactaattaagaacaatacattacaaattccaagagctcgtacgtgatctagagatagaaaatagtgagctcaagaactaaacgaggtagacagatccactagtattggactaacgataacttctcatccattggatcctcccaaaactcacgcataggctcattaacaggatacaccatgagctcacgaacattcataggttggataacatttgggtcagctccaaagataagatgagcaaacgcttcttgtgctttctctgtgttatgacgtgcgtcgaagtaaaggtaggatctttgatattcgcataacttcgagtgcacgttaggtaaaccacaaccatatgcataatgcgtcccaacaccgcaacacgatatattcgtcacggaaaaccctaattagtcataacaacaagtattattaaatgtttgcttcaaagtaaaagcatataacgatattaatgatagtgtggaactttgaatggcgaattgtaactcacggtagttcatgtttctttgtgtcctgcgaagaataacgttgtagaaatcgaaaacggtgaattggaaatccggtttagtttccgccatttcgttcaaaatcggtccaattttagcgttgtgttgtttggccaaatcattgagtttctcgtaacaattgttaccggttttaaattcttgtcttgcgatcggtaaacaacctaatggcgctagcaagtgtacgacgaatttactagctccagatgaatacaacaactgcaattaatcattataacaacatatctatatcactaactcgtattaatttttgattagttttggatgaaaatacttacgttgatatcactcttaaaccggttagtgacagaagtaacgaaagcttgttgagcagaaacttcagcattaggattgtttttggtaaagttgtagtaatcttccataccaatgctaatcataaacactgatttctgaatgtaatccactttccaatttgatatcatctgattgaatttcctcacttgttgattcagagccaactaccaaaaaaatgtgaatctttattatgacattgctttacgattgattaacaaatattttaagtgagcttacagaatcttttggagatccaagaatggaagcggacccgacggcgaagctggctcctcgtgacacatcggtgccgggttttagcgccggcggtaaatcgtgtggtatccccatgaattttgctgtgatttattcacccctcatcaatttcatatatctttaattaccaatcaaaatttccatttagtatagagtacctataaaaacgagtagctagttttcttaatggttaaatgatatgcattatagcattatacctataaagagcgtgttcatcttgtatacgttgttaaaatattaaagaaatcaggctgattcagattgagacctttgaaaaaacaattactagcccgttacgtttttaccaacttttcacacattataaaagagtttgcaatattgaagtacccgttgcaattgcttatttttaatcgaactcattataaaatcatttattgatttaagtaaaatatttaacaactgtattgggacagaattttaacatgaaggataacaaataagcatcaatccacaaaccatatgttgtcctctatatgtttacttgggattagaaagatataataaaacaatctgattccttttgaaaaaattaaaagtgtaaaatagagataaatttacaaacttaccaataaagtccgggacaattttgccatcagaaaacttgcccttagggtcatctcgagatttaccgtaaggccaaaagttttgaggaagtggagcacttgtgaggaactttttatttccagcgtcgaagttggaatctccgaaagtgaacaaacccaccgccggaagattctgcccggagatggtgacaaggttatgaaggagaggaaataccagtaatattcctagtacactcactgaactacactccattttcagttaaccagaaggaagaatgatgaggtacaataagttcctcggtcctctaatatatttatattgtaaaatatttggaaataaaagagcttttaacatgttctataattgatgacaaaaaaaaaagaatgttctataattaaagattaaacgaactcagtttaaaataaagaaaaaagtttggggaaaaaatatctaataaaaatataaacgttagaaaatatatatttattgtaaacgttaagagctgttacgtaattatagaacaaacaaaaaaacaattatgtaacacaattttttaagaaaataaaacgtttcgcaaaaatgtcatgtaaaatcattgttagcaaaagaaaaccacaacgccgtgaatattcaatctctcacgtttttgctatgtcttatatcaattgaaactaactagttagtttctacagttcttctacctagacacgtttgttctatttttaataaggttgagaaagatgtttttctttttccttttgtcaaaaagttgctgctctagaaagcagaacacacttgagcattgagcgaccaaaaaaagaagaagaaagacttgagcaatgattaatgttttttctctcacagtttttaaattacccttaataattttttttgttaacccttaataattaatgtattcaagttttgttgaaccaaaacatcatttattttcaagagatttttttaatagtctttatcttgttaaaaataacttcttctttttgttaaaaataattaaaagagcaccaatgtatattcaactaaactacaaatcttaaaaagtaaaaactgaatcctatactttctaaccgaatcttaaacatgaattcctaaatccctaaaaccttatttaaaccctttatccatgcttcaaagtttcaaattctttacaactaatcagtataaattgatctgactcaaactcaaatatatatgcatatatatatatatataatattaatgatatagaaaaaaatgaagaaactcaaaatcacgggtccatcaaactgcgacatgataatgattaaaaaaaaaaagttgcgacaagataaatctcaatttgtttttgcatttttgaagaaatatgttagttagaaacaggggcggacctatttaggaaaaaggggggtcacttgacaccctcaactccgggatcaaatctctagcataacacttttgcttcttttttctccatttagctttaaatacatgtatttttattgtcttatatacattttttcttttagatattacactaattaatatactatttataattgcctatgaaaatgccactggttagaagatatttagtcatgtagaacaacctgttagttataggggaaaatgctattgtaattcacatttttattttatttctcaaccaccaccaacacatgcatgtgtgttgttgtgcccacactttttcaataaacttaaaatcaagtaaacttaataaaaattatagtaagtataaaatgatatggaccaaatctatgaataagtttagtttaaatagtagatttgtaagatattcattatgttttataaaaagtgtaataatgacatgtttttgataaactatcttaataatgacatgtttcacacaaattaagataattacgcaaatttttactatatcacatgactaaattttttaataagctgtaaagaaaaactatatcagaaaacataaaacagctcactactggccaaaaaaagtgttaaaatgttagtcaaaatttcaaaaaagaaaatatgatacgtacatgaaattaattaattaattccataacattcgtagaagcaatacgttatcgccaatcaataatttgactaattcaaaatatcgttttcgttatcgaggtgaacacatggagctgctgatccatgaatgaagttacaatcttgtatccaaataaaataattatttatgccctcaggccaccgaaaaaaattaaaaatatggccacatagcgacaatttcgtgataaaacaaatatattaatataatatacatatatatatatatattaaactagtataaaagtaaattttatagtacctatcacataaattgtcaaagataaaattagttattgataatacaatgactatgttatctttatttaaaaaattaaattaatttaaatatttctaaacaattctaaatcaacatcatagtatgataagtttacatttttctgagcgtaatattgaattatttttcaacatttttgtgatttgagttggaacaatatctactccatttgttccaccaaatttgatattgtgagattttcacacaaattaagaaaaacaacttttatattttaaaattattgttttgttagtttaataatattaactatatatctctcttctttttattggtcagcaataaaaaaattaatgatgtgatatagaacatcaatctttgtgaaacaagaaaaaaaataatttttaacactaaatttatgcactagtggaacatttgaaaatgtgtgttatttttagaaacaaaacttatttttgtattatttgtgagaatttttcaaatataaattacttctatataactttttgaaaataatttaatctttaaaagaaaaatattaatctcttaacactaaatttatgctattagtagaacatttgcaaatgtgtgttatttttagaaacaaaacttatttttgttgtgagaaactaagaattcctcaaatataaattactcatatatataagttttgaaatttataagctaatattttttgtaataattggtttattttgattccaaattcagttttcaaattcaagttcaaaattgtttgtaatctttgaaaataaacatgagaaaaatactataaaacttttctaaataaaataataattttatcatttgttcacatggaagtggatgtaaaatgaagttatactagattttaacccgcggtataccgcggtgacaatttatctttttaaagttagtataacttttttttgcaaattatatctgtctataatatatttttattttatactttacaattattattaagaacgtcttgccaaacccgtcccgccaaacccgtcccgtaaaaaaaacatttatttatattaatgttgatcttatttctgatatgtttataaattattgtctaaatatttttgtcgatgcgggacgttgaacccacacattttttgccagttggttaatatatgtttattttaaaaaatttgaatcataaaatatgacagaaaaaattaagatttttttaaactctatatattatataatgatgttaaacaattgtgatatatcaaactttttataagtttaaatattaataatgttttataaattttatatatataaataataatattttaaaaataatatttttgcttataaggtaatgacataataactctaaaagcaaggatttagaagatttaaatctttaattaaatattttcattgataaataattaatgtcagtaacatgacattgtaaataagttcaaatacaaaatttatttatttaaacaaaaaacgtttagtaagaataatatttatttaacaaaaaactttgttttaaaatattgttagcaaatatatttatgctaattttaagggattaatttgaagtttgttgggattaaatttgattgataatgtgattgacaatttaaatcaaaaatttaaagtaaaattaattattttggaaaaaagatttaatgctaatggcattagattgtaaataagtgtcaagtagaggatttatttgctaaaatggctgcaaaaatgtatatataaattaaaaatatgaaataatttaatatgactaaaataaaataatgccacttctaaaggactaacgaaagaatagtcttcttgtaataatattcttttaaaaaaatagaaacgttggtcacgaggcctcatcaatgcttttgataccttccttcaccgcaaattctaacgaaccaccaccgtcgaagctttctctttccgatctttcaatggcgattctcaaatctcacttcttcttactcttccctcttcttcttctccactttcacactgtctcctttgctcagacgctctttgtgttcggagatggtctttacgacgccggaaacaaacagtttctctctcagaaccgagttgacgcaagctttcctccttatggagtcactgtaggacaagccaccggacggtggtccgatggttctatcgttcctgattatcttggtaattgtattgatcacttcaaatatctataactatttattcatttgtgtttaatttgattgtttttttttttcctttagctaaattcatgggaattcctaaaatctctccgattctcctaaccacggcggatttttctcacggagctaatttcgccatcgccgacgctaccgttcttggctctcctccggagacggtcagttttttttttgttttgccaccgctaatttctctgtagtaatttaaattcacttgctggatttcattttatggttcttactttgattcttgcaactttagaattaagtattgtagccaagtcaaaatctggaattgagtttgacttctgtggtctctaatgcaaaaccgatgttatctagaaacaatctaaaacttgagaaaaaaaaacagaaaattctaaaacttgagattgcaaaagtatagtgttaggtcaaatcttgaaggagttttaggttaaaatagatctttgaatgatttttatacagatgactttgtcacaacaagtgaagaaattctcggaaaacaagaataagtggacaaatcaaacacgttctgaagctatctacttgatctacattggttctgatgattacttgagctatgctaagagtaatccaagtccatcagatactcagaaacaagcttttgttgatcaagtcatcactaccataaaagcagaaataaaggttagaactcgcagcagctacaacatctaagctttgattagcagttttcaatattttttatttgttttcgtatttcaggtggtttacgggtctggcggaaggaaattcgcattccagaacttggcaccgttaggttgcttaccggccgtgaaacaagcaagcggaaatgttcaagaatgtgtgaaattgccttcggaaatggctgctttgcataacaagaaacttttgcagctcttggttgaactatcaagagaactaaatggtttccagtactcgttttacgacttctttagctcgatccaaaacagagttatcaagtctaagacttatagtaagccttttatcatcatcgtcacgataacgttttacaaacgttttgacatctgtcttgtctgatgcagcattcgagacaggaaacgctgcttgttgtggaactggctctatcaacgggagtaattgctcagctaaaaatgtatgcgccaagcctgaagagtatatcttctttgatggtaagcatttgacgcaagaagccaaccttcaggtcgggcatttgatgtggggagcagatccggaagtgattggaccgaacaatatcagggagcttatggtccttcctctagacattacagtcatcttagctggtatacaagaagctatggctgccatgagaccgagacagagcaacattgagagtctctatgatatcaagaagatggagtcagagatggataatcattggctttatcaagttgacaaagctatctcctttatgatataagattgtggttacagtttgatttaagcgagagagtttaagagctagtgtaacaaagaactagcaagaaaactgaaacatccatttttcttgtttagtaataaaacaatcaaccttattaagtcaattagaagctttactggaccatttccatgggtccaatatagcccattagtattgtctcactcagtttccgtagccccaatttagcccacttggcttcttattcggtgttaaaacataagatttaagaccatctgagaaaaatcaaatgacaattttgtaggaatttcactgtattgtcttaaacacgtacttaaaagactcatactggcatgtacttatggtaatttttacaatgacaacaaatttaaaacaggttatataaaattggctctttattagtaataaactaataattaacacgactaaccacaaaaacaacataaaccttaacatatgcattaagctgaattgactgcatgtatagaagtagatatcatcagcacggccgttggtcggaagctttccgccatgtacgaagatacctctttttccatagatggtggcagtggtgtaggcagtgccgggttaagtaaaaaggcggacaatgcgaccgccctatatccgggaaattttctttaaaaaaaaaaaatgagcacaatatttttttttgtatataccaaagaggtacaaaaaaaaaattatacatgcaaaagagacacaaaatatatatgtttaaattttttgctataaggcacataaatggtatgagccggcactgggtgtaggtggtccaaccacgtggcatctccggttcatttcctcctccaaacttctcccagacttgtctcagtgttcaacgcatcaccttcggtagacaacgtccctggacggctggaccttaatgtgcctttgggtctcgccagatctcacctccaaatattattatatgttttcccgctgttgcatatgcaaacacgctcattgctgaaggctttgctcccgtactctctacttctgtgtctgtcaactttccaaaagcgggatccaagaattgcacagcattagactcgtagtcacttttccctccaggcaaacttgaagtcacaaacccataaaccacccaaatcatgacttgcgccacaaggaatcccgcacctctacccaaactcgtagtcacaaatttcatgctacggtatatgttaagacttaaaagttaaaaccattgagagaaaataaatgataatacgataaagttgtagataattcaatctttaattattaacacatacacataatttgtaataaaacagccagccataaataaattggctccttattggacaatgatacttaaggaaccactcacacaaccatgagtaggcctcattagagtaaaaaagctcgacgagtcccacacacagataatttgtaataatacagcaaaccattagggctccttattggatagtaataaatattaacgagccacacacacaacacaaatcttgacacgcattaagctgaattgaccgcatagaagtagagatcatcagttcgctcgttggtcggaagctttccgccatgcatgaggaggccattctttccatcgacagtggcagcagtataggcagtccaacctcgtggtatggctggtgcaccttcttctcccaacttttcccacaccagtgtctcggtgtccaacgcatatccctcattggacagcgtcccgggaccataatgcccattgagatcaggccatacctcacctgcaaatattattatatactttcccactaccgcatgggcaaacacgctccttgcggaaggtttcgctcctgtagtctctacttcggtccactttttggaagccggatcatagaattgcacagcattagactcatagtcatctttgcctccgggcacaatcgaggtcgcaaacccataaaccacccaaatcttcccttgtaccacagcgaatcccgctcctcctcttttctcgaagttatctcctggatccggtagctgagcccatttcccatcagcaatgttatacgcctcgattgtcctgaaccgcgtgggagtattcatagtaccgcctttgctcaccccaccgaatacatacacatggttttcatccgaagccatcgaatggaaagtacgagcctcgggtcctcccacctcatcaagcttcgtcaggaatgtccactcggatgtcaccgtatcgtaggagcgaaagttttcgaagttgcggttctcatcgcggcctccaaagatatagatcttagttcccacggccaccatgcgcacgcctaagcaggatacagttggggcgtctcctttgggttgagcgattgaccaagtttgagtgttgaagtcaaagacgtagaggtctttgtcgatgtgtttgtttggtgttaactcgccgccgaaactgtagagcttgtctccgaccgcggctatgccgtgtgaacttctaggtcctggtcccgttcctcctttctgccccacctatttatcaccaacataaatcatacgatgataatgcatgtgtttctttaatttcctttgataattatgtaacactagattttaatccgcggtacaccgcggagacaattcattttttaaaattaatatatataaaaatctgtaaattattttatagtttaccattgttactaagtaacgttctgtcaaacccgtcctgccaaacccgtccaaaaaaaaaaactatttactttattaatattgatcttatttataatatgtttatgaatcattgtcaaaatattttagtcgttgcgggacgttgaacccacatatttttcgccaattggttaatatatgttcattcttaaaatttcgaatcacaaaatatgacgaatttttttttgagatctttttaaactctatatattatataatgatgttaattatttttgatagattaaactttttataaattcaaatattaataatgttttatgaagtttaaatatacaaataataatattttaaaaaattaatattttttgccttttaggtaatgatataataactctaaaagcaaaaatttagaagatttaaatctttaaataaatattttcatgtctaaataattaatgtgaagtttatgctaattttaagggattgatgtgaagtttgtttggattaaatttgattgataatgtgattgacaatttaaattaaaaatttaatgtaaaattaattattttggaaaaaatatttaatgctaatgacattgagttgtaaataagtccaactctaaaatttatttgataaaatagctgcaaaaatgtatatatagatgttatattaaaaaaactagattcaacgcttattagttaatggctgtgcacagtactaaatagaattattaatgattaaaaatagaagtttcaattttttggtcaactatatggaaaccttttaaatactatgcttaggtgttctacttaattcaagtatcatcaacttttcctcttacgtctatgaacactaaatttctaaaacactgaatactcaaatatctaaaatttaatttccgtacttgaccccaaaacaaagtacagtagattctttaaaatatgtttaccaacaaatataacataaaattataagaatctaattcaaaattttaaagcattaatataacaataatggtattctcttaaaagtaataacataaaattcaaacttccaaatctaaaatattcatatccaatcaacataaaatttagaaatatataactataagataagtctaaagttgaaaaactatattatatactaatcttgttctaaataataatttaaataacattacatgttgttaaaaatatgtctattgcaataataaattcgaatttaaaccgatctgtatgagggtttgaatatacatgattggtaattttaattttaaagaaatatttattcagatatccgatccttaattatctctttaatcaataccatgatctaacttggaaagcatataaaagttatattatagcttatcaaaaaaaaaacaagtaacgactatcaacaatattcagccttcgtgatgatatatacgtactattatttagcctttgtgatagaatactacgtactgttatttagtggcaaactggcaataaccaagttaacctagataatgtcttttgtacaaaattatgaactttcgaaaagttgaattatcaatttaaatagaataatccgggcgttggtatgtagttctaccggcttaacctccatctactcatatgaaaagtatggaggtcccaaattcgagcaccacatcggagaagggacttatttgaattgaaactttaattaactaattaaaatatcttgatccactggccttgcaaagtcggagccatggctgcaatataagtataaaagtgttttcgttttctttatttgtgtgtgtctcttttcctttccatggtgttctatttataggccagtttagtgtcaagagtaggtttaaaataattaggtgagtacccacccgttttattttaaaacagtactttaacaagttatgtttgattttcttttagttatgttcatttgttgtgttttttttatataacatattagatgcatcttatatagttataaagttaattagactcatcttgactcaagatatcaattaaacatttcttgtaagtaaaattataaactaaattatagccatgatgaaaaagattttggtggagattatattgtgtatcgaaacgaaaattatattaaaatttataattgtacaataataccttctcatcaaacattaaaagtaaattttcgagaaaaatagtcgttacggtgtgtaggcataaccaaaatctaactgtaacggtattttggaccgtaaccgaaccgtttattaaccgtaacccaaccgtaaccgtataaaacggttaataaccgtaaccgttaacagtgaaaatagatctgttacggttaagaaaatatactaactgtaaccgttaattaaccgtaaccgtatcaaaaccgtacggttaatcgtattttcaaaaccttaaaatatagttataatagtgtataaataaataattatttcactaaaatagtaacttaaattgtttaatatgtccactactatgatcgaagttactccactactctttttaccataaatcaaattataagtagttcatattattattatttatactcttgaaactgtttcttaatgttcacaacatcttctcattagtattgtttttgtttggaaaatgtaattaattcaatcattataattatgatcattaatttttttattcattggtttacttaaagaaaaatagataactgattcactataaatatttgaaacacaaaatcacgtaaaataaatattatttgatatatcactatttatttattttattataaagtttaaaaaatataatattttgtcttatatattaactatatcataattatcaaataaccgtaaccgtatgtaactataaccgtatttaaccgtaaccgtatttaatcgtaatcgttttaaccgtatatataacggttaaaattaaagttaaaaaaaaattataaccataaccggtggttaataaaccgtaatcgtaataaccgtaactgtagtcatgcctaacggtgtgtatttcggtgtgtactcccacattctaactattcaaccgacaacatattaagcgtgaaatgtcgtaaatggtcatagggactttgatttatataaggataagttttaagttcacccattttaatttaagccaatcattatgtcatatgcatacaacacataaataaaattaaatattagacaaacaaataaaataaactaagagttgttatttaatcccaactacatatttcggtttttgtctttatcgcaattattagttttgcacgttttcacgtataaatgacaatcttcacagttttaactatatatactttggaaaatatatcttttattgcaactactcatttcccacaaattaacgtgcaacattttatcatagtttagtatctttatcaaaattttctgtattgcatcaatgaatctcggtgccgtgccaaggtccattgtcgcttaaggcaaacttttaaaatgtgacctaacatattatacttttgaaagaatttttttttaatgtaaaaaaaatataagaaaacgttgcttaatttgaaattttttcataaataaataagatttagtagtataaacattaagaggatatttttcaaaagtataaacataaacaatgcatttttccaaatttactctacattattttagtattgaagaacatttaacaagacaatgataaaacaaaaatgttttgaaatttctttgaaagtactgcatatgttttacagtatgaaaatttcaaccatttttttctttggtttatgagaaagtaattggaagatcacatctggttattattacaatgaaaattaatatatgtttgttcaaaatagttgacattacatatattatgttaatatgtaatatgtaattttttaatatataaaatattgatataaacttgatacaacgaattttaataacgatatttttgccacgatagaggattaatttagacttcagtatcctaatataagatatctaatgaagaccaaggtaatacatatatatttaattttaattaaaagatagaaaaatgtaaagaaaaattctggaattttgttgattttacatggtaattaccaatgtttgttcatcaagttaaattagtttcaccattaagtcacaagtggcttgatagaacccgttaattcattccgtcaaatcattttgacatcatgattaatttggtacaatcaacaaaatttggagattaaaaaaaattcaataataatttgagaactaactttcttgacgggaaaaccctaaccaaaaccgtgcgaagagtaacaagtatcataagctatttttaaaaaaatgctccagtgtagacaaaataaaatattaaaatatttttaagacgtttcagtagtagaatttttttttttacgatgactagttgcaagatgaaaatatttatagaaacagaataaatagaagaaagtaaagtaaaatacatgattaatttcagttttgaactagtagagatgatttggtgagaaaacgtttgtttttgttactgtattacgttagaataaaaaaattaggaaatcccaaagacataacgaggaaagtgaaaaccaataatctctttgtaacccttaattgtttagttataacttataagcgtatgtatttacattttcctttaataaactaacgtattagaaactaatgtttgaaatttaattgtagatgaaagtggaaactcatatctttttctaagttatatgtaaacttcaacatggtaagttatattacttgcccatatttatataactttggtaaggataaactatatattattactaaaatatatgcccctaatctttttctaaaatcagatgccgtaggccaccgcttctttttctctcacgttgacagctgtcggcataaatagctagccctagaacccacatgatgtcgcctatgacataacgcaacgaccacgatataaacatgtagtatttaagagtacgtctttgacatatttattgctgtgggatttgcatcccagtaagtgcagctatgcaaatgaaacctgctaattggagaaaaacactagaaatcttatctccatgaactactagaaatttataaattacatattccttatgttcttaatagtttgatgttatggttttctcttgttccatgatatcgatgatttgtaataacattatttgtgaccaatagagaaaagaaaaatggaactaatattattaaactaacaaaataatattctatctgtatcaaaaatattgattttatagagtttttgcatcaattaagaaaaacatttaatgtttagttataaatgtactatgcattcatactaaaccatttctcataagtcataactattaaccaatagtgattcatcaaaattttaatttctcaattaatgattttaaaatttcacaatttattaacattgattgataaattttacagaaaatcaatctttttcatacaaaatgaaaacctctgaaaatcattttttatgatacaaggagtaataaaaaataaaaaattattttttattaatttgtgtaaaatccaaaacattatgtttctaaaaacagaaggaacactaagtttgatcaaacaattaggaatttgagcttttgctgaaaaaaaaaagaaaaaaaaaaagaaatttgctataaaaatatatcttgattttttttttgtgcaaacattatgcatatatgatcatatcggaaacaagatgtatcccaactattggccacgcggttgttgcggacttgaagttgtgcaggccctgatgaaatcaattatcagctgtgactttagctaaaggtgtaagtggtcctggtgaaggaaatcaatcgctagacaactaaaaatgtatggtacagagtagatactatattaaatgtaataatgtgaatattaattacgtggtccttctaatatatcagaagcattttacaatattttgcttaaaaaacaataatacaaaaaaaaattgttgatggttattttatgtattcatcagaatctcgacaacagagagcaacaacgcattcgcaaactttttattcaaactcaaaaacaaaatatattatctggtttctacccatttaattaaacatgtaatcatatatgaaagttatttatatactaatagagtgagacctctataaattaatacttaatatcattacggttctggaacaactcatgccactgtactacacatatatcttgctcattttcacgttaattcctcactatttcatttttcttcataaatatcatggcttcaatccatacccaagaaaaccaaaaaccgaatttcatctaaacagaagaagactaaaaaacgaatataataattaaccatcgtagaaagtttgtaaagtaatcatataacatgaaaattcaaaaaaaaaaatcaactattttttatttggaaatttaatacccaaatatttttagtttgaagaaaattttatatattaactaaaagatgtgaattaatacccaaaaatttatgtgttgttatttttatatacacgagtttataataaatcaaaattttccaactttactcttatctctttaattaattatttattttatttttaaaaaatattttggttctctttttaccgaattaaaccgaaatcaaaactggttatcaccaccaccgagttttgttcgtcgatgtgttaaccagcttcttgttcgtagagaagaatttgcaaaggtaagagtcggttaacatggtgttggtgaagagggaagctctagaaagtttataaagcccagattgacaattggcgtgttggttgttggattgggaaagctcatcgggttaacatgacaagaacaaaatttggtggtggtaataaccagttttgatttggtttaatccggttaaaagagaaccaaaataatttttttaaattaaaataaataattaattaaaaagttaaagataaaattgaaatttttaattattcataaaatcatgtataaaaataacaacatataaaattttagatattaattcttgtatgttttaatttgtatatgtattttttctgactaaaaacatttgggtattaaacttctaaataaaaaatagtttgaattttttttagaatttttcctataacattaatcttgtagaatccacaaaaattttgtagagcccagtgccttaggagtatcttatggtggtaatgtcgacaacgtttttatttgtttttggttttggaggctaaacctatttatttcttcaatttcaaaatttcgacaagagaacacataaaagaaacagagtctttttatccaaacacagaaaaattacaaactagaaaacaaacacacacaaaaacaaaacacagaaactactcaagaaacagcgatttgaacagtcttaggtttcggcggctgtggcggtagcttcttgataacaactgtcaaaacaccttcttgatatttagccgttacagaagccatatcagcatcttctggtaaccggaacttcttaaccaaattctgagcaagtctcctctcgagtctaatatacttagacccttcttcactctcatcatcatctctcttcctcttcccattactctttatcactaaagtcctctcttcctccactgtaacctaatttcccaccaaaacccccaaatcataaattaaattaaaaaaaaaaccctaatttcataaacaattcaacatttctatgggattatatcaatacctggatatctgattttgaaattccggggatatcgagataaaatatgtattctttgggagattccaaaatgtctattgggatattattgctacttcctcttccacgactctcgttattactttcgccggaacgagaaatcgggagaattagcttctcgatcgcctccggtaagccaaaaaagtggttaatcgcaacagcactcatcttctccgatcaatgactgccagaaaacaaaacagttaaaaaaatcaacaattctgaaattttccaggaaaagatcgatacagagaataggatcattacctgggaattaggataaccctttccaattggatcttcctcttcttcgatttgatagtatggggtttgaaattttcactccattgatatatagtgagtaaacaccagtgagctagaaagttccagagaaaatttctagaagtaactagtgaacttgagagttgtttcaaaagcttccacgtcattaaatctccttttattgggccttataagttatttataggccgtttagcacattggacttgatttatgtctttgttctattttgtatttttatttcttatatctgtttttattgggccttgaaagttattccaggccttagcccattagacttgatttatctcgttttattttagttagagtttttgagacttgagacaacctacctaaccatactatagacaagaaaataaaaatacttttgtatattagagaaattttgaaatccgtcagtgtgtatattcaatattcctaacgaaaaaatggccaaagcataaataccttatagcgatatttgagtatttaccataaaaccattcgaatactgtcacggttctaaatttctaatattgttcttttgttattaaaggaaagagtgaagggtgttttcgtcatttaacatatccatcgggtcaataacggagattacctatccggtgaccttatcccctcgccggtgagcgaatctcagatccaaaattttgcaaaatcctcagatcgtcttaccttctccgaatcgatcgatttttcatggaggacgacgacgagattcagtcaattccatctccgggagattcttccctttcaccacaagctcctccttctccgccgattttgccaacaaacgacgtgacggtggccgtcgtgaagaaaccacaaccggggctttcttctcaatctccgtccatgaacgctttagcgttagtggttcatactccttctgtaaccggtggtggtggtagcggaaacagaaacggacgaggaggaggaggaggaagcggtggtggtggaggaggaagagatgattgttggagcgaagaagctacaaaggttctaatcgaagcttggggagatcgattctctgaaccaggtaaaggaactttgaagcaacaacattggaaagaagtagctgagattgtgaacaagagtcgtcaatgcaaataccctaaaactgatattcagtgtaagaacagaattgatacggtgaagaagaagtataagcaagagaaagctaagattgcttctggtgatggacctagtaaatgggttttcttcaagaagcttgagagtttgattggtggtactacaacattcattgcttcttcaaaagcttcagagaaggctcctatgggaggagctcttgggaatagccgttcgagtatgtttaaacggcaaactaaaggtaatcagattgtgcagcaacaacaagagaagagaggctctgattcgatgcggtggcattttaggaaacgtagtgcttctgagactgagtctgagtctgatcctgaacctgaggcttctcctgaggaatctgctgagagtctcccacctttgcaaccgattcaaccgctttcgtttcatatgccaaagcggttgaaggtggataagagtggaggtggagggagtggagttggagatgtggcgagggcgatacttggatttacggaagcttatgagaaggcggaaactgctaagcttaagttaatggcggaactggaaaaggagaggatgaaatttgctaaagagatggagttgcagagaatgcagttcttgaaaactcaattggagataacacagaacaatcaagaagaggaagagaggagcaggcagcgaggagaaaggaggatcgttgatgatgatgatgatcgcaatggcaagaataacggcaatgtaagtagctgacaattgaacacacaaatgttcctatgatatttgctatgataagctggattttaggttttgatgttgttgttgttgttattgttactgccttgtgggatgtgtaaatgtagagaagttatgactctgattatcatcatgttgttgttattgttatccatcttcttgtcttaaacatgggcaaattaaaaagctttgaacttgaatagcttgttgaaaacctctgtgattcttaagtagagttctgaactagtagtttgtgattctaagttaagacacagcttatagaatattcaccaatgagattagagactaatgattggattagtcagcatatttatccttaaattaaaatctccttaattaagccaaagcttataattaacctcactaaaaatattcaatgcttctctcttctctttcatccttacctctctactacctctataaaaccatttccattgcaaaggaaaaaaaaagaagatagagacagtaaaataaaaacccgaaataatttgaaaaaatattgttatatatttttggataaatttttgttgatcggatggggttcctacacaagctgtgggatgaaacggtggccggaccgacgccggacaatggtctcgggaaattgagaaagcacgattcattatccaccgtccgatcttctcctccttctctctcaagcgaccaagtcaccagaagcatcatggttaccaaggggaataacaatgttcgtggtctccgtaaattgaaaatggatccggattctccaacctgttcaagcagcaaccctgggacacctttaacccgtatatatttctcatcttccctttaaactaaattaacaataacaaaattaagactcacatttgggtcaaacacatttttatgcagctgggacaccatgctatgctttgggaccattcactgccggcaaaatcccttcctctggcgaagacgatgcagcaagtctaactacttatgaatggttatcatctctatcacttcatttcctaatcaattctcttttttgttgttgtgggcaaactctttatgtgtgtacttatgatatgctttgtgtacgtatgcaggattgtgataaacgcgttggaccgttgaacaagccgagagagaaaaatcttacggggtttttgtgtaaatataaataacctatgcatgtaattatgtaaatatttactgataaggtcagtattaaatgtaatgtctcttgaatcaatgtaccctattacagggtcttgaaaatattatttgaaccctgccaatttcctctaatcgtttaaatgttgaagcctatatcaagattctctactacatcctatgaacgacaaaggcaaataaaaaaaccttaattatatactttgctgcatggcaaaggacactcgtggacagaacacttgatgcttagttaaactggatttccgacaaaataaagtactaacatgagaaatgaaactataaaacttttataaaagacaaattactttgtttcaaacctatcattacagaaccacaaacaacattaaccccagaaaaccaaatccccttttatttgatgttgtcttattgcttggcttacaatccaagtaagacctataggttacaaactgagcataaagctctgcatacataaataaaaccaacggctttaaatgaaagagacacatacataaagactcttgaacaaggaaggtctagaaaaagcaagaaagttataaaattaagaagaagaaaaagaaagaaacagaaaaaggtatctcagagccagtgaagagggtttattactgatagtacatgagctgctgatgggccgcagctacattctgatagccaccatcatacatagctgcagttcctccagcaacattgactccaagacctgcttgcctcagagaatgttgagcctgaggatgcatcttggctagagccagttgcctctcgtaggctaagaggtccattgcagacagagaagggactgatgccggggctggtgggggaagtgggtttgaggctgtgcctgatggagttggtttgtttccccaggaacactgcaataaatcacagaaacaaggaaatgggtttaggggaatactggtaaaaaccaattacaagcagactttggttgtctacgtagatgcaacaacagatagatctatgtaacattaactgaagcaaatacccttatctgtctgctaaagaggaaaggctgagcgttgcccatctgaatagcaagagcagcctcgtcatgagtgttatatctcacaaaaccaaaccctttgtctcgctggacacggacctcttcgatcactccagcaccaagggtatagaatagacggtgtagatcaagctgagttacctgcaagattgacaactgtcacgaggcgccaaaaagaaaaaccccaggagctgttgcagtgtttataaagaacaattcgttaagttgacaacttacttctggagagagatttcctacatagacagttgtaaattgaggattgttttcaggggcatcttcatttgacagctctctaccatcctctgcaaaatcaagtattatatcaatgtaatctccatgaaaatctgctttgaggaagaaaataaaaattttagaagttgcacagtaaacaaaagaaaacctgaagatccgttagtaagttctacaacactttttccatcagagctatgtttgtcctcgccaaaagtagcaccttttgtcgcccagttgcatctgatctgtctgctacttacccatttacctgagaatacacaaaacaagccaaggttctagtaatgggaaaccaagtgctaggaattgagataaatagctcaattatagagataaatcataatcggcacaagcaacatgtaacttcaacagttgttcaccaaccaataagctccaagaacacaattcctgaccaaatttcacctttctagatacaacaaatattacagagctaagtgcatcatacaatatcagtatgtagaaaccaaagttcacaataaggaaccttaaagctctaaaccacaagctggtatatgataattcttaccattcatctcatttatggcagtttgagcatcctgcaaattacagaaacatttaaaaatcaatgtaaacaatgaatggagctaaaaaaaaagtcactcatgattaaaaggatataaaacctgctgattacggaaggaaacaaaaccaaagcctcttgagcgtccagttttctggtcccacattactcttgcgtccctataataagaactatagatattaaatcaaagattctgatagactgtttaaacaaataagcttaatcattaaagaaaatcttgtaacacatagtgatatatgcgtacaccgtagttgtgtaacaagattttcatttttgtaaccagctagtaactaaaatcagaagaccaagcacaagaacttacgagcagctgttaaaagcagaaaagctatcaaacaatgctgcatcagtaacctctggactaagatctccaacaaaaatgttgaaatgacctgcatttcatgaaaccaaaaccattcagtaccatgcctcactcaaagaacaaaaagaaagtccttgacaatcaatccgtgctcataagaacttacttgatgtatcttccctttgaccagttgcatacgcccaattaactttcataggctgtccaaatctgtgaaatccaatattataatctaagagaacacatgaataaattgactaatcaaagcatgaagtatcaatgttagattcttacatatgccttccgttaagagtcattatagccatactagcacatcttcgatcaaagtagtgaacaaatccatatgatgactgcaaaagtgtaaaacattcatgtctagaagttagctttcaaagaacactaccgaaaagcttcattcgaataaaaaacagaagggcgggttccaaaactctaccttatcctttctgatgagtttacagctttcaataggaccagtacttgcaaaaatctcttgaagaagaatctctgtgacctgcgtatgaatgtttccagcatacctgcaaaacataaaagaacaattacaaattgaaactctgcattataccaaaggcgaaagaaagaaagaaaaaccaattgaaataaaaaactcacacactacggcaagtagttggatcaaaaccaggaggaaggtttccacttggtaaaggctccatctgcaacaaaaatgcaaaaccataaacaaaacattaagagatgattgcagaaacaagtaccaaaaccactccttttctacacgaacatctaccattaccaccaaaattaaacacaaaatcagcagagaaaccgaattactaacaaaaaaacacaagcccacaatcaaaagctcaaaactttacataataattagccagagaaagagacagagagagattcataagattaggtaacagagctcagtgaattaaaacccacaatcggaattacagaacaagccctaatttggaatcaaaggaggttacatagaaaatgaaaagagattagatcaagaaagaaaaaaaaaacctgaggaggagccataacaccaggatgataaagagaaggatgttgttgcatcatagcttgttgaatcatagcttgttgatgttgctgttgttgttgttgttgttgctgcttaataagcctttgattctgcattttttgtgtttctttctcactgcgataaaaatatctcttttgtttcccgagaaaattccccttaagctagggttcaaaatcaagtaagaagaagaagaaagaaaaaaaaaggaaaaaaaaaaggtgaaaaaaaagaaaagaaaataaaaatgagagaagaaagagaaaaataaaaatggcacgctctctctaaaggagtaaagaaaggccgtacgaaacaagtgaccatttataggagtgtgacgatttcttcgagagagagatagactgtatactaatctcacggcagctgtgatattcgttttagtgactgaccaatcatttgttctgaaccttgatgttgttgacggatcaagcccaaggcccgaacaaattcgtttcagtgactgaccaattgttgacggcccagcccaaactaatatatacttagaaattttgattttctttgattgactgaaactgcactaaaaaacattatcttcttacataattcattgtttgttttatcccttatgtttgttcgttttgtttgtcggcaagatttttttaaacttattagtactttttagagtatttgatcaaatatattcacaaacaagttatatattaccaaattttttcacaagtttgtaagttgattatgtacgatttagaaaattttaaattttaaaagattttttttacaagacgatgtttttgcatacattttatcttttctttccacaaaaaaactgtttcaacgacagtattctccagaaagtgaaagaatgtgtttgttctttttcggcgttttaaccttgattatgctatacaataacatgatagtatcaaggaattcattgattttgtgaagtgtttgtttaatcggaaaatcaagtcgagtataaagaacctctttttaaagattcatctggatgatgaaaatcctcacctagaccaaactcttgtttgtagctcgatatgcaatgtgcttcaaggtgatgttgttgcggatattgatatgttcatcactttaacaagggattatttccatcttgcaggtttgtctttgttgatcttcaagtgtaagatactagttaagctgagattacaacgcgattaagctgaaactgcataggagagattatttaaatattataaaaattatcctcttatataatttattgtttggtttatctcttatatttaatcgttcgttttgtacgtcagcaagattcttgtaaaggatcaaatatcttcacaaattcacagtatggtacttattggtaagttgattgtgtacaatttataattttttcttatatattattaccgatgatttctagtgagtttatatggaattttatcaaccatttcctaacattttattttcaaagtaaatcatgtattgatggaaatgttttaactccaaaatgaattctttttttctcacgtggataaaagaacatatcaatgttctttatttgtgcattcttctcttctctcattgatataaataacatttatttctccattcttattctagatttgtatttttaagtatttaaagttattttatatcaattataactagagagccaaaatacagagaattgtaacaacaataggtttaaaaaaaattagaatatcaataataacaaaatatatgaataaaaatatataaaaaagcttgaaccaacaataatgaagtttggatggaatttaagaatcaataaaccaataaaatatttaaaatctacatataccaataatccattttagattttacttagaatagtagatttatgatctatcatttatccaaaccaaaattagtgatagtgataattacactttaaaaaatgaaacgaaatactcacaaatgtcattcttatagatttgattcatcatgtaaccaatgtagatagtcttagttatgatggttgttgctaataattattacatcaagactctattaaggttttaccatggaggtagtgtcgtccatgagaacaagcgaacaagtatttggttgcggttttcagaggatattaatcggtctagtttttatgaaacttagctggttttaagtaatcatgcatctcgattcgaatctcaacgtcaatctttcgtgtttttcaatttattctttaaaaagtcggctaaacaaaatatatgggcttgcagtccaaaaatgttcatcttaaactctgcatggaggctataacatgatgttagtatatccgcattgaagaaaattggtaatttgatttgagtaaaatttagatattaaaagtataaattctttttatggattattatcaataattttcatgagttttttttttttgtgtggcgttgatgacagtggtagtgatgatggagggatggtaataacatgatggtcacaacggtggtggtgatgatagtgaaagtggtagttgtgatgatgttgttacttatgtataaaaggtaaaataggtattatatatttatagtttagtgtgaaaaaatatattataggtttatggttaaagtagttagtttttcttcttctttttttcttgccaaattcatgtgactgaaaacgaaaaatctacctccaaggtgaaagtagtaatagaacttttaaggtaatctatgttttccggtaacttcacgccgtcggcgagaatccaaatatttgtatagtttttttttaacaaaacaaaaaaacacaccccacgagctgagcgttgaatagtctattgactcttttccccgaaaaaaaaagaaggcgaattttgatttcttcattaaaaaattggcaaagcagacttcagagttctctcagtataatcttcacctaaatctcatttcaaaggaacaaacaaaaagaaaacacctaaatcgatctgtgaagtcaaaacactttccagtttcagattctgattatggcaacaccggagactcgtggcgttgattccgatttagagacagcggagaagataatactccggtgggattcaacaacatctgaagaagctaaagagaatctgattttccaaagcggtggtgatcgagaagaagtagatcggtacttgaaagctgtagatgaagttcaaagacacatctcttcaatctcaatctccgatgaagtcaaagcaacgattcaaatcgccatggctagactcgaggacgagctaagaaatatcttaatctctcagacttctactttcgaacctgattctcttcttctcgattcatcgttatcttcttcctctttcgcttcttcttctcgtacggagcttgaagatgacacttgcgatgacggtaacgaagaagaagagcaacaacaagtggatctggttttaccagatggttccggttcagattccggttcgagacggttatcgaggagtaggagaagcaatagcaaatccacaagcagtatacgagagatcgatcttgtaacaccggaagctgtttctgatctgagatcgatagctcagaggatgatcggagctggttactctcgtgaatgtgttcaggtatacggaaacgtgagaaaatccgccatggaaatgatttttaagcagctagggattgtgaaactagggattggtgatgtgcagagacttgactgggaagctgtagaagtgaagatcagaagatggatccgtgctgcgaaggtttgcgttagagttgttttcgctagcgagaagagactctgtgagcagatatttgaaggaaccatggaagagacttgtttcatggagattgttaaaacctctgctttgcagctttttaatttccctgaagctataagcattagtagaagatcacctgagaaactattcaagattcttgatttacatgatgctataacagatttgttacctgatatggaagagattttcgattcgagttcatcggagtcgattcttgttcaagctacagagattcaatcaagattagctgaagcagcaagagggatacttaccgagtttgagaatgcggtgtttcgcgaaccttcggttgttcctgtccctggaggaactatacatccattgacaaggtatgtgatgaattacctcaacttgatctctgactatagggaaacgttgattgatctcgtcatgacgaaaccatgtcggggtttgaaatgtaccaatgatcgaaacgatccggatatggatatctctgagcttgaaggaatatctccgttagctttgcatatgatatggacaatggtgatgctacaattcaatctagaagagaagtctttgcattacagggacgaacctttatctcacatcttcgtcatgaacaatgtccattacatagttcagaaggtcaaaagctctccggagctaatggagttgataggagacaagtatttaaggaagcttaccgggatatttagacaagcagctaccaagtatcagagagctacatgggtcagggtgttgaatagcttgagagatgaaggattacatgtgagcggaagcttctcttccggtgtatcgaagagtgctttaagagagaggtttaaagctttcaatacaatgtttgaagaggttcacaggattcaatcgacatggtcggttccggatactcagcttagagaagaactcaggatatctctatcggagcatcttatcccggcttatagatcctttcttggaagattcaggggacatatagagagcggaagacatcccgaaaactacttgaaatactctgttgaaaatcttgaaaccgcagtgttggatttcttcgaaggatataccacagccccacatttgagacggtctcagtgaaagaagaagattgaaaaccccataaaactttccttttcggtttgcccacattagaattaaccatttatatcattctttgaattcattccattttcatgtggtggcagtgttgagattgttttccaggcttctggtgaatagtctctcactcttttgtacttgtaagcatatttgttgtgtgttgtttgtttgttaccaaatttcattactccattgttgatataaatgtttgtattttgtgacttttgttgtactagttccttcataaacccatctaaatgcaatttgattttttatttgactttgagttaatagtcacaagttagggaatcaggatcaactaattggtttgcttgttataaaccaaactatagcgtaagccttcctttccttctcttcccaaactagccaaacacatgatcataaaaataagataaacttattgaatggtaatataatacgaaccttctttagtggttatcttctacaagggggcaagcaattcttgttggtacaaatttagaaacttcactgattcaatcccatgtttcttgcacactttaactattcgtacacgtgtctatttcccatttgttaattttccaaacttctcgataattagtgacttggtgtctagatacacagcctgtccatttgtgatgtgtcttcaggttcagacaaaaaaaatcagttatttcgaattgttcagtttgaaaaaaaaacttgttcaattaaattttctatccgtttttaagttcaatttcgcttctttttcagtttaatagtatacaattagattttattttggttcaattaggataaaaatgtcagctctaaaatctatggtgcgtaagattttgtacatgtaatatctatctgtttttgtagacgtgatatagtattattatgtttgcagtcaaaaattctaaacatgttaaactaaagtttgcagattaacatggctgctaatcaaacaacagcttagctggcgatgacaaactattactggcatgactggtaatttccaaataatggcagcgattaattggtctaaacatatgcagacgtggagtattaactaacaaaccaacactgtcttattttctccttaattaattggtcgtggtcatgttttatttttacggtcgacccaaaaaaaaatgttttatttacggacgacacaaaggatttgttgaagagtctcttcaacaaaaattcctttaaattccgacgattctctttcttgatatctgtctctccaaatcaagaaatctctccactcgatcaaaaagctctcttgtctaacaaagcttgcactaaatttccaaaaaaaaaacaaagcttgcactttgatttgatcaaaagttgaagcaaaaaaaaagacaaaaagaacatcgctgaaatgatgaattctgagtcttgcttggtttgaagttcttcttagaaaatgattttgtttttcgagctcttttacggcgaagtacaagttgcagagtgggagaaagagagatagctagcaaaacctttacataaatatttacgtgtacataaatatacatacgttacacaacagattcgcagcaaaaggttagtgttttaactacgaatcagattcgtctctgttttttaaatggctaattttgatgtttatgtaataacacagatatgactgtgaatttaatggcgatcgctgaatcaaagccgtcggaggtaggatttgcaagatgcgaatgttgcggtatgaaggaggaatacacggcgggttatatagagagcgtacggtgtctatacgccgggaaatttatttgtggtctctgctctgaggcagttaagtacgagattttccgttgtggaaaaaaacagagacgaattggcgtcgacgaggctttggcgattcatatgaagttttgcagcgagtttgttgcttctccgtctccgacggttgatttcatatttgccatcggagagatatttaagagaagattaattctgaatttgccaagtgtcttgacgtcagcagcgtcgttgccgccggctgttgacggtggagaggtttgtggtacggcggtgattggtggggctggaagctgtttacctgctttgtcgggaggtgtttagatcggaatactttatttgccggcgaggtatctaaccgagaagaaggaagtgtgaactcgagaaggtttctcgaaaatattgtttataaaaaaggttacaaattcatctgtaaataaatgaaaagttgttaaaaagaaaacaaaatctgtaattttagtatagtgcttgttttgtaaaaatgttaaatgttgatatgagtggtaactaaggaaaaattttggtgtgttaaaaatgttttgggtcttaactaacaagtgttgttttgtactatttttggctttttaaaagataccattgttcttgacccaaaaagaagaagacactattgtcttacaatttcaatgtatcttttgtagttgaaatatataatttactcctacttaaaagttaaaatcaacaaatgtaaactatataatttgttaatagatagtcaacctttttcttttccttttaacagtcacccttttgttgtagaagtatgacagaacaattaaattgttatcttaatttgtgtgataaatgtgaaaaaaggattgtaataaaacgaaaaaagtattataattattttttccatttccttattattgtagctaagatttgtgtgaaggttatgaatagaaaaaaaacagacaccacaaagatcaaagacgtaataattgttttctaattattgttatcattatttgtttagataatgtatttcttgattaatgtggtgttattcaattatggagttaaagtcaattttttaagctttagatttgttttctgatattgcttttaagaatatgtttgtatgaatttcaaaatctctataatatgtcttagattttgattctaatgatttactcatgaaactcaaaagagttttcgtttcaaatcaattaatatacaaagattttacaaatcttttagttttgaataacattggattttactgaaatatttaaaatcttaattgaataacaccaaactttaaaatctattaaacatgatttacaaatatgagttttaataatactagattttaaagctggatttagaatcattagttgaataacagtacaattctattataagtggattcttaaatcttgcatgtgcgaatgccgaatggactaatgataagattgtgatttagtgggacctttgttgctaatatggtctaattaaatcgataacgtaaaatttaggagaagcttcaaggttccactaatttaaaattttctcaaactaaagttgacaaatgacaacaaatttagccgacatccacgaaataaacgtttgcatcaccataaacgaataatgcttcttcatatgcttagtaatattcaaaggatgattttcttgtatcttattcttacgtatacttggattttcaatatttttactaagttgacaattgaataatatacttttattattgcaaaccgttatttgtaaacatatgtactcagcatcagcatcttttaaaagtatgactgatgctaaatttataacatcaggaaacgatttatgttacacgcatgattagtcatttagtccgaatttatcttcaaattaacaatcaaaatatattcaatatttttttatatatattaaaagcgtaatcatcttaagtcaaaggcttggagagaacaaggcatacaatacaagtatcgaaatcgaaccaacataacattattaattaacgagtaaatctctgaaaaatctaaccgaagttaattccttgcgctagaggtaactcgtttccatagttgatggtactgtcaaaagataaaccgaattaaagaatcaaatatcaaaaacttaaaccggaaattatgaaaagagagagagaagcttaagattgttaccaagtcgatcgacgcatgtactgtttccatgagtcgcttccagcttcacgaccaccaccagtcgctttctcgcctccaaaagctccaccaatctcagctccattcgtcggtatgttcacattcacaatgccacagtcacttcccagtggtctagtagtaaaaccatcacattaaaattaatttcagtagattatattggtcggaaagattgagttaagttgttgtttttatagcacttacccgatccacctgaagatgttttcagggttccgagtgaatatcgagctgcttagaccttgaggaaccgagttgtttatcgcaacagcctctccaaatgactgtccaaaagaaagctcatcttttcaaaagtctatttctgaagaaaatagatgatttcagagacttttctttttgtaccttaaactttagaacatatagaaccggagcaaatagctcttctttgacgacagcagcatctgctgatatctcgattatcgtaggctccacaaagtttccttcaccttcgactgctttacctcccgttagtattttaccaccctgcaaatgcaagattggttttaagtgtcagttgaaaagattaaactttttaagtggttcttgattatgcagcaaagcatagaaagagaggtacttgcctgggatttgatgacttcaattcctttctcaaagttcttttttgattcaggagtatgtaatggtcctaacaatgtccctttctcaagaggattgccgattttgacttgtttgtatgaggtaagcagttgctcgagtactttgtcatagacactctcatgcaaaagcttaaaatacaagaacaacatttagagtattgaaccaaaggaatagtagtagcaacaaagctaaggggattagattttgttaccagcctacggcaagttgtgcaacgttgaccagcagttccaaccgcagcgaatagaacagatcgagccgctaactgtatatcagcatcgtccatgactatgattgcattgtttccactcaactcaagcaaagttttcccagatctcgcattcactgtttgttgtaccattgagcccacctatgcataatattcaaagagaagacaatgatggaccagtaggctcagtgtgtttggttgggaggtggaatatagttaaggaagtaccctggagcttccagtaaaggatactaagggaatgcgtgtgtctttggctattgcttcaccaatttcagcaccaccacacatggccgtaaaaatggcaccgggtaagttgtttttctctaaaacttcagctactagcttggtcattgcgatagttattaacggtgtagttggagcacctttcctgtggaatcacatgtatgatgtattaagtattagctacaccaatcaaaccaatacaaattttcattgtcaagattaatattgtgttactattatgaaacgcagtctctcagcaatatgtcagcactatgttatatgacattaaggagacgtttatgcaacatttgaggatcaatggaaatagacagcaattgtaataagtatatatcgataattccgcttcttatagtaattttaacctcttacaggaactactaggttctcaaagcttaaatcagtgtcaaagtcgttatttaccagactacacagtttccacagacaagagcaatacaagcattccaacctgcaataccacaaaaaatttccattaacgctgggaaaagaaagcagaaacacaaaaatttccacattgcattatcagttataaaacttctcaacatggcaaaaccagtgtggcaaatctagttgccacaatacgagttagttcatctaactctattgtgtccactttcatgtgggaattatagacactgaaattgcagagctacgaagaagcatgacagactttaatgagcaatctcacgagacatcagtgttatattgtttctatgttttgtgtgacgcactcataaagatttgaaattagacagaagacttaccaagaactgcacagggaaaattaaacgctgtgataacaccaacaatgccaagaggattccacatctgcgttacaatgttcaagccgaatgttaatcatgtcctaagaagtggatctacaaaactttgacaaaacaaacttgcaattcacctccaacatcatgtggttagggcctgcaaccgaaaaaaaatgatatgagttagagaaaatcctttacataaaaaaaaaaagcatttgcaactccaagtgccttcaaggagatatttgaggaagataaatctaatctaggaacaaaatgttaacagaagcaagaactcacgttctgaaggtataaccgatccattgagttgtcggctcaaaccaacagcaaaatcacacatgtcaattacttcctgcaaagtatgcactaaatgtattaagctatatggaaaaagtagcagctaagtttcatattagctatatcatagattcataggttctgtcctttgggtaaaatgtgtcacaaagaaaaaagtagctaaagtcaaaatgtatgaatgaaaaagaaactaagtattggagacggagtaaagatacctgaacttctccaataccttcagcaaggatctttcccatttcaagagaaagaagacgaccaagatagtcaagtttggatcttagtgcatccccaatctgtctgacgatatcacctctcttaggagccgtaacctgataaagataactccacttagctattcggtgcaaattcactcaataaccaaagcaaattcgctgaatgaagttagaaagcaacctgcatccatattttagctgcttcctcgcaagctttcaaaccttgctcgtaatcctctagagaagcttccacaacttgagcaattggctgcatcagtaaaaaaccaaaaaaaaatgattattgagcagaatatcatagtagacatggaagagaaaacaattcacatcatcgaaacaaaatgaaaccaaaattcaatccacaaacaaaccaaccttagaaagttcacaagaatcaggtctaaactcaatgattgaaaccaatttgatctccagaaacattcaattatataaaactttcataggcattttcaaaatcatgtaagaagaaaccgcggagaaacctgattgttagcaggattgagagttgaaacaagaggtccgttggcttgccatttgccagcaacgtaagatcccaagttgtgagaagtcagcccaatctcactcagaaactcgtactcgttgttcgccgaacccatctctgcgcaaaaattcaccccagaaagaaaatccagagaaattatcgataacaaagccagagaaaaaagagcaattatcagaactcgaagatcagagaaaaaaatcacctaatggttgatcgtatcgaagaaatgagcttctgatcttaaagagggagtgagagagagagacgtgtacgtcttttgtaaaaaaagcttaaaaacaaacaacggttgctgatttttttattggattgacggagaagacgaaagctgagctgctgtgttcatcctttcccaatattattatttttggcttcactcacatcacatgtgtcacgtgtcctatgctttcgttttccgggtcaacataaacccgaatagaggagttgttgttatcatcgacattgccacgatcatcctcgtatgggccaggcccattaatatttgttcatcaaaccgggttttaccgccactaaaacgaatcaactattggtttccgggtcacccgattaggatgcgacgctaccgatcttttttctttcgattttgcgtcaggagaaaacgattaccacttgaacctttgattcaatctcgtccactaaacgattaccaacaatttctggttcgtggtttctagttcattgtcgcatgatctgattgtgttgatagaattcaactttccatatttaggaatgagaacactctgaatttcatgtatagcttttgataagagtgaatgaagaatctatatttttggttgatcgtagtggcaaatgattggggtttaccttgaaggtcaattcagtagtgggattagccaatttactgtaattcgtccacatttgagtgaagttgaacactgctagttctggtaataacagattgagtggtgatagttatgtattgtgctcttctgggtttcatgaacatagaggttatgctgataaatatgagttcttggaatcaaaaccactttgctctcaagatggcttctttgattacctcaactttgtttctgttctggtgtctggcttccatctgaatgtggcattcctatgatcagatatcttaaaatgggaatcggcaaaacggaaatcaatttcatgagattactttcagctgcacctaatcagcaaaaccagtctaagcttatgcatgtaaccttcttttggatattttcatgtataaactattagaatttgtgcttattataacctctctaactgttacaattttgattttgatgttgatgtgtgaaccatctgcagtatgttgctactttgagggaacagttggaacaactctcggaagagaagacccttgaagggcttcccaggttacttactctcttccttgtttcagctgtgtaattttaaatctttcacatttcaatgagttgaaatcacaaagattgctactaggatcaactgtttagagattctaattgaatagcttggtattctattcagttccaagtagagatattgtcgaaagactaaaatattatgaaatatgctctcaattaatatggcgaattagagtgtctctatttgatgctaccaaaatacttatgctcatctctctaaccagagttacaaacgctaaggtgaatgagtactatgagaagattgaagctgttgtttcacgaatagttgctcaagtggtaagtcacctgaactagaacgagattgttcatttggattctacagctaagaaatttggaggaacatattagatgatatttctgctctagctgtatgatgcttacctatttactactagccgcatttgatctgagagaatggtttgaagtttgctttcttacttccctatgagtttagtttcaggcatgcacgttttggtgtacaaccatttttagttgcaagaattcaagcttttcttctgtaactaataccaaattattttgattcctgccaaatttacagcctcacacagaggtatctgatgaagcttttgcaaaggattctactaacgatagttctcccaaagtagaagacgatacacgaacccccaattctccacagctgagaagaagaatcgtgtacgtgcaatactattcacatgcttctcaacttgtaaatattgccttcatttcttagctgctttcttgattgaggtaggcctgcaagttccaaagagcaaagctatgacgctgatccctcaaaaccaataaaactagacaccgcagctcaagcgcaagttaacaagcagaggtatatgcactttccttaatgaaacaaaattatcgtgaagagtgtatgcttttgaattcgagttgaaaatgccacttcatgtcacattggtgatcatttgatgacagaaagcttcaagaggatctaaccgatgaaatggtggtacttgcgagacaacttaaggagagaagtcaaatgataagccaatctgtgcaaaatacagaaaaggtgagatgctaacctttttccttacaaaacccattatacttactattatgaattatcatcaacaatgggataagagaagaatctatatcggttcatatattgtttctactggcttcattgttcttaacattttctgtgttttttttttgttgttgatggtacattaacagatacttgattctaccgaggaagccattgagcaaagcttagcaagcacaggacacgcaaccgtaagagccacaaagatttattcagaaagctcaaagacgagttgcttccagtggctcttgatcctcgccatgacatgtgtgttcatcatggttgtcatgttgatccgagtcacatagaaaatggttcctagtgtaaaccaaattagcgacatgtaaagattatttcagtctctatatcatacaatttgttaagccacaatatctaatatctatagctcgtatcaccactcaccagacccttggacgttaactttaaagaaagaaaaaagaaaacttgaccatttgactttggttcatacaacgagtcaacttttgggttccgggtcaaataaacccacccaattcaattaggatactaattaagcaagttaagattccgacacaagtgattctcaccgatcgatgtttcgtacggagaaaacggttttctgatcagagatcacgtcgattcaaatcggtgagcatctgaaaactttgattcaatctcgtccaggatcctagggtttcaaaaccctaggtctctctcccgatttgtggttttgcagctaaattacgctatgatctgtggggggtagttgttgttgataggattcaagttttcagatttcgaaatgagagctgtgaattttatgtatagctcgaataatcccaaatttcgagggattttcaatgggctttgcgctataatcctattcatcttcttctttgatcagagcgatatttacaggaaccctttgttgaagaatctttctttcgttgattctagtggtaaattcaatcgtgggtttagccagtttactgtacctcgtcgacatttgagtgaagttgacactaatggctcttctggtaatagcagcttgagtggtgatagtactgtatcctgctctgggttacatgaacatagaggttatgctgatcaatgcgaattcttgaaatcgaatccaatttgttctccagatggcttctttgattacctcaagttcttttactgctcctgcagagattttaagatcttgggttatatactgttaggtgtttggcttgttgctttgttttatctgttgggtaatactgctgctgattacttttgttgttcgttggagaagctttctaagcttttgaggttgcctccaactgttgctggtgttactttgcttccacttggtaacggagctcctgatgtgtttgcgagtatagctgcttttgttggttcagataaaggggaagtgggtctcaacagcgtcttgggtggtgcagtgtttgtgacttgtgttgttgttgggattgtttcactttgtgttgcggataaagaagttaagattgataagaaatgtttcatcagagacttgagtttcttccttttcacattggtggctttgatggtgattttgatggttggtaaggtgactgtgggtattgccattgcgtttgtctcgatctatgtgttttatgcttctctcgtggctgcgaatgagattttgaggaaacattccaggaggttgaagctggattctattacgcctttgctcccaatgcaaggaagtgtgttctcctccccaagtgttgaagaggatattcctatgtacagcccgttgatggagcttgacaccggtgaaggtccacctcggctacatgattctctaccacagtggatgtgggctacaaatgtagccatctattcaaaccatttcgcaaaagccaatgttcatgatgaagaaagacctccatgggggtggaccgaagatggtgcagaagtcgagagctcgttatgttctaaaatcacatctttgctggaaactccactgactgttcctagacggttgacaatcccattgattgaggaagatagctggtcaaagacgtatgcggtggctagtgtctcgctggcgcctgtcctactttcctttctttggagcagccaagatgatacgagtcttcaagctcgcattgtagcctattttatcggaattgcgattggatctactcttggatatctcgcgttcaaaaacacagagcccgaccgtccacctcaaatatatttaatcccttgggtacttggtggattcatcatgagcatcgtatggttctacatgattgcaaacgaacttgttgcacttttggttacatttggtggaatctatggaatcaacccgtcaatactcggtctaaccgtacttgcttggggaaactcaatgggtgacttagtgtcaaacatcgcattgtcaatgaacggtggagatggggtacaaatcgcgttgtctggttgctacgcaggtccaatgtttaacacgcttgttgggttaggtatgtcgatgtttcttggtgcttggtcgaaaagtccagagacttacatgatcccggaggacaatagcttgttctacactctagggtttctaatattcggattgatttggtctcttgtgatgctcccacgcaacgaaatgcgaccgaacaaagtgatgggcattggtcttattacactgtatctgatattcgtcactttcaggcttagctccgccatgggattcataccttgggcttcttgaaacgccattgttgccagcttattgtatacatcatgttgttagagatatagcccactggttctgaagtaaatgttgtttgtattattatgctgatgtaactgaatgaatctgagccattggatctagatagttgtggtagatctcgatcgtagattgggacaaatggattatgtattcgaaaatggggactaatgggccttagtataaatgggccacggcttaactcaatagtgttgccccacttgtttcgttagcttccacttgtagttgtacatcgtcgtcacgtggtagtgcgatattcgtatcggaaaaattaattgtttatctgattttcaattttcatgttacgtaacaaagaaacatacgttgttattaaaatagtttataccgattactattgcttagctaataattagatttaactaatcgacaagagagaataacaagaagttaacgacaagaaaaaagaaaaaagaaaggacaagaaggcaaataaatcattttcttggtgaatggtttccaaattatattataaacagtatatagcataagttatcatgtaccaaatgattctctcgcattaaagtgaatagagaacaaaatgggtccaaagagcaatgtaagtatgtgccgtcgtggagaccaaggcgtaaggttaggcatgtcgtagagacttatctactacatatacacatttatatatttctctcttgcgcatgaagtaaatgtattgtgtcataccttatgtcacttgaccaccctcttattataagtactatataatatttatgaattttgaattgataccatatagtgtatcacaatctcgtaacattatataggtactatataatagtgtttgaatatgctcaactcgggacaagacatctaagaacatgttatatcttattgctctgttctcgcaaaaagacaactctgacactcatatgggttgtgtttaattacttttgggtttatatatatgccattttgttgtttttactggccagtttaactttaatattcataacaattagattatatgtgaaatatatcaccagatctaaaaacattaatttatgatcgataaaccaaagcatttttttcctttttgtgagaaaatgttaaaacataatcttatggtttctgaaataatagagaattgtttgtttatagaaacaaaacatagagttcagtatatgtaatattattttgatatttacaaaatcaatgtttagaataccgaatttaaaactacatatagcgggattgctattgttgatctttcgatttaatgtcgtactagatttaaacccgcggtataccgcggggacaatttattttcttaaagttagtatatataaaagtttacaaattgtatctatcaataaaaaattttcattttatagtttacaattgttattaactaacgtcctgccaaacccgtcccgtaaaaaaacctatttattttattaatgttgatcttatttatgatatgtttataaaccattgtctaaataatttgtaattttgtagtaattaattgctatcaaatatctctacggtttgctgcttataatcgaattgttatagtcataaaaaaaagcaatatcaaaaatgataattttgtagtatttaaatgatattaaatattttggaagttttattttagtaactaatcgtatagttaatgcagagagattttgggaaggtagttaaatgcaaacatttaattcaaatatttactttttaattatcaaaaacatttattaaatgtcagtgacagccactgtaaataagtcccaacttgaggatttatttcacaaagtggctgcaaaaatgtatatgtagattcgaactttttttctttaaccacacattagttaaaaaataactttctaactattttaaaatttatatttagcatattttttttaaaaaatgagtcgaattaaacacacactatagttttatatgcaattgataatgatatattaccctatagaaaacgtatccgttatattatattgtactcaagttatgtggaccacaatataatatatatcgaattaataaacattaagttgaagacaagctcagcgacctatcttcagtcaatcattgaaatttcttatcatcaaagaattgtagtaaagcatatacaaaaataagaagacatgtgtatgttattaagtgtttaaaaattacagaaattgttttatgattcaaaaagggaagacatgaaaacaagttcatgctctctgcatgagacctctaaactaaatcgtctttcttttgcaatattattggaaacaaaacaaaacataaatgtgctgcccatttctaatcaaattgatatacctctcaatttctccctatcttttttgttcttttcaaagtataatttaacaaattttgtatttgttatagaatccacaaagagtaaatttaatatagaatccgaaagaacacatatacatatatgagattgatatgtggtccagtatagttttatgacaaaaatgtcgtgacatataggccatatcccttaaatcaaaattgcatatactaaaaagaaaaaaaacccaggcatcgtggtctggtggtaaaggaacctcgactgaggcgcccgccacccgggttcgattcctgaccaccagggaattaacatgcggatttgctttggcgcctcagaccaccagttccaggggacccttaagtagaggctcaaaaatccctggtcgcgggcttcggcccagtggatagtcagatcactgtgtggtcaggacactaaattataaataaaaaaaaaacaattttttttttttgcatataatactatcttacgaaagatgtcacatgtcacatgaaaggtcactgaccccaaactaaaatgtatatacacaattttatatacgtgtatgtgtgtctgtatatattagtttctcaatgtggcctctctaaaacataacaaactctctttctctttctctctcttttttcttgtcaaaaaattactatccaaatggatcaacgcatcgccgcaatccccgtgttccggtggtctaggagccgtcgaaagattcatatccgtcgccgtaagtcgcaggtggtacgtcttggtgggaagaacagtgcggtgtcacgtggcggattctcgttaaagaagatggtaaggaggatgaagctgagatggttgaagctacactacgtgagagttgtgaagaagataaaagtgttttatcgtaatttggttaaagagttcgtagacgcaggagctgagcttgaagcgattcagcagcgaatggcggttgaagcggctgcgtttgcggttcccggtttaggtctctctttctcttctttttcagtccatgaccgagcacggtattttcttgtatagccaaaattatattctttgtaactttgtattatttttcctgttgtatcttatataactattttattgtaatttgttaaattttagaatcatccctggttgtgtcaaaaaaaaaaaaaaagaatcatccctggaaaatgaaactgttatcagtatatggttatatagtttattaaatacgatttgttaaatttatacatattaacaaaataatatttcataaactgtaaatgacatgtaagcaaaaaaaatagttctaatattatggtagaaaatctgcaattcaaataatcattctccatctattaattacaaattatttacgactcactctggtgaaataaaattgctttactttgttataagtttataaagttttctttttcttttacttttgagggatgaagattaactaaatttcgttattgtaaccaacaagacaaattttattctctacaataaatgataaatattatatatcatacatgcacatcagtcatcaaacgaacaagttaacaccaatagtgagagattcataattaaactatggtcctgaacggatgctgattttcaattcagtttttggatttagattttagtttatagattttagattttagttttagttttttgatattatagttttgtttcaaaaaccccaaaaattggtttttggtttttgagaaaaataatgttgattgagtaaaaactagatttcttaaattttaggaaaactaaaaaactaaaatcatgaatgaaaaactccaacaaaattatttttttaaattgtagggaaaccaaaattttaaaatcttgattggtatgaaaataagtttttgaaaaacaaaaaccaaaaactcttaaaaaatctacaaaacattcaaggccgttgataactgtatataaaatactagtttgataaagataagagaacatataagtaaagaaatgaatttttttttttacacgacgttgtcctcttttacagtatcaaattacaaacatttgaatgaatgtattgtctgggcttggtaacgtgattgatcatggaatgagatgaactagaatcttgtattgtaagtgattgagttaaggtggcattagttgctagaaatgcaatcatcagacgatgaattattaaataaattatcatttgatattcagatctcatattgatacatgtaccgtgttcttacatgacaaactcgtcgtttccccataaaattcgaatattttaacacttatctggactttcgacgattgctttagattcgagaatctcaatgcttgtatattactagtaccaacttgaattattctcagttttccacacatttgaattattgtataaccatatagtattaagttattatcacagttacaatttaaaaagtcattatgtaaacatctgctagaaatccatgaaatattatatacttcctctatagcataaaattgtacggtcggatataacaatatattccaattgggaacgacatcaagaacctaccatgaattcgagttaaaatagtagatttggcactgaaatgttttatgttttacattgcagtcatacttcaaagatttagtggttcttgttctcatcatgtccgagagcatacctatctaaattttggttattacttctcggttcgatccatttggttttccccacaaggtccaacccacgagcctagtgttgtctttagtgacacataacaatcctcgcagtaaaatatgctattgatatcacgacttgtaaaatatgatagatatcaagcctctattagtagatggatcaaatcatacatcataagttcataacctacgaaaacaacactacattcaagccagatcaataactaatagcccaatgcagtaaaaatgggcctaaaagcttgctcgttttgcgtttatttttgggtgagagaaaagcccataggatcacgaccggtccacagaaacaacaataaatcaagccagaccaataaaaactacggtttgacattgttcccgttacagactaaaccgaaaataaacacgttgtgacgaatggtacgttagttattacgtggttgcgtggaaaagaagaagttccacgtggtgactaaagtttgcacgttgcctcttgacacttttgcttctaacgtaaccatttctaaattttgttttggattcaattaatttccacgatattgaacgtttatattcagaaactcatgtatacatgactttttcagtttccgaccaacaatttaggtctcatttgaattgatttggacatgaaaattgttagaaaagttattaaattgatgtattatttaccaaacttttgttgcattctatcgaaagtcaattacaaaaacaggtgttgatattattgacttaagatcgtttagaagtaagaacagtatattgtcgtgattagtttgacgggtatgatcgaatcgcaagactcaaacaggaccgtcgattttatagggtaaacgattcccacaagtcacggaggctgagagccttgagcgtaggtgctgacctggcacacaaatgtaaaacttggccaccaattaagacacgtgtcttgttaagctccgtccccttaggccacgtggcaactgtttttctttggcagtgatggttcttctttgagagttcgtcggtgtccttatcggaaatgtaagaattcgtaaagaaataaaagttggcaattactataacttaggctgaaatgtctgtattgtccttaagcaataccatcaaaatttaataattttgttaactaacaaaattattgagaacattaaagtgaaaaaaccattcgacatattccaattttttcacattctttgttaaatttctgattttctccttctctatgactgttacacaattgatcaacggacgtaagggtttggagtatattgtacatttttttttcttaaacgagaggagaaaaaaaaaagaagggattcctcatccgcaaatagattcattgaatcaaaaaaaatcccaaccagacaaaaaacattagaatcatgcagtggatcccacttccgaccatttgctgatttttccgtaaatacattctagatatttttttaaaagaaaacgcaatttagattttaaattctagattttaaattctagagaagtaattcgcgcaaaaactgtaatcaaagtttaaattcgaaaattttgattagtttacgttgatcgaacaaactacaaagtaccaaaaaacagttatttatagtttcataatcacaaatggataacgacattagtaacaacattaataacatcatcttagtttaagtcagtagtaatctatggttaaacaaaaagggtaattaagtaatttgcattgctcagttcgcttccattgctggatttaacgggcgaataagaacaccaccaaggatagattggtttatttctagtttcttcggatctataaagtagaagaagaagaagaaaaattctcaatttctctctcacaatctcttcgttttctgtgattttatttagattttcccatttcaatctcttgttagaaattgtatatatacctagatcgattggttcgtagatctgtttgtttttctagggaaagttctttgattctccagaaaattggacgaagctttggattcaaattccagaattaaaaaaaaacagaaaaaaaattctttaggttttcattttgaattcttaccagagagtttcaatggtggtagcaacgaccatagcgctttacgcgagtccagcgagcactgtatgttccacagctcaccaaatcaacgctcatatctcatgtgacctcgatctgaactctagatcttcatcggcgtcttcttccacgagttcgccgactatcggaggtctctctttgcttttctccggcgcttccgtcaaatcatcttcctcttcttcctcatcgcatccatccgtaggagaggaattagcttcaatacgccatgatcgtagcgaggatcggaccttaagcggatccttctgttattctccgagcaaattcattggttcttcatacctaaaacgagatcatcaaagccctgtctcggtgcttcacggtccaatttcatctggtaacagtcctccgatgaggatttcacgcgatcggaacttagatggtggatctgctcttcgtgtaggatctagcagattgttcaatggtttcgtcaggaaagcgataggttcatgtgttgattacgatacagactctgttcttgtcgatgagcagctaccgtttaccatggacgatggtttcgaaggagaaagaagacaaccatatgctagggatttgcttagacgtgctcaattgaaacacaaaatcttcgaagatgaatctgtgatcaaagcattttacgaagctgagaaagctcataggggacaggtgtgtggaagaagaagtaaatctcaaaaacttgtcaataattttggttttgattttgctaattgatgtgtttgaatcagatgagagcaactggtgatccatacctgcaacattgtgtggagactgcaatgttgttggctgacattggagctaattcgactgttgttgtagctggaattttacatgatactttagacgattcgtttatgagctatgattatattctcagaacttttggatcaggagttgctgatcttgtggaaggggtaagtaaagaagtagcaatgaatgtgtttcagctaaagacttgaggatttaactgaattctgtcttctaaattgcattaggtctctaagctgagccagttaagtaaacttgctcgggagaacaataccgcttgtaaaaccgtagaagcagatcgtttgcacactatgtttcttgcaatggcagacgccagagctgttcttataaagttagctgatcggttacacaacatgatgactctatatgctttgccaccagtgaagcggcaaaggtttgccaaagaaactctagagatatttgcgcctttggctaatcgtttgggaatttctagctggaaagttaagcttgaaaatctgtgttttaagcatctccatcctgatcagcaccatgagatgtccgatatgcttgaggattcattcgatgaagctatgattacttctgcgattgagaaattggagcaagcgcttaagaaagaaggcatctcttaccatgttgtctctggacggcacaagagtttgtatagtatctactgcaagatgttgaagtaagttctcatttcctctctattcgaaactgcttgttggttttctggtttcactaagataaaggagagaaccgggaatactgacacttcattttatgccaggaaaaagctaaccatggatgaaattcatgatattcatggcttacgtttgattgttgacaatgagaaagattgttacaaggccttgggagtagttcacaagctatggtctgaagttcctggaaagctgaaagattacatttctcatcccaagttcaacgggtgggttctgcaaaccgattgtagcttaagatgatgcaggcttctgctttctctaattatctaactttgggctttgtgaattttaggtaccaatctttgcatactgtagtgatgggtgatggaactattccgctggaagttcaaatacggacaaaggagatgcatttgcaagctgaatttgggtttgcagctcactggagatacaaggaaggtgactgcaaacactcatcgtttgtgcttcaaatggttgaatgggcaagatgggttgtgacctggcattttgaaaccatgagcaaagacggatcgtcgatctgctcttctgagcccttgtgcagtttcccgtctcacgcagaagactgtccgttttcatataagcctagtggtaaccaagaaggaccagtctatgtgattgtaatcgaaaatgagaaggttagttattatatatctccttcaaattctgctcctttgaggatgtttctttgcttggagttataatttgataaacccgaaaatgcagatgactgtgcaagagtttcccgagaattctaccgtgtcggacctgttacgcagagcaggaccagggagctcgagatggtcaatgtacagcatcccggcaaaggaagagctaaggccaagacttaaccagacacctgtaagtgatctgaaatgcaagctgaagatgggagatgtggtggagctgactccagccatacctgacaagtctctgactgaatacagagaggaaattcagcggatgtatgatcgagggcttgcgttttcacggcctcaccgtgcagctactggtaccatggttggctggggaagctaactgattctcttaattacctttgttcatgtatatatactatagttgcatatatagtataatgcttcagaagatttgttgtacttcggtattgttgattcccacacaacagtgtatataagatatgcctatatgttctaaaaaactgactctggtcattaatatttgattctcttacattctaaatcttcaaaccacacatctggatctggtccataaaaactggctctggtcattaatttttgattgtgttacatttctacttgttgatacataaatattatagattttttggtctatctacttatttgggtacttatttgggtcgtctagagagtgggaaagagaccctttgaggagtttggcttggaaggtctgaggtttgttgttgctgctgttgttgttcttgagaggactgtccaggatctgtcatttcttcatcgtcctcggtttcttcaggttctgttgaaaccgacttcttcggtatcacgagctgataatttgggctcagcaatgtgtcctgttcaggtgggagtggaacaccgggtcctgctatcgattttggcagaggtatcttgttcctacttgcagcaagctcaagcagaacctaaatcaaacatcaaaaacagaaacttcaagattcaggaaccaaaaggcatggatgtgacagacaaaaacttgaggttctcagtgatacaatttatgaggcaagagggtcacacacagttcataagtcataagtaagagtgataattccctaatgattcacatataccaaatgaccgatcatatcgcatctcttctcagacaatgaagaagaagaaacatggaatcgtcaacaatgcatacctctcttggaggaggctgtgagaagctgaaattaactttggattgaatagcgagcttcacatcatcacagtcaatgttgggtttgctagcatgctctgagtaaacctgagcatctgtcaacacttcgaccacataccggtaccataactccagaaactgatgtatcacacgaggctcgtagtcttctacacccatcgacttaagcagagatttcacaatcttagcatctctaggtacatcttcttcaccttctcctgccatgtttatccctaaacaactaaaaaaaaagtaaagctacagagtcaaattaagaacctttcttatacagaattgatgttgcaacaacacaagtttcaatcgaatctcacaagcaaacatcgtgtaacagcaacacattacataaatcgaataaataagaattagagcttcacgaatcggagataagaaagacaaaggagattctaacctagcttcatcaataagttccaaaacacaagattatatgccataaagaggcgataaatacctaatgcgagagagaaagtttggtggagagctagtggcagaaacacgacggagagattgatgaacggcggcgaggaatcgggaaatactaatctctgccactctagatctgatatttatggttttggtttgtaaatctgctgtaacgttgagggtgtaaatgtaatttaactaaaacgctatttattactagtattttgtatttcactcgtgcataggcccattaaagacccaaattagaacgacggtcgaatgtataatattaaataccgataatagcctcatttctcttccgtttacttgtccgtgtgaccgtgtctacgacgttgaaatcgaaattaccacaatgtcctcgccggagcgtgctctcttgaatctattgacggacatcgctctctccttcgacggcgcaatcctcggactgactttagctgttagcgccgtcggttctgctctcaagtatgcttctaccaacgccgcgttgaagaagatcaaagatgcacccgaagtctccatttccgacctccgatcactgcttccggcttctgaagacaaatcagagactaacgataacaggaagagcaatgatcagcgaatcgttgtggttcgcggagtcgtcaaaccgaaaatttccggtgatgagggttacaagaacaacaacgtgttaatctctccggagactggagataaagctcttatcattcagagaacgcaaactgtacgttgctctaaaccctaagtgtttatgtttccctcaaattgcaattgacattgacctaattttgctttgtgttcttatcaaaggcttaggttaaagagtttggatgatttcttcatgattaggtgttcattgtgattgattaagttaggattatgtaagttggtactggtgtgatctcagaagggaaatgtatgtttctaatgtcatcattttgttgttgacagtatgtgtatagtggatggaagagattgtttcagtccactggtcaccggtttatgttggagagatcattgcgcaaacacggtgctgattttacgagaacggtaaagtctctctatcagcttcagagctttcaactttggctctgtatccatgatcaaacttgttttgtgtatcctttgctttgtgcaggtcccatttgtcattgttggaaaggatcagcaatcgaactctagttttgtcgctgttaacatggatggctcaaggcaacctcttccgcttaccactgtgtataatcgcttgcagcctattaattcttcgtttcttcaagcctttttgtaccccgattatcctgtgagtatatatatattcaaagaaatttctggttttgaggaactgatggttacttgttcttggctaactttgtaatcctttctcttccaaggttggtctgcttgatatagagaagattttaccacctgggaaagatataacagctgttggcatctacagttttaataatggagttcctgaaatcaaatcgtgccaagatcttccttatttcttgtgagattttatctgaatatttttcgttcttatatatctgcctgcgttctagctcaaattattacttcatcttcttctttatgttttctcaatctgttgatcatttgacaagatttagtccattgttgcagaaaggctctatttgctgttcatatataaatctttatgaataatctttgcagatcagagatgaccaaggacaagatgattgaggaccttatggaacagaccaactttatattcttgggcagcgttatcttgggcattgtgtctgttggcatccttagctatgctgctgtcaggtactggagttgtgagagatcagatttggttttagatttgggcaatgtttcgatttgaaatctgtttaactgtcttatcttcaggacctggaataaatggaaacaatggaaccatcagagagaactgccacagagaccgaacgattctgtggtcgatgatgaacccgaagatgcagatgaaatcccagatggagaattgtgtgtgatctgcgtgtcaagaaggagagtacctgcgtttattccctgtggacatgtagtatgttgcaggcgatgtgcttcaaccgtggaacgagagttaaaccctaagtgtccagtttgtcttcagagcattaggggatctatgcgtgtatattactcttagtgaccctgaatcttctctcattgtatgtaatagggtaatgcaatttgtactctcagagaatcggaagttaacaaaatagtttgacaatgatttgaaagttcgtcaagtcactcaatatagagtgagagattgtagaggatatgaaagcaaagtttttaaaaggaagaaattttgtaaccgataacataagtagccaaggatgacttcccgtcatgtatcatcaccagtctccggagtttagcctgagttctctcggagcaaggtcttctcatgtgcctcaagtccctgacatgagagctgaggcatggtgtgttgacggataacctgagaatctgaactgcgggttttggaacatgttgatacagtttgaattggagctcggtgagatcgaactagacccgattccgcttccaccaccgtgagggctcatagagaaattttgtccatttgccatttgagaagaacacagtgagtttgatgattcttgaagcttctttgtattgaggaaacgtccaccggagcctctagctctctttaaagcatgaagatggcgagactcatgaaggtacggctacagaaaaagaaaacaaaactttattacatcaaatcatcaagatcttctgagttagttttccctctttctctttggtgttttaggcaaaatggaaagtgaaaacagtcatactttacggcatttgatgagtttgttctgagcttcgagtttagcacggtgcttcctgcgacggagaatcgcatgatactgtttcgcattgacaaatattggttcattctcttgaatgtgatgaggcaatggcactcttgaagaaaccaaacccatcatctctaaatgtggcagcgcctgcaaaaagatttcccaatcaaccaatcaatgcgccagatcgattcagaatagtaaaagcacaaaaggcttcacagcatattaccgttggtgttgatgcatattcaggagccaagaaaccattgaaatgtgacgtttcagcacattgaagagaccaagatatttgaccagaagtaggagcaggaaacacagagtcttgagacaccatcgacgaggtagtaattgacttagtataattttcaataggctttcccaagttttcgatgtaacctgagagattgttattaacaatgctgcatccataacgcttatattctccaaagcttgcaacttcaccgccgcctgattcttcttcagtagattgtgatgaggttgaatcttgattttgcagctgcaaacccgaatgtttcatcgcgggtaattgtgttgtagacattatcatatccttagtcaagctgaaagattcagatccttgaatatttgaatttgttgtaggcattgagtttccccaagatgaatcttctttcctttgaaacacttgcattgtcttcaaatctttacttcaataaactaaatgtccaaaccaacaagtccagtcataaatcatatgatattattcatgatccacataatcaacaaatacaagagagaaatgataccaaaagattataaaagcaatcctaaaacacagattccaggttcaatgacacagtaagattgtttcatgatctaaagggttccaaaagattcaaactttgaacatggctagaacttacacaacatgcaaacaaaaactaaaatcgacagattaaatttctgagtttgaacagataaaaaaactcatcaaatctcattgaacttaatgatccaagaaaacagagaaaccaaccaaaagatttttttctctcataactcaaaaattattatttttaattatatcatcataagtagaaactgagcaaccaaatcataacatcactaccaaataaattaagcgaacaagaagagagagagagagagagagacctttggtgctttggatttggtaagaagagatggagagaaaaagaagttaagtaataagcttgagattatgatgatgatgatgatgatgaatgatgatgatgatgcatgtctccttcctcagaacatggttgtttctttctcttcactatctttctctctcttcctctgtctctgcaaattgggtattggctatggcttaaaagactaatcttgactccttttctctttttttttttttaattatggttttcttctctcaacaaatgcatatttattcacacacaatttattaaatattttaaaatattattttgtttccatttctgaatttatttgcagagtttgacatttctatttgtggtattttttcttatctttgtttatattgtttatgtttcaaaaattaagtatatcgaatcaaatcgtgtcacgtagtgcttttataattttcaaatcaggtttagttttattacaaaacaaaatagaaatatgtaggcaacaataaataatagaaaaatctagtaaaagatagatataaatttagaagtgtgacgcgtgtataatctagacaaggctagaaatatatctaaatatataaatgatagtattaaaatgttaggaaggaaaatagaagacaagaaaaaccaaagtaaaaatgtttatggtaaatatttccatttatttcaaagatgtttaacacctttatttttatgttcatatcagtgatgttttatcaatttatatgcgattctattcagcatatatattacaaggttcaaagattctaaataatatatagagggtatctgaagtatcatattccttaattgtttcataacaaaaatgtgcagaattctaaaacattgtttatatagttgaagatatgtaattatgtattatctaagcgtactttttttttctgtctttttgtttttgtttttgtttaagaaggtgtttttttaatttaaaaagcaaaagtttaagtggaaggttgtcaacatctctttatagcgcaatcaatatagtagcatttaagcgaataaattaaaaatattttatatttgtagttggggtaattgatattattgcaagtcaagcaaagcaaagcaaagcgaaagagccctttttcacatttcttgatgcagcttccccaacacaaagcagcaatgaatcgtaatttctgcactatctctctgcatttaatccacaactctgaatagtaattataaggaagacaaaaaaacactataaatacactccaaaagaaagaatatagtatatagcaacatttctatttcttggacacctatttgtagttcactacaatgacactttgtttaactagtaataattgaagtaatacgagactttgtattgtggggaagattaattgttgtttgctacacgtaccttttacttatttgctttagagaaaagaaatgcgtaactatcatgcttcgaacgagggaagttacaggtgttacttcaaatattattattatatatcaacagtatctagaagttcttagaaatcaattatttgatttacctatgtttatgtttatagacttacttaaactaatattttcaaacacgacaaagttaatattttcgaatctcccctaacctcgatccttaacacaccgcaataagatttatatgcattttaggacaagacaagactaaacccattattaatctaatagttccaaattttaaacattacgctttcaaatccaatcatagacgcactccactttttccctaccatgtcttaacacgtatatgtaagattgaactacaatcgttgattttccttttcacaaatgaaaaagttttttttcctacctaactgtttttatataaataaaacaaactccacacagaatatgtcatacaactaaaagatttaacgttaaagtttgaatagggagacacaacagaagtgaataaagaaatgagatcagcacgaatctaatgtaaaatctagtctaatacctaaacaaactaaatcaccatcacatcaattgtgttcattttagaataaaaatgaaaagattcggtgctttggaaataaataaaaataaagtacattaaatgaaaccaattccatcagctcgagaccttctcttgtgccaccaccattcatggttttggccaaaagctaataagagtctcttcctttgtatggcatctcctgcaataaaatcaaagatgtcagcaaaatctaactctgttgatcattttttttttgtaactagacaaaacaagaattttgaagtaaagtagtaaaccggttggtatggcgttggcggcatgaacaagattggtctctgctgagtaaccatcatcggttgtgggtactgttttaacattgattccaaaattcagtcttacaatagagagaaggtaaagagttttcaagagtaatgactattaatagcaataaacaaacctgtggactatttggagaataatatgtttgattcggactaagctgtgttgtattgttatacatcattgggtgttgttgcccagggaatgctgctcccgtctgtcaattttcaacttagtgaatcagaaacataataacagagacttaaagagtaatttaggcgttgatcactagataaagaataaagaaaagttactccgtatcgaatatgtagtcctggcatgggtggaacaggaggataatagaatgatccgtcaaagactggagattgaggagattgaggacgtgttgctgatggagatggtttgaaactctttgcgttagggttcagtttaaattcctggtcggacctaatttcgttagtaaaaagcttatagtattaaggagatattagatgataacctaagcactaagaaaaaaaccttagcatttgggttgagtgtggatttttctgatgataaagaacccgaagagcttggtgacagtattggaagatttgatgctgaggaagctgcagagttttctgaatttctagaaatggagcttccaggccacccagaagagttctcagactttgctctgtcagagagtagaccgagtcttccatcaatgaaacttggcttcacaggtggtggtgcatcttcattgaggtggcaattaaaaacttagtaggaaattcaattggtatcaacatataagatgaaacgggagtagatagattcgataagctgaagttgcacataccttcaaaaccagacactgattcctcagatggctgcgttaatacagattgaagccaacagaacagtgttatatgtaatgttccattaagcaaatgccaaatcaacacaaggtgcgtcgtttaactttatacctttttaaaaagggaagcccctaggaatttgctctttctttgctcaccaagctggctctcattcctatcagaatgagtttcagaaactagttcaatgaaagatattttgtatgttcaaagggaaaaagacctgatgttgtttcctgcaacaggaaaatctttggatggcagttcggacataagctggcgagtatgcttatttgagttcgaccagctctgatctaccattttgttactccgtaaatgcaggctgtcaccctgaaggacaaaaaatggcaatatcacctatgattctcctagaaactactaggagtgaagaactcaaccatacccatgaatcttcatagaatttgccagttgaagcaggttccttgccatcagaagcagaagaatcaccaaaagtcaaattgttgcagcaatccaataatatatcttcttcttcttcttcatcgtcttcataacacgtatcatcaaatctattagtcgcacagaccgatgagtatttggtttcctcatcaatatcaaactttccactaagctggagccctctttcctgtgtaagatgattgcacgcatgaccattagaggtgaaatatggtacaacaataaaacgtaaaaattcagtgtcacataagacatccataattcacctctgctacgtgaatatctcgggtattctcacccacaatctctctcgcaatccttaaggcttgctcttctagctccctcgttccaggacctctctcaagttttgtggtatacagttcctcatcaaaagtgcttgttactccaaataatgtcttattgacctcaaactgattccagcccctacgatatcatcacacacatataagatgtcatgagaagtgtcgttaacccaggaagtgtacatgatgaaagaataagaaaagagaacagggttaactaactgcggacagaggtctcacactaacccgcatgtaattttcaatatatgtaaaaagcttttttatattcaatttactaagtaaaatgatatttattttgaaaattacatgtattatatactatatttctatttgattctgtataaaaattaaacttaaagtaaagaaaaatgaaaattttataaacgacaggcctactcgcaaaacccaccaaaaccccatattggtccaaccaactgcaaggcggtgtagcccgcttacacaacctaaccaaccaatgggaggaattgaactgggataaataaatctatggctacttgttagagttaagaatcaagaacatgaataaaatacaaaactctttttattaaaaaaagaatcatagtaccaagaatagaaatcgagaaaacgatgttgtctccctcagcctaacccgatacaacctccaaagcactttctaacttagttcacaaaagtaaacacagaggaaaatgaaatagagaaaacagtttctatatcagaaaacagaaatcctaacaaaaaggtaaatatcctactttaatgaatagcatcattacctcttccaaggatcatcaaacacattctccagatctgaacagtctggaacatcttcatcaggtacccaaggtttcagctctctttccaaatcaacattataaaactgtgatatcagagagtctgtcaacagctctaaaggtttctcgcactgaacagaatctgagacgctatcgctggatagaggaaggtcctaacaaatagaccaatgacgaaagaataataatgtcaaaacaccaagtagtcttatgttgttgcattcatgtgaacataaaacccaatcccatctgcaagaaaggagtacataccttagctataacttgcacaagttcgtcagcagggattttgagtagctttgaagatggcttgctgacagtacgggatttggttcctcgtgaatccctaatcaagcatgccattttcaaaatgattcctgaaagtttcatagcagtttgtaagggataaaaaaaatgtgacctcttcttatattatataccatctcaaaggaacaaacaggttctcattcagagccttaccaaaatccttctccacattagcagcatgaaatatgccgctgtaaacagatccatttttgagatgaacttctacctgatgtccaatattacaagttgtgaaatacactaacagcttctgagaaggggtatccacactttcagcgtcccaaccgttttctgcacatatgtatcaacaaacaagagaacgcagaacatgatgttggtgctacatcagagtaaaggtatatatgtatatgtctcgaaatatatatacaaaacctgtattgtcaacagaaggctgtgcgttattcatccatgcctccttttcaaatctcctgtgtgaaaatccattggatgaagaacccgagtgaagaacaggcttcatagttgctttaacctgaagaaaacgaaaatatcaataaacgggttattcaataagatgataaagataaccgtctcacggtacgatgagcctaatatgcaaactggccctccaattcgcattcttgctggcatcaaaacttcttttagatttcttaatgcgatgtaaaagttatattttttagatagaatgtcacagtcaattccatattactaggggttcgtcaactaaaccctatacagagaagtaacctgaatgttctgcacattccgagggaaaaaagtatgctatgaattatcaatgaactatagaactgaaaccataaagtaactctgattatgagccatgggaagaacaaccaaaaactgccaataagatgtatattgctagccattttccagcacaataggcatacaacaaaacgtaaaattagaagattggtgttctatccactaaccaaggatttgaatcccataactattttgcaatgaaatatgttacattgaacgtgattcaatgttacgaaagacacaaacttgcgcaggcttcatacatcaaatcaaataacaaatcataatcacagctctaaagaacaaataacatgacaaaccacaaaaattcaaatttaccaaataataataaacaagacaactttttgcaatccaaagaataaaattttcaatacaaaacgaatttggcctagacagagtacccaaatgaaaccctaaatcaaccaactgaatcaccaacttctcaaaatttgaatcaaattaataatatttacctcaataaaatcagaatcagaagatagatatctgggaagataatatttacctcaacaaagctggaatcaacagctttaaaaatccaatgctacgaggaaacgagtattggtaatttccgtcgcggcgaattagggttttccgacagagttaggggtttaccggcgaattgaggagagaatcgcggtaaacgggtcaacaataaatctctagagttgagattttgatttgatttttttttcgttgttgcaaacttttcaatgaattgagggaatttaaggacagatcgttgtgttgtgtatttacgagggtgtgatcacctacggatgagcgtatcattaagtttttgggccttttgttttgatccgttttaacttgtttgggcttaacacctttgttgatatatttatctcaataactacttcttcacaagagattatatctcacacgtttatatctcaaacattattagattatatctgaagaagtagttattcaaaagttaattagctatatttatctcaataactacttcttcagatatagtatatccaaagagattatatctcaaacattattagaattatctcaaattatttgtcaattgagatatatccaaagagattatatctcaaacattgtcaattgaattttatagttattaacttcttacaagtctataatacaagtagagaaagttaagtactaagttttcatattaaacaaaaaaaaaactctagattagggtttaaaaaacaacacggaaccgacccaaaaaattggattcgaaaccaaacctgaaaatttagatctatcttattgggtcctaaacttcttctacccaaaaattcgagctcaactagaacccgaaaataactaaattttatctaaattttatccaaagatcagggaaatctgggtatttatccaaaaaattcaggtatcagttctaaaaaatgtctaaaaatttatacctacacttacccgatcgggttttaccaaaaactgactcgcgtacccaaatgcccacccctacaagattaactttttgagagggcatgatatgcattgcttgatgatgtggaaggtgtacttaaactcataattaatcaaaaggcttaaactttcaaggaagagagaaaaaggtggggagcaagtctataaaatttgtattatagtaatcaaagcttttagaaattaaaatgctaaggcttagttgcacgctctattagtatagttcttcgtttagactttagactttagagcaatcatttcaccactttgatcacatattcttacttgttaccataaagttaagcatagagattagagatgactaatgtgtttggcgttactgtatataataatcagacttgtgaagaaattattttcccaaaagtagaaaacgaaagtgacaagtggcacagaggatcaataagaaacacagtagaccacactcttaaagctttttgcagtgtccaacgaactcaaaagcccaacaaatctcaaagcctttttattacttttttcccaaatccgcagattcttcttcttcagctttgtatttcttctcctacagagagagacagcgagagaaagatcgattctgtctttatacagacattatctcccactcattctctgtgtcgcttgaagcagcaagagagagagagagactgacagagacagagttaaatgcgaatttatgggtttgatctatacagatctgtgtaccctaatttatgtctctggcgtaacggtcatatttaaccccatttcaatttgagctcttcatcgctgcgtttctgtgatctcggagctcttccaagtgtacgtcttttttgcctctttgtatctgcacagtgcaagaattgtgatttttgggtattaaagtatcttcatttctagatttgatcttctgggttttgcttgaaatgtgatttgggtttctggtttgatctcatagggttcgagtagtgtcaaaagagaaggtgagagatgctgacgtgtatagcttgcacgaagcagcttaacaccaacaatggcggatctactcgagaagaagatgaagaacacggagttattggtacccctaggactaagcaagcgattaaatcactgacgtcacaggtagattaatctttctgctgagtcactttcatggattgttttggttgcaagtgaaaatggcgggaccattctagtttcgttgttggtttctgtttgggagctaagaacaaaaaaaaacatgttaaagcatgactcatatggtttggtagagacttgactctgagtcttgaatcaatatttcttttcttggttgagtttgaataattcttcaaacatttattcctatgaattgtcagttactcttttatctgtaatttttgtcaaagcatgcgtcttttgtatgtaagtaactaattattgttcatttcagctaaaagacatggcagtaaaggcttcaggggcatacaaaaactgcaaaccgtgttctgggacaacaaaccggaatcagaatcgaaactatgctgattcggatgctgcttcagattctggaagattccattattcataccagagagctgggactgcaacctcaactcctaagatttgggggaatgaaatggagtcaaggttaaaagggatttctagtgaagaaggtacacctacgtctatgagtggtcgaacagaatccatagtgttcatggaggatgatgaggtcaaggaatgggttgctcaagtggagcctggtgttctcatcacatttgtgtcattgcctcagggagggaatgatcttaagagaattcggttcaggtaatcgtttcttgccaatattgaactgaatatatgttttgtgttttcccattgatctgcttttactgtcttgttacggcatgttaggttctgaatttggaaatagtggttctttttcttcttcttttaacactcatgagtagtacaattgttgatgatattatttgtgggactactgtactgagaa

SEQ ID NO: 91 - DNA, 143186 bp, Arabidopsis thaliana
gaattcggttcaggtaatcgtttcttgccaatattgaactgaatatatgttttgtgttttcccattgatctgcttttactgtcttgttacggcatgttaggttctgaatttggaaatagtggttctttttcttcttcttttaacactcatgagtagtacaattgttgatgatattatttgtgggactactgtactgagaacacttgtattgtttctgattcaattgaagtctagatgaccctgagctttaacaagtctttcgttggcaatggttttcatgctattgctgaaattaagaagcaccaggtttccatattaccgagaccagcttctgttgtggtgccgtcaaggatgggtattttggccccagaattggtatctctagctcttggggatttttttgtattctgcggatgctgagtttttttgtgttacacgttagacctgtttccctttgtggctaagctaaaagatgttttggtgattcgaagctagatggtaatgtttttaaattgttacttcttgtagtcgtgagatgtttaataaatggcaagctcaaaaatggtgggtggagaatttcgagaaggtcatggagttatacaacgtgcagttcaatcagcagagcgtaccgcttcaaactcctcctgtatctgaagatggggtaatgcaatttcactattgaacacacaaatctattaattgacaaccaaagcgttatgggttatatctctctttcggttattcaatggtgtgccagggctcacaaatacagtccgtgaaggacagtcctgtaactccaccgctggaaagagagcgacctcaccgcaatattccaggctcttctggttttgcttcaaccccaaagctctctagcatcagcggaaccaagactgaaacatcatctatcgatggttctgctagaagtagctcggtagatcgatccgaggaggtctcagtgagtaacgcaagtgacatggaaagtgaatgggtagaacaagatgagcctggtatctatattactatcagagctttaccagatggaaatcgcgagcttaggcgagttcgattcaggtacataactgaagaacccattctgctatattacatacttctctttctgaacactgagacgatgtttgtaatgtagccgagacaagtttggggaaacacatgcgaggttatggtgggaacaaaacagagcgcgtatacaacagcaatacttgtgacttgatgatagatttacttaagtggagcagctattagacaaagaacaacaacagaagacttttattaacaacagaagacttttcggtttcattttttagttataacttgattacttgaacaaatgctaaacaaagactttcttctcaattttattgcttcttgttagatttaattagatagatcgatattcagcaattcatttctgatttgataatttatggaataccataatgcccctgcatctctacaactccaatgttgcaacagccacaggcgccgatggcacagatttattcacaggttcatgtttcacattttcccaatggtatgccatatcgtcagttcctctctccagtctatgtcccccgaatccccatgcagtatatgctcaccctttaaatggcaatagctatgtgctgatgcctggaggcagttctcatcccagcgcaaatggactcaaatatggaatccagccattcaagcaagtctctacagggggcccaacgggttttgtggactttcaacaaccccaatgggtatatgtcatcccaatggacaggcaaccaagagatctttcaggccttcagtcttctcctcattacaacatggctggacaaacacctcacggtgctttaactctgctccagtccaatcgtctcatatgcagtttcaaggcgtcttccattcgccagagcctggtccaatggcgaatgcacaccataaggggcttggacttggtagtaacgctgggcttggggttgctccatctccttctccagttcaagtccgtgcctccttattcatcttaactggcgagcaaacttctcaacaaagtctaacttgttgagtgagagcccaaagaaaatatattgtttttcttgtgaaacggccgaactctccttatttctttattcaatgcataaatctctcagttctcccagttttctttgaatcgcttttgtatactctaaccttctaccggctattacacaactagtttaattctcttaaacaaggtaacgcgtattgccataatctagttttggtttaagtcataatcattgtgaaaagcagaaagagaaccttataaagcatgtgcttggtcgttttagtgttgtgcttcttttagaataccctgttctttttctcttttcgccatgagagggttttggggatttggggtgtgagagttactgttgtttttaagtgatgtttcatagaaaagattgtgttgtcattgttcttctttgagttctgtgtcattcttttgtgtgcttttcttcttttcttgggatccccaaaacatttctttcatactctcccggattttcataaagaaacattggttcttgagcttgacccaactttcttctgcgctaagaatatgaaccactttttaacttaacaacgtttgaaaatgagtccataagtttggttattttcttgattactaaggtttcttttgtatattatttgcacactaaatgattatgacaacatgccaacaagaatctaattgatggtgttgttgacgttaatggaaaattaagagttagtttaagaaaatggtatagaatcataatcaagtccctatttgttatctctcttttaccggtttggtgaatgatttctctatggacttctagcgtacttgccattgagtgatttggagtaactaatactcttttttgttttcatctttcccaaggttcattaatcattagttgttatcactaattcgaccttcattattactatagcttggagtcaaggatttgactacagagtatattaagattcctaagattttttgagtttataaattatatgttactcaagaatggttgagaggcctatagactagctagggttcatcagttagggggggggggggggggtttagacttagattaggtgacattatctttaaataatgaagtcttttcttaggatataatgatggaaaattaggctctacttgacccctatcttccttaatgaaactaaacttaaaatggaaaattaagtcatacacttggaatttattaaattcattctaaagtagaaagtgtcaccattggttttggaattaaagaccccttaactcttaaaatccttaattctaaactctaaacttgctgaaattttcttatgaattttcataaaatctctctcaagttgaataaaatggaatctccttttactgcatgcacaaaaactcgatatgatttgatgagaagctgtcattttcttgtaactgcagtctacacatgcgtgcaagctctgcgactcagaattttgtgtgtttccaatatactaatagacttatagaagaaatattattgacttatagaagaaatttgatgattttttttagtttattaattagtaatacatatatttatgctagttgctaaatattaatgaagttctcgttttctaagcatatttatgttactcatacacgttaagcacatatcttatgatatgatttgtatagaattaaatatcgtttcgtttgatctaagacaggaatacgaatttatataataataaagttaattaatgttgtaaaagtgaagaacagcaaaagtgtacgagaatgggtccggttaaaaaagaaggtgttatgagtgggaagtttcgtcgattcgaagggacgatcattttatataaactaatatatttgaatgaattttccaaatttgtcaaatagttagttttgtttttttaacagaataactagtaaatctaaaaaagcttatgaagaactcatccaaaagaaaaagcttatgaatttctcatttcttttatgtatgtctattttattttgaatgtgtgtgggtctaatggttgtgtcggatttagttccatggtttgagtaattgtgttgtggagatttttttaaaaaatcataacaatttttttctaaattcatgcaaaatatatactttatcaaagcttaagtcatcccaaatagttttcatttgtctctgtttctaaatttatgtcagccccattaaaaaaacactaatcttgagacttatcccacgagagtaatcatttggcaaatgagcaccatttaactttttgaacatgctttcatttacgttaattaatattcttcccattttccacttattttaatctagaaaggtatctcaaccagaaaaagaaataatactaagtaagtacaaatgtcgataaaatttgtataatattttttacaaatttataagcaaacagtacgaatacgcgtaacgcatgcaaggtgtatcattagtttcattaggtttttaaattgttatattaaagattggggtcggacatagtactaaatttacaaaagagattgcggctaaaagtagaaaaataaataaaatacatacacatttgatacaaaatatgttatttctgttagctaactgtatttaaatacttttaggtcgttaggtgtaatcacatgcgaaagactcattgaaaaaaattacttctatagcaactttatctaagttgataaaagtcttgcctatatatacacgtttgatttacatagaacttacttccttatacttgtcccaaaaataagccataattactcttaacatagactccttgagcttctccatatatcaagtacgagttaatgtggcaacttcaataattatcaatgcataagagaataccaattattttaattaacatatgaaaagggaacgataaaggtggaagaaattggggaacatagaatgattttaaagtatgatcatgtggtgaaaattaataattacttttgcggaaataaaagacaggatagagattttaacagtgaagacaatcaaagtgggatggctaaatttgttgtatttgtaaatttttctacattatcaattttgaattttgcgatcgttgataaagttttgaatactcacatgatcgagtgtgttaatctatatgttactatttgactatacacattcgaaatttatgcggtaactggattatatttccattttgtaagtaccatgtgtttttagtgtaaccatgttttttttcccatgattattattctagataatgcgtttttgtattctcttaatgtttattcataataatatttgtaagcttagcaaaaaataataaagaaaacctatgtatacaatttttctttctcgcattttttagaataaatagaaatataccatatcaatattctttttcttaataagaaccatattaatattcgagtctttttctaccgtgattttgactaacgatttagtcgttttaaaatgaaaaaaaaaaatatcaagttctttgcaaaaattgatagattagtttagattccggtttataccccgactataataaaatcagtgttcatgatcaatgtctgtttactaaacataaatgtatattacatgacaacattaatataattaataaactttttttaaaaaactaaacattgcaatagaacggtgtggcaaggtagtgggttgcaacataatttctgttcatgagaagtgtttgggtgttggtgttaggtcaaattatgtgattgagcgtcttagccgcattacttgactattcattctctaaagtctaaagtctttcttttaaccatttttgtttcacatcacagcattattttttttttgtgtgctcacttatgtaaaatctaaaagcaagtcctatatctataatagtcctagggttgtaaatatatactttattactttcttgtctctttgccctagcttttttcttcaaagtttgacaaattgcttccgttttgaatcttttgattgtatccaagacggcctacaatttgtacatattcactgcctgcaatacatataacacactagagtttctacctctttgtttaaaatgtacatcaattagtttttgaaatgtgtattgtgatcatatagattattgaactaactttaaactttcaactacaatacagttaatatcaagaaaaaaaaaagttgtagcagaaagaggttcaagaactaaatatatatttgtccagagaaatctaaaattcttaaaagtcatgccaatgggattgatgtcgttgagttttacaaatatgtatggaactactcgtaaatgttgtataatactaatgccagtatttggtaatcaacattacgtacgaatataaatttaagaaaggaaaagctgtaatggacccaagtatcaatatttgatttgctgttatgaatcaacgattatgtttatttcgtgttattaaattacacgtactttagttttgttctttgttgtttttaaaaagaatgacttgtcaagagacataaacattaccactaaaagaattatacaattttgtattaccaatcgtatttataatatttctgaagataagaaacaaccaaactttaactataactaagtagtgatagctaatgggagtgactaagttttataacaagttaattactagttatttatactagtaccaacttatcttaacttggatctaaattttgtaatttatctgtgtgagttgtatacgaaaatatatacgcatcgataaatatgaatattatagaataagaaaaatatggaaaaaaaattcacttaatttaacgttttctttgtctacatcaatttttttctatattcctaaaaattgcacttattacgttttatttttgtgctttgacttttctggaaacaaaaatgcagaaagtaaattattttcccacaaagctactacatatatattgagaaaaataaagaaattaaacttatatttctgacaaaattaaaaatagaaatgttgttgccaacaactatattattccagtctggcacccaattccacctacgcaaaaacagtaaataaaataacacgtggcaataacactattttggctgataaagactctttcactttaattcttcttcttcttgttcctcatacacacacactactactactctcatctctctcatatcaaacagaagaaacaaagcgtgcctcttctctctttcttcatcattctcatcaagctttcttcttcaccaaattcccaacactatcattcccttcttcctctataaagaatcatcacttcttcttcttctcaatggatccttgggatacttataacataccactagaccaccaacaccgtctccgtaaccgccgtgaccaccgtcatccttccttctcctctactctcctcgaccaaatttaccgctccatcgacgattcctctactaactcctcatccatgagaaaaaccaaacatcagaaccgcgaggacacgcgtgtttctgctaaccgccgcgacgatttcaacagatccaagaatcttaaaaccatagaacctgttttcttcaaacattcaagctcaagctcctctgactcaagcggattctcgtcttccgagtctgattatttctacagacgatctaaatcctcgccggcgatttctcatcctaaaccgatacgaaccaccgtggaacgattcgaaagatctcctcagaatcaccgacctaacagtagtaataaacaagaacatggaagctttctcaaaacgaaatctaaagcgttgaagatttatagcgatttgaagaaagtgaaacaaccgatttctcccggtggtcgtctcgctactttccttaactccatattcaccggcgccggaaacactaaaaaacttaacaaaatcaacacaaccgtcacttccaccaccgccgccgccgccgcagcgtcatcaaccactacatgctcctctgcttcatcattctccagatcttgcttgagcaaaacgccatcgtctagcgaaaaatcgaaaagatccgtacgtttttgtcccgtcaacgtcatcttcgacgaagactcctccaagtacaacaacaagaacaacaaagtgtacggaaacaacgaacgtgaatatgaatccattcgtcatactctagagaaccgagtcatggaagagaatcgtcgtgtaatcgaagcagctaaagaacttctgagaagttaccagaagaagaataaagaagtcattgaagtctccgtcgaagacgatgaagaagacgacgatgatgatgcgttgagttgcacaagctctgatctgttcgagttggataatttgtcggcgataggaatcgataggtatagagaggagcttccggtttacgaaacaactcgcttgaacactaatcgtatcatttctagatgattataataattaattacttggtttgaggtggattagcgattttctgagttatatgttatagacttaatagtgttttactagtagtaaattttctgagttttgtattactaattactttagatttgattatagataagtactaaattaaatacaactttgaaatcaagaagcgccagagagaagatcattgaagatgagttgaaaattaaaaaagcaaaaggcagattttctaacctttgtcatcaatttggacagcaatgtgaagttgattttttttttttcatgtcacctgatgggatccacccattaatatatttatagtattatggtttctattttcattatttgtttctacttatattgttttattgagttatactgaccaatcaaaaacaatatggacttatgttttatatatttctgatggtggtaatggttatatcattgatatgtatttttttttttttttgccaaaaacaatatggagttaaattttaaaatatatactaaaccatatcattttcaatctcccgaaccacttaacgagtcacaatctccgccaaattggaattcagtaaccaatgctcttgttgaattactttttttgacgctgctttattataaaaaaaaagaaaggaaagtagaatatatttgatttgatgttactaaattactaattatgatcatcagtaagataggggacaagagtgaaagagacatggtctcaaatatcatggacaagagtatccaattatttgatcctcttctcttttttactaacgttttattttctattgttttcttgatttcatggcctgtttttgtccaaattgcgactttaagattacatttggattatacgcatgatcattttcgtttataaatctttctaaaatctaatatacactctttcctttccttaatatttgaaaaccatcctaccgtgactccgtgagtgtgcttatataattcaacaaaatattttatatactaatgcatcttaaattaatgcgcgttcttaattaacatggaatctaaatatgaattcatcgtatttgtacatataaagtcataaaggtttagtaacagcgcgcctaatcatagcagaatgatacgatacatttaataaaggtactaaaacattcttattttatagagtacaacaaaacactttgttaaagtatatataaaacaattaagaagagaaaaagggatattttcgtagcaacacatatgggaagatcacttatatattaaaaacaaagaattaccatgcataagtcataacaaatcatattttcctctcaccaaaaaaaaaaacaaataatatttttctttatttatgcatcatagttaggtttacgatcttcttttaagttgctcacaaaaacagttagatttgcactactcaatatatcaaaccaacgaaaaaacttagtcagatttattagttagtcataaattcatgtttaagtgtggctgctgcgtatatatatatagggaatctgcgtatgctgaaattattgggatgatgccatgatgggaaccattatgatcccggtacgacgaaatttacagagcaaacactcgaaacaatgaaatatatttatgcactagtagtctattaaaaagattttgatttcacccgtattttaaacaaataacatgttatgttactccatgacacgatattttagtaatatcgtatcatattagtttatcccatatgacatggtatactaattttacttataacgatgtttccattgaggttaatttgcaataatcttttaacttttgaatatctaacaaatcaatgcaaaaatattatatatatatatatatatatatatatatgtaaatttatatttctcagtttcaggtgggcagttataagcaagaagttggtgaacatgtcaatcaataaaagcaattagacagctacgtatcatatataaaactatgccataaatttacgtatatctgataataaagagtgaatgggcataccatgttccataacaaccttgcatgcacgacgtctcgtcattctcatgcactcaccaatgccttaactcattgtaaaccacatacatagtaacatagctatgtgaacatgtaatgttgttgcgctccaaaaatatgtagacgacgattggtttggttttgatatatagcggatctttaaatctgcatagatatcaacagtttgtttggtggatcagattgaccaaacatgttataggttttacgtgtattaagcaaaaaaataaaaaaaaataatcaagatatctatatatgtccaaatgtgcatatgttgaagaatagtgcatggtggaaaatttgctattgtgctacttattgattttggaggcttttttgttttattaccaaaaaaacactcgtcgtttttgacctataactaatctaatcagatcagaaattggatgaaacaaattaatagtaatacctggtctaacactttcaaattcataactttgataggcgctatagttttcagaaaatgaaagataactcatatgtgtaatataatgtacctcacgttatttataatcacaaatacaaaattgtgtttaaaactacatggtgcgtttgcgtattacgatttacgaaccgacatacatctgatataggcacatagctagtgatggtttttgagttaaatgaaaaaaatgggaaattgattgagaaaatgaaagagacatgagaggaaacgaataaagagagaccacgtggacagaccaaaacaagtggatatgactttagcccgcacgtgacgggtggccagtttgtgtcttgtggttgtcgcgcgtgcacacgtgtgaaccccttcttttttttgttttgttttgtccgatccctatacagtaataatcttccttcctcacgtcacctgtgggctccataagctcgagaaaaatttggcaaaggaagtagtaaaatttgctccattaagatttttttcttgctccattattttctttgaaataactattattatttttttggtttttgtaaagggtttgctacttaagtatgagaactaaaagttttacacaagaagaatgttcaaaatttagccttgccgaaattgtgagaccaaattttaaagctttttaatgtgtttaaattattttaatcataagtttagtaatttaacaacatcaaaattgatatttggtgtacaaatttattgatactatatataatcaaaaactaaagtaactttaaggaaaccaaaatattacatgaaaatttgcccaaaataagttaagttaaacaaaatttttttttatgtttagatcagttcggtgttatcttaattagtagatgaacttaaaatctaaaaaagcatttttattcgggttcaaatagttagaaagtaaaattttgagtaaagaagatgaaattgttacaacttacaacttacaacttgtaataaattgacgaaaataatatttaaaatatattttctaaaagaaaaagagggaaatgtgaaaatgtggaaaatgcacaactcgagaaatgacaaagaaaaagaagaatgttttgttggatgcccaagacgatgattgttgtcagtcactgacttgcagctttttgtctcaaagacgacacggcgtcgtatcaactacttctctttagcttcaccttcctctccctgtattgtacattgatcccaatattgtttcattagacacagtactcgagattatttgtcctaataatttaggttattccacgcgtgacattagacctaacttgcaatttcaataattgctgcatcaagaaagatccaacaacaacatttagattatatatcagatgcattaacattggatagatcaagacaacaaaatagtagttgttgctgtttgttggttgattgattagtccaaattcatctctatctgtacaattattgattttgtcttttctttccttctttcatatgccacaagttgtgttacagacacaaaggctatgatagttcaagtacttaaattgttattctcattattatagcgtctaaattttgtgtcagattcagctaatagaaaagttgttatgaaattagaatttgatagagaattggtggatattcagatagagaaagttgatatgaaatttgtttattatccttaacaaaattgtttcaaaggcctgataatagtttatttcaaacccaatctaacatgggctttaaaagcccaaaatgtagcctcatttgttttcccaagtacaagtaggcgaggaaaaatcagagtaacgtcttcttcattcagttacgaaaaccatcaatggcgacggagtcgtcgtccccgagctctgttcggaaaggtgagtctccgatgaaattcggcagtcgtgtcgacggaatctatgaattgatcgattcaattacgtatatctgttgaagatttcttgtaggacttcgttttgatattttctagggtttctgtttctctgacagttgttgttcatctaagagctactggaggtgctcctatactcaaacaatctaagttcaaggtattaatcttccataatcgatcttctcatgttgaatttggtggcttttagttttgatgaagaatttgagtgtagatgtttgctaaacgttgcttgttaagtttttgatcattatgtgttgtgaatgttggtgtaaatagattccagggactgataaatttgccaaagtgattgactttcttagaagacagcttcattctgattcgttggtaacaaaaaacacagcttctcctctattggtatgaatcgtttagaatgcgatgatcttggtctgacattgctcttttgtttgtaagtttgtctatgtgaatagtgctttctcgccaaaccctgatgaatcagtcattgatctttataatgtaagtctttgtttgtttatcactgtttgtgcacaagtaccttttgaatttgtcttcttattgcttacatggtgctggtttggtatgtgtagaactttggatttgatggtaaactggtggttaactatgcttgttccatggcatggggctaaaactgaagactacagaattctcaaagctgtgtaagcacattattttctttttctgttactctctttcttctctggtaaagataatctacaaaactttgatgtgatgtgttctcctattgaacttcaactgaactttctagtttcttcagttctggaagtttaaccaaaatctaagttacatcttttcataactgatgatgagtgaaaggacatggtatatgagtatcaccattaagtcgattataacttgagctttattgtttcaggctcgcgctagatgcttgctttgttggaaagatgacctttcagatgaaagttgctgtacataaccaagcaatggaattgaaaattttaccctatatacatgtacataaagaccatatcaaacgtcaaaaacattagattttagtctcgtctttgtatttttccgtcggctaaacaaaagtctcttgttccagtactcagagattccaaagaagcgttaaacatatttcatctgtgccttgctctttgttatctatgccaatgcaatgcttatgcttattgtttatcactttgtaaattgaaagaatataaataaatagaacaaacgtttattctttctattaaaataacgttcagtgggactatctcaataagttaaaatcatatgttaaaaattttgtacttcttccatgaaaggattttgttgggaattgggatataacaaatggacagttttggtattttaattttttttttataaacaatttgttagaattataactaactagcaaaatctaaacctttttcttacccggaaaattaactaacttttatatgttcaccatatttagccttaatccgttattccctctgaattttcccgggaaaattttaccctctctcaaagtattttcttaggtcaattgttccaccaatcaaccatcgtgacatccattttctttggagactcttttgaattcaatttgtcacaaaatcttggattcaaacggagacttgaacaaaacagagacaaggtcatgtcttttttctacagatgccacattcggtgacgaagacaaagaagaccgttttttgattcaatctcatcaaaaatgggttttcttcaatctctcttcggatctcggagcctctatgttttcattctcgctctgtttttcaccattcattgtttcctcctcgtccaatcacaagacccacctttgtttccacaatctcctcctccaccaccaccgcctcctcctccaccgccgcctcctcctccaccaccaccacctcctccgccagctgtcaatatgagcgtcgaaacaggcattcctccaccgcctcctccagtcacggatatgattaagcctctgtcttctccgccgccgcctcaaccaccaccgaggtcacaaccacctccgaagcctccccaaaagaacctgccacggcggcatcctcctcctcctcggtctccggagaaaccgaaaagagatggtttaaacaaagggaagacggtgggactagtctttgttgggttaatagcaatgttgcaggttattgttgttgtattcttggttttcaagagaaagcagcttctcagcttgaaagacactaattaagattgtaaccatttgtggattgacattaactcttttgttaatttgaggccattgattagattgaagattagagatgagagtgtattaggaggaaagaaactgcagttttttttttaactctcttataaaattgtttcagaaatctcatgtgtttgtctttccaagatctatctgattcaccaaatggtttggtttgcacgagtatcttcgtcggttatagtcctttaaaaggcttctttccgcaatgtttggatgtgaggttccaaggtgcagcttttataaaataattgatgatgatgagatgatgattcaaacaacacgacatagaggcaatacaaatcctaatcgtcaaagcttctacccttagttccattcttttctctgtttcttgagggtcaataagaaagaaagaaaaagctttgaagaaggaagataagaaccagacataagtacataaccttggctagggttattgtctggcttacaatacatagatctccaagagttatatatcacatttcgattgtttaaatgtatacactgacttatgtacaaagcaaaccaaattttgattctaaaaagactagcagtacactctcttcgaaaccgaaattctcttcatcaaattgaagtttttttaacttgttgtggaaacagacttagaagctagctgttttcctttgaaactcagaaagaatatgcaatctgtagcaagaccctagcgacccgagaaaacaagcacaagcacggtgatcacaagtgcaacagagaatatcaaagcctgcatacaatttttaagcaaaatagattacgttggtaaatcctcttttactcacttttaagaacgaaatgcatttggatccgagaactcacagctatagcagaggcagcaagaccagatctttcccgaggatctctatggtaatagctgatcaaataaagaaatgtagcaacgtaccacgcaaacgggaagacgaatcctagaagaaacctaacataaagaggtaaaagattctgcttcaacaagacaatatatcctcgataataataagaaaaaagagtgagtgagtactcacgagaaccatccgattccaaaaccgaagcaaggaaggggcttatagaattgtcctaactcagagtcctcagcatcatcacggattagaacatactttcctttcttttgttcctctaaatctgctaacaacatattcaaacattcacaaacagtaagagataaacagcaaataatggtgtcacaagaatcatgtaaacaaaaagctgagtccaacattcacaaggaactcaaatagtaaaagataaaaaacaaacaatggtgtcacaagagaaatggacaatttgtgaacatactcgaattcatggcgaaagaagtgcaattttgtagcgccgattaaacttcctctcaccaagtaacctgaacatcattcaatcagaaaattgtctcagacaaaaatgattaaatgtaaaaaagacaaagctgagttttttttctcaaatgtcagctaataagaatcaggagaaatctcagaaaagctacattttccgatatccaaaaattattatgatgatccaatacagaagatgaaaaaaaacgaacttaatataaaccctaagacgatgagagggttctggaaaagaaagcgattaagaagaaaaaactattgatcctgagagaaaaaggacgaatttttcagagtaaaatcaaacgagaaagggacaaaaaaatcaccagaaaagttgttcaaagaaacttgcctctgagatagagaaagagagacaaaatgagaaagagaaagagagaaagattgcctgagagattcgcgaccgtgaccgacgggaagagagattcttgctttcgttgtctaacgtttttttctttttctttttggttcctctcaattttattttatttattatttgtttatttcgtttccgacgaagttagctgaagatttttattgatttttttgggatataataatggctgaaaagatatttttaatggatttagacttaaaactgtgtaacataaaactgtgaataactgaataaattaatcagataactatgtatgaaacattattgataaaataaatcagaaaaaatcattaaacccataaataaatatgagattgagtatttaggaaaaaacttaggattttgttttgcatttaggatcaagtgacattcagaatgtatcggaacaatcgaaacgtaatttctttccgtttcccgttattgagacaaatcaaaatcacaacattaatttgtttctggctttctgctaccacatggaaaaaaaccccaatggataataaatagagtgactttgattgaatacaagcagtttttttttacaacaataaacaagactataatggattggtatggactcttttgccattcaaatgttgaatatagtgtaaaaatgttgttttgatttttttattattttaaatagagattacgaaagctcactcactcactcaaatccatccacttgtatcaactatcaagcatggttacaaaacccatcccatatagggtagtacttcacatgacaaaataatgggagttttatttcacagccctcctcaatgaacattgaacaaccagaaccagcaaagaatatcctaaaatccagtttacagtggaaatgctgaatccctcacaccatatttattcagaaaacaacaaaagtcttttttagaaaaacccgaaagaaacagaggaaaacaaagaaaatctaattggtacagagactcttacgacagcttttgatgtgtttttttccattgcgtggttggttctcttttagagtaacatagatttagggttctcgatgtatcccttaaatgctttcaaccattcagctccaatggcacctgcagtaagaagaagaatattagatttctacaatgatgatgaatgaatgaatcaatgatgatgaatgaactggattaccgtctactacgcgatggtcacagctcagtgtaacaggcatgtaagaagcaaagttgaattgatctggaccgttaccagggacaactctcttttcagctgttttttttttttttaagaatcagacacaacacgaatcggttattggatctttggtaaagtagtaaaaaaactctcttctgcattgagagagagcataccggatccaactgctagaatggcggcttgaggtggattaacgactgcacagaattgcttgatgccaaaaggtcctcccaagttagagacagtaaatgttcctccctgagaaaacgagattattagcatgtttactgaaagatatgattagtgagtaagataatgaattctctcacctcataatcttctggctttaagctgttctcttttgctttttgagctaataaccgaacttcttctccaattgtggacagacccttcctgtctgcgtcctggaatcaagaaatttatataattcagcaatctgaagtttgtgctacagccaagggttaaacactattttgaacacaccttcacaacagggacatacagcccgttttctgtctgcaccgcgacgttgatgttcacatttttaaacctatagagaaaggttacaatgtttgctaccacaatcatattcaaaagtttgtcaatgtacttactggcggatgtaatcgtcagtccatgaactattgcactgaggaacttttctgagagctaatgcagcagcctaaaaacgcatgatatcagtaggatattttagaagatctgttggcttgcatgtaaagtatacacaagaaagatgtaccttaacaacaagatcattgacagatatccgtttcccaccagaagcctctttgaatgaattaagctgactcctcagactgcatttacaaattcgcttagtttagcttacccattgacagcgactcaaaatacatcatccaaacctttatacttacgccataagtttgtcaacacatgtatcgacggttaagtaatagtgagggatagtttgctttgagaatgccaaacgtgaggctgtgacctgtcaaaattataaagttaacgaacgagatttcagaatcgttgaacctattgaaactggcttaaaggctgcgagagtaatataggttttacctttcgtatctgagaatgagggatgtcaacatagtccaaagctggggccttagaatcagttgacttagatggcttcgcagtagctcctttaccacttgaagctgcaccattggaagatgtattacgacacaaggatgagtgataactgtaaacagaggcaagaaaggtctgaaagaaaaagaaaggaaaggacgagtcatggagttacttatacctaaatactcatcgatatctgccttcactatccgtccttcaggacctgtgccttcgatgtctgagagaggcacctgatgtttttttaaataaagtaaacaagaagaaaaattaagcaggaataataagaaaaaacagaatatttagaacactgtgaaactaacgttattatcttcagccaactttcttgcaagaggactagcaaaaacacgatctcctgtgggaggtgtgctaggcttggaggccttcggttcaggaggcgatgatggctgtttgaccttctcttcctttggtggggcaggagttggttctgcttttgtaggagcggcatcagcagtagatgatggggtgtaatctttgaactttccaatgtcctcttcatcttcaactgtaatagcaattacctatttgaaagcaaaaaaaaatgacattatccaaataatttcaattaacatttccacaaatggactgtggatcctaatatcaatacccgtagccccatgagaaaccatgataatacataactctacagaaagcagacaattttcatacctcgccgacttgaatttcttttgaaccttccgcctttacaatcttggcgagatagccctcttccatgcattccatttcgacagttgctttgtcctactgaacataacctagtcagagttatttccaaaacatgaaaataaaaatacggaaatgagactcaatctacattgacattacagtttcaacttcacagagtacttccccaggagcaactttatcaccttcttttttcagccacctggcgatgttaccctaaaaattggaaaaagcttattagaacataaagataaaacggacataagttttgatcaagaggtaaataaagatccatgcctcagtcattgttggcgagagagaaggcatcccgatctcttgatgaggaggcagatctgaaacacattttcagaaattctaggtaaaatgaaccaatgtaaagctcataccatttagcattcttaagttacgcaattgattaagcactatgcaattgtcttagtaggatcttgcagtaaagccgtcatccagatactgtatccaaggaaggaatgacctttttctagcaaagtcattaaatatgatattgctcaagtaaaaccagatgaatggcaatgtgaaacagattatccttagctaaaatggagtcgctgaatatgtatgtaagatcaaggtggaaactacaagagtaaagtgaacaaaagctcataaaacaaatttaaaggtcagggagaaaaagctgactacctgaacccgatgaaaatcctctagctgattgcatcaaactggtatgcagaaaaaaaagtttatagttaggaataaaaagtatctatacaagcaggcagctaaggctaatgcacatccgccacatagagtaagagaatgagactgaaccatgaaaattcttttccaaatattggccttcccattgcactgcttagatttgatctcgtagttgaaaaaataatggacaccggtaactacatcaagaccatgtaaaactcttaaggtttctgctaactagtcaacatgattcaacgagaagagactcagctacacagctacagagaacagtaaggaacttacagtgctggtgctacatatggaaatcctctccagtgggggataaccaagacgggaattgaaagtatctgaagaccataacaaaaaaaaaagctgaagcaacaagcagagagtctcacagatactaaccataaaaccatacaaaagtacaaatggaaaatttctacctcaaaaggataatattaccttctctgttcagaggagctcgattagtattcgagtagtagcggatcgttgcagcattctcacggcgtagtaaagtggaaacatccttcaactgtcaattacaaaaaaaattaaaacaagtggcgttacagatctcaatcatctctaagaagcaagctgacacataaatcacaaatgatcatagagctctaaatctagctaattttagcacattgctcgtaagtaaaaacaattctagattattacaattcaactgaatttctaaaagcagaaagaattcgtcataacccaatttcgtaatatcaatactcgatcgctgaagaagataaaaagataacaaaatgaacggaggaaaaatgtaatcgagaaacagttaccttcttggaatgattaatgatgcgtgacgcataagccattgatgcactatcgttacgattttcgtttcgcagctctaactagtaactatggaagaagaaaactttttggtttggactgtttagttttttttttctctttattactagaaattgtttttttgttgctctcagctttctgatttaccaagagacagcaaaattgttaaggactttatcatcggagcataattgtacggtcgagattaaagctgactttaattataggcctgaggacaggcccattaaggacttataatggcccaatcgtattgctatatttatgattttgcagttgggaaattaaaagaagtagaaaagcgggaaacagagaattagttacgtcttcttctccgacgagacgactgcgattgagtttttttgaagatctcaaattcaaaggtatatagatttaatatttatcttcttccatggaaaccgaatgacatttacgcgaatgatcaaaatctttatttcttcttttgttttttcagagacgagccttcttaagtggccaaggattctgaagatagttcatcagctgcgaacgattcctctgggttcgtgaaatcttgggttctttaatctcaaatccaaaatggcataatttctgattaaaatcgacgccaagttttgggaaatcaaagagctcgatcacaacgatatgcgatcaatttcttgatcttttaacccctaatttgccactttctttctattttgcagcgaagagccttcttcttcagcggccatggattctgcagatgcgaacgttacctttgagtttgtgacctttttggattcttgaacagaaatgttttgaaattgatctttgctttctggtttgttttgatacttttgtttcttcaggtacacgttaagtttagatgatatggtttttgaagctttatcaacaatagatgatgaacatgatggaactggtcgtgatgtcgatgggattttcaaatttaacaatgttagtagaatctctttccctctacctataagtatccgttttcaggtttgatcttagatgatgatgatgatgatgatgacatgtatagcttgtttggatactagtttgaaagttgttcttgtggttaatataaatttcaggaccggtacgtgataccggataattctagggagcgattgagaggcgaggttgaaaaactagttgctgaaagaaaaatagagaaggtaactccatacattgcctaataccaaatgcaagttgcgagatagcgttatagaattttgtttggtcagctcagtaaaaaaaaacttgcaaatgcaggtaggaaaccgctacatgatgatgatgccccaacgtgttcctgctactagagaagattccacaacgccacaacgtgatcctcaggcagaagcagtagcaaaactagtcgcagagacagaacacttagagttccaagcaaaagaggctcaagaacttgcagatagatacagtttgatgctaaattccgaatgcataatcttggagttagccgtagaaatccttaaccgatgtaatgtccaactcttatccacatcatcatcatcatcatcataaccatcatcatcatcatcactggccttttgctttgttccttgcaggtgctaatggtcaaatgattttcctctgtacttctctcgtaccaagagcaccagaagaaaatcctcagatggacgcagtagcaaaattaatcgccgaggcagaacacttggagttccaagcaaaagaggcacaagaacttgcagataaacacgcccagttgctagaattagaaagcgagataatcttgcagttagccgtagaaatctttaaccgatgtacgtaatgtccacctcttaaccacatcatcatcataattcaaaaccatcatcatcatcactgcctttttgctttgttccttgcaggtgctaatggtcaaaagattttcctgcggtaaaagcgttgatcttctggtccggttcaatgtggatgtattcgattaccggttctttcatagcttttttggcttttgagttttaaaaaaaaaagtgtttaaatttcatttgtaactgatcgattttgtcacttctgtgtagattagaggttaaacgattttgattgtaaaggcaacaatgtaatctttttctttttgttgataaaaagtttgtgcattgcatttgcagataatttttttgtagaatttaatctatttttctaatacattaaaaaaaaagcagtgtgagactctttctaaacgaattatatttaacgatcgagattagtttttagtcctgagatcagtgatcaatttaggagagttgactacaatttcaattttacttttgtaattagtgggccttattgttagcccattatatgcttataatgtggttttctgaatacgggggaaattaaagttgactttaactctagacctggtttaggccctctaagaacttgtaacggcccaattagattgctatatattcacgattgtgcagttggaaatattaaaaccaaaaaaaaaaaatagaaaggcgggaaagagagttagttacatcgtcttctccggcgagacaagacgactgcgattggatttctctgaagcgcaggtatataagtgatagatcaccattgatactcttcaagaagatcccattcaattcaagctttatcgagtaagatctttattttattccatggaaaccgatttgagatttacacgaatgatccaaatacgtctcatatcatgcgatttcaagacgaaaatggcgtagttttattcaatcgaaggcaattttgaagatatcaaaaagatcgatgcttcaattgcttgatctctaacgtgtcagtttctttctttttgttcagcgacgatccttcttcagtggccatggtttctggagatacaaaatcggatgcgaacaacgttacttatgggttcgtgaacttttgtatttcccaaagccaattttgtggaaatgagagagatcgatcgatgcttaaagctctgcttcaactaataatgtcaatttctttctctttttttcagagaccttccttcttctccagcggctacggattcttcagaaccttcttcctatgcgttagtgaattttattgtattctttagaaccaatcttttagaattgatctttgcttttctggttatgttttgattgatttgttatctcattttcagtgaacagcttgaaaggctcatgatgatagattcagaagaagaccggggtccctctgggtttgtgaccttctcgattctttaaccaccaatctttgttttctctggtctatctatgttttgatattactctttttttgttggttttgtttcaggtttacgactgatgaattgatctttcaggctttagaaacagtctacgagaatcataatggtcttgatgtcgatgcgattttcacttttatcaaggttaggaggatctctctgtctctataagtatctgtgtttcatggtcatatctcatgagtagtgtatattggttctgaaatgtgagtcaatagcgggattacacaatggaacattaggatctgaaaatttgacttcatgttccatcccctaaaagtcttccttttaaagtcttggttttgttgattcctccgttgttcttgatcaactaaccatcatgttcttgtggttaatataaattgcaggaaaggaacgagttacaggaagattttagggagcggttggaaaaccagctgagatatctagtttctgaaggccaagtatacaaggtaactagtttttcagagttgcctcacactaatgttaagattcagtagttttgtttgatcagttcagaaaaacggaaaaaaaaacttgtaaatgcaggtaggaaacctctacaagatcccccgtggtgtatttgatactccagttgtgtcagtaggagattcaaatcaaagagaaaccatggatccagaagattccacgggcacaaaggcacaagacacaccaagtacttgtgcttctttcgcaccaccaacaacagaagtagatcctcggataatcgcattagcaaaagaagtcgcagaggcagaacacttggagttggaagcaaaagaggcatacgaacttgcagataaacacgcccagttgctaaaattagaaagcaacataaccttgcagttagccgtagaaatccttaatcgatgtaagtaatgtccacctcttaaccttttatcatcatcatcatcactgactttttcatttgatttggtccttgcaggtgctaacggtgaaaagattttcctgctgtaaaagctttgaccttctggtccggttcaaggtggatatattcgatcaccggtttctttttagtgtttttggttttgagtaaaaaaaagagtgtagatatgaaatgtgatttcatttgactaactagtcatagtttgttactttgtggttaaatgattttggttgtgaaggcaacagactattctgttagtttttgttaatacaagtttttacagataatgccaatcttaagaattgaataggtttttctaatacataacataagaaagaaaaaaagaaagtgtgtcatggtgtctttagcaagtatttttaacggtcgagattaatttcaaatactgatcaagaaagaaaaaaattagttatgagaattacaattttataatgggcctcattgtaagcccattataagcttacataggacttttatgagtttttgttctcagtctgtccctttaattgttttttggctcttctatcgcccatcgcttgggagattaaagtctgaactttttgatctcaagcttctccatctctccctcaactcaagctcctggttcggaactatttactttcctatgcgattggttgtttataagttgatttcagagttcggattcttgtactcattagatgtccatataggtcttgtttactggtttaattggggttttatcaaggaaataaagagtgtttagggtttgaatttccgtgtttgcagatggcgagcaatatcatcttgttcgaggatatcttcgtggtcgatcagttagaccctgatggcaaaaagttcgataaaggtatacactttattagcctcactcacgatttctagtacttctcatggcttacatcgacgtttgttcatagctgtttagttcatgtatgtattgtgaatgagttcttccgtttatccttttttggtctgagtgtgtgggttttgtggaaaaatttaactttttaagtttttagtctcccccaagttttgttctgtcttcagattgagtggctttctcttaaacctacaatgatttttgttgtgtttgtggttacagttactcgcgttcaagctacgagccacaacttggaaatgtttatgcatttagatgttaatacagaggtttatccattggctgttggtgataagttcacacttgcgttggctcctacgctgaatctcgatggaacccctgataccggttattttactccggtaataaactctactgctttttatttagttgttttgttttgagtatatacacagtctcttgtttgcttggccaaatttccatgaatggtaactttgaacccgtatctggattttgttaggatataactgttaatgctgctaaatggttgatattataactctgttggctgattcgagaagcctgtctatctaggaataagaggagacatggaattttaacaagctttagttcttgaatcttcaagatctaaatttgaaaaccaagaatgtgtatgcatatctaaacattaatcttatctagttttcatctcgatacattacagggagcaaagaaaacacttgccgataagtatgaatacataatgcacgggaagctttacaagatctctgagcgtgacggcaaaactccaaaagcgtaagaatcccatataacccccccatatcaaaataattcaatccaattcaactcacatatcaaaccatcatgttttattttattttctttaaattatgtgtttccagagagctatatgtttcgtttggcggcctcctgatgttgcttaagggagatccagctcacatttctcacttcgaactcgaccagaggctcttcctactcatgaggaagctgtgaggtgccattttttcggataaaaactgaattaatagagagcttgatctaatgtttaacttttactacttcaactcttgcaattttcatgaagcaactcttgtgcaaaagcaagtttttccgttccgttttaaatcccattccacaaattgactgctccggtccggtgaaatgtactatttgtagctctaagctattgatgaagataagcaattgagaccaagaacataacaaaaaacacagacaaagacacagttttttttttggtcaaggacacagttttgtttcttctctaaccaattttcactacactcttatcttctaacaacaatatgaagcaataaagctcgaaaaatagattctgagccaaaaatagagtgttttctctaatccatgcttgtgttttctctagtccatgtttgtgttcttgcttctttgagactgggagaatatatcttggacggtcgagattagtcttaaaaattctgaacagatcaagatttaattttaaatctgtatagtgggccatgtttaggcccaataaaagcttttgatgaggccttctaaatggtatatatttcgacttgaagagaaagaaaaaacaactagaaaatcggaagaataaatggacggtggaagaaggaagcccttctcgccggactagccaagcacggttccggaaaatggacaagtattttagacgatccagagttcgcggctcaacttctagatcgcacaaacattaacctcaaggtaatcgaaaattcccaaaatcccattcgtcttccatggaaatcgatttttgagatttattatgtggaattaggtcgaaatttgggtattaatgttgtattgtttattcttattgcccaaatttcaaggataaatggcgtaatataaagaaatcaaggacacaatcactcgaatctacctccattttcacttcaccttcagagacttctcgttctgttgttagctatgaggcttctcctagtagttcatctgatatgagcaatgatgctaggtttgttatatttagagattttttagaattggtatgttctaagttctaacaggttcttctttaccttgttgcaaggtatgatgcgatggtttttgaggctgtatcaacaattaatgatgaaaatggttccaatctcaaagagattctcagatttatcgaggtgaagaggatatatacattgaagtcctttgtgtttttcatggtttatatttgacattcattagtcagtttatctcaatttcttgtcatagttatttccttgggtttcattatactctcttctctgaatacagaatgctaagttttcacctgaaatgagtcgatagattgtgtagtctgaagtgagtcaatagtaactgatcacaatggacagaacataaggatttttaggatagttatctgacaattagttggtaacttctgaggttgtagatatatgtagtgagtattctaacacaaccatgatgactgcaaacactctgataccattggaatagcattactaactgctgttggaacctctttgttgcgccgcccaggttactgaaattcatacccaggaaacttgtggtttcatttttcctccttataacatttgactccaagcatgaatcctttttatcaccaatgctgctgcattacattctcttattactgtttctctattgtatcctggttcaagctttgaaaaatatcatttggataaactcttatatttacgttcaaccttaacatcaagaatatgaattacattgaatccagttggaagttaatctttgtggtttatcaattgcagggacaacatgaggttccacaaaactttaagaaactgttgagttatagcctgggaatccttgtttctcaagacaaactcaaaaaggtaactagtgttgtttttcttaatgcgcggtttgtcacaagcctatctacttttctccatacccccaatatctatatgacaagatgtagtaataataaacctgagttatattatatgataaactcaaaaattactttataaatgcaggtacgaaatcgttacaaaatctcagttacgaaagcaattaagccaacactcaccctgcgtccaaaagattccacgaagccaccagagttaccaagtacttctgtgatattaacatcaaaagaaacacatgagatagacccagcagcaaatagagaagcagaaggaatgaatgagttggcaaaagaaaacaacgtaatcttactccttttaattacatgttgctcatccaatttacagtatcatagcaacaaaagatatgatcccttgtggttgatcaatttcaagactggtacgaggagcaacaagactttaggatgtttttgagtgagtgcctgataattctcgtttctcaaggcaaactggaaaaggtatatttttcttaattgctcagctatttattgatgcatcatcatctatctataacaagatcatttgtaattcttatgattgattaaaatcagaaaatctcccaaattgcaggtattggatcgctacaagatatcagaattagaaaacaaagtgttggaagtagcaccagaagttgtagcaatgaaactagcagagtcagataacaaaaggttgatagcagcagaggcagtcgaagaagaagaacgaatgcacaagttagtagaagaaagccacacgatgcttcaattatgcttagagatccaccaacaatgtaatctcaacaaaactcacatggtacatcaatccatcatcatcaccatgatcatcactgtcttttgctttgtttcttgcaggtgctcttggccaagaggttgttctactgtaaaagaaaaccaagtatctatctagtttgcttcaatctatattttacttaactaaccacttgagttttgtttttgtagttcttaaacacaggtttatatggttgtaatggtgaactaatgttcactgttttgttcataaaaagatagctttttttttttttgctaaaaaacaatgacgtgtctatggagtcttgtgaatgctttgctacgtcataaagcatcaaaaggtgctggaaagaataagcttttccaaaagaaaatttggtctttttttctaattaaaaagtttggtattggcgtatggaagtacaacactactactcatatttccacttgaaaacaacattttgtgattgtgatttgatattttctggtgtgtgttagtatgcaattgcgattcattattcatagtctcttttgacattggtgtaaaataacttgattggtaacaatattttccctactagtttaggaaaagtataaagaggtgagaaaaatctcaaatcgaaaaggaagaggaaagtgggggtaaagttggaaatataaaaattttggaaaagtagaacaattagaaagaggaaaaccctaaaaaaaaaaagagggggactatataactggctaacacgtattgggttgagtctctctctacctcaatttatattatttgcttcaatcttctctttatcgctccaccagatccaagttcgcgagatttcaagctctctaacaaagttcttcacttttactctcaaagctttcatctttcattcaactacttaagctccaaggttcggaaatattttttttacttttctctgcgatttgttccttttcttatgaacgattggatctcgagtctgatttactctctttgcgatggaatttgttctgggtcgttttcaaaattgacgcttgttaatctataattcgtcatcggattcaattagtccgtgaaacccttcaattcgtttatctcaaatcgatttgggttaggttttgatttcgacacttatgttaaaatcatccaaagcttttatcttcgattttggacaactttgtgtatattatatgctttcatggagagatagatgtttttgaatggtatctgttatgataattggatgaaccatatttcctatatctctcctgacatcgaataattcagatattaatgcttgtgttcctctctatatggaacttcaagtttggctattctgttacattcttacttttgcacaactctctctggctataagatttaagaatcatctctagctatctgggttctaaactattgtttcttttgtgtattgttgtagtatggcaggatccgcaccggaaggaacacaatttgatacgcgtcagtttgaccagaggctgaatgaagtgtaagtcctaagatctttagtttcattactcgtttttgatgagattttttttgtatttgctaatcttattgtttgtttgggtgcagtctcgatggacaggatgagttcttcacctcatatgatgaggtccatgagagctttgatgccatgggtttgcaagagaatcttcttaggggtatctatgcttacggtaagtgaagaaggtttaaagaaacaaccttttgtttgttatgttgggattcctattaactttatcgtatgtgctctttcctgtgattgattggttgatttttttctaggtttcgaaaagccttctgctattcagcaaagaggaattgtacccttttgcaagggtcttgatgtgatccagcaggcacagtctggtactggaaaaaccgccactttctgctctggtgtcttgcagcagcttgactatgcccttctccagtgccaggctctcgttttggctcccaccagagagcttgctcagcagattgagaaggtcatgcgtgcccttggtgactaccaaggtgtcaaggttcatgcctgtgttggtggaaccagtgtccgtgaggatcagcgcattctccaggctggtgttcatgttgtcgttggaactcccggtcgtgtttttgacatgcttagaagacaatctctccgccctgactgcatcaagatgtttgtccttgatgaagctgatgaaatgctctcccgtggtttcaaggatcaggtttgttatcttcttcaaagtttgaatctaccctctgtggttatctctgatattgacttggttttgtgttgttttctggtgaatttgcagatctatgacatattccagcttctcccaccaaagattcaggttggagtgttctctgcgacaatgcctccggaagctttggagatcacaagaaaattcatgagcaaaccagtgagaatcttggtgaaacgtgatgagctcacacttgaaggtatcaagcaattctacgtgaacgtggagaaagaagactggaagcttgagactctctgcgatctctacgagactctagccatcactcagagtgtcatctttgtcaacactcgtcgcaaggtcgactggctcacagacaaaatgagaagccgtgaccacacagtctcagcaactcatggagacatggaccaaaacaccagagacatcatcatgagagagttcaggtctggctcgtctcgtgttctaatcacaaccgatctcttggctcgtggtatcgatgtgcagcaagtctctctagtcataaactttgacctcccaactcagccagagaattaccttcaccgtatcggaagaagtggaaggttcgggagaaagggtgtggcgattaactttgtgactcttgatgatcagagaatgctgtttgatattcagaaattctacaatgtggttgttgaggagcttccctcaaacgtggctgatttgctgtgaagaagaagaagaagaagaagaagaaaggttgcttgtttcgcaaatttcttatttgatttttgacccgtctctctctctctgaatcatcgatacatctttttcattctctagtattcttcatcaactctatcgaacatatatatgtctcttctgaccatatttcttttttatcaaatgcaatatttatttcttctcttgtatgatccaaaaatctttcgtaattacaagtctattcacagcaattctatacctgtttttactgtttcggatgtcacttacatagaaatctttcactggggtcatgtgcgattatataattcctaacattaagaagtggtcaagagctttagttcatatctttgaaaacagtttctttttcaatttcggaagtaagagtacttaagcttttccatgctaatctttttttgtgaatccatttgtaaaaaggaaaaaatgtcaactatttgtcaaacttgtctaatcagcaacatatcttttttcttcttttcattagtactagtgtacatacacacacacagacaaacacaaaatacaacattcccctctttcttctaccattgtctaattgtataaaccataagattagtaagaaaataaaataagagtctctctttctttcatctaacttgaatccaactttctccatctgatgatttcccgaagaaaaaatcacagaaatatatatgaagtggttaaacaaaacatacttggtcttaatcatcaagtctattgtgagtttgaagaaggtgtatcattagacgatgttccactcataacacttaacaccgaatgcttcctttgaagcctgcctcttagctgcctgatcttagcatcaactcgagccgtgaacccaatctttgtcttctctctcgcctttgacttctctcgtttccacattcgctcatcctctacatcgatcctgaaatgtttgatctcttgtataatgtgatggtcaagagggttcactgatctttggtatgaaatgtggaacaagtaaggtagcgttgtggcggcaatgaccagaagtgaagtaagccagaagatgggtgcaggggcaagaatctcgacgagcatgtgaaagatgttaccagagagttttactggtaacataccgtaaagagcgaggaagacgtaccaagctcctatgcttccccaaatcattacgtgttggatccaagtgaagtgactcatggttagagctatttgaacatttactgcccatatgatgcatgtgaacattgcggttcccatggcattcatatctgcggtttggccatctgagcggaatgattgaacatggaagattccaaggttgagtgtaaagatgactatggatgcataaactccattccccatccatccaaggattctgtaccagtcgaagaacaggttcttggggccttgttgatacaatgcagggaactagataaagaaaacaggccaagaaatgaatcaagatccaaaaagaaggttttgttatatatgtgaaagatgatggagaggactttatataacctgtaagcagacatcagaaggaacatcttgttcaaaaactccgagggaaatgaccgggagagaagtgagaacaacgttgaagagtagtaagtaggagtcgttgtatattgattgaccagaaaatccggtaaagcattcgaagtagaagagagtcagaccaaaggttatgttcttgtagaagaaataacaaatctgtgaaaccaacaatgacgaatcaagatcaggtatatatatagatatttgttttctggtgagttatatcaatgcatatattaccatctgggctattcgtttgtagcaccaatgtccgtggacaacaagtagtctctcaagaaaccgaaactgggctatggagaagtcacttgccattactgcctgcaaagaaacagaaccaactactctcagaaaaaccaacaaaacttaaccatgtctcattgtgctgaagaaaagtttttaagcaacctgcatgccttcaacgccactgatgccaacaccaatatcagcttcttgaatcattccaacatcatttgcaccatcaccaattgccaaagttgtttttcctgttccttctttggccagccttgttacctacaaaaaccaagataaacaaaatatggcatatgtaatattctgaaaccaagaaagatgttttgagaattgtggaactattcttacaagtgctttctgtttgggagagacacgacagcatatcactgatgcacagtcaactgcaagggcaagaaactgatacttgacatcatccttcaaagcataggtaagtgtttttccatcaatgatcaaagcaaatgctgcatgtggatccttttcaattttaatcatctgtgaagcatttgtgatctgcatcaaaatgctctcctttgcagcctgaccattaacaagttttgttatcacatgcaagtttctactgaaacagctgtaaaagttggtttttaattatagcatcgacaaaatacatacagcttcagagttttgtgatgattcctccacatttgtaagtgaaatggatatctgcttcataccctgtcgtagtaaactgcaggcatatctgcattgggatcaaccaaagaactcaattagtccacttagttttagaaatgtatctagtcagaaacagtttaggagtctgtggtattatcagtaacaatgaagaacaaaccctatgtttattgctgtctccatcttatctcctgtcaaaacccatattttgagaccagcttgggcaaggttatctatgcattgaggcacctaaagtgagatacaaacagtaagttgaaaatgattttggaaaggctgtttctcagttataatcatattttgaactatgctacatacccctttttgcagtttgtcctccacagcagtagctccaacaaggatcaattccttctccatcatatctgaaaccttctcgagcatttcatctctatcagctccaactgaagttttggctttgtgaaattcactgttccatgctgcatactcggtctcatctagctttctgtaaccaagtgccaatgtgcgtaaacccgcttcaccatatacattcaagtgctttgaagtagctccaagatactctttcccactctttgataaacgttcaaatataatgctgcaggcaaaaagcattaaattgtggttagaagaagtgagaattaagcaactgggaatggcttgaagtcatgcaatcaaacctgtcagcgcctttacatagtagaagaatctgcccttcttcatctctgacaatggcagacattctttttcttttgctagtgaagtctaacagattcaagattttgtattctctgtaaaataacctccacatgaatagacatctatatgcaaagaaagatcaatgaaatatttttgaaagatttaaagctcacctatcaactggttgacctgaagatgaaaaccgttcagcaataaaaacactagattgagttctcttagtaaattcaaaaccaaactccctagaagcaacaaggaaagcaacttcatcaggagactcagcttcataagtacacattccagtatcttcatccacctcaggaatagctgtatgacaaaccgccagaatacggaaaaacatcaaaatgtcatctgaatttggctcatttaaccagttttcattcatcaaacggttatcttcaaaactaaaccccttaacaccagtgttctgcttctgatccttttcgtcgctagcagtgactactgtctccaattcaaaatctgatgacgtcttgctagccaattttgcataccgttgtgtcctgcctttattcatagaaaggtttgcaacttcttcacctttctcctcaagatccattgccatctgcttagcagcagctagttccacttcactagcacggacaccgtaagaagtccccgcaatagagcatttcagaaagtccatctggttacatgtcaaagttcctgttttatcagaaaggatagtatcaacttgtcccagctcttcatttaaattcgaggtgcgtgcttgagccggagtcccactctcactatcatacaactgcaagtcttgatttataaaatgtgcttgcaagactttcactacctcaatggaaacatacaatgagatgggaatcaagtatccataaagtaacagagcagtgatcaaatgaacaacccacgcatacaaaggatttgtaggatttgtcaagctctcaggcttgtctggtcttaagtaccaccactctgccattaaaagttttgtcatcacagcaaaacccagagagctgatgaaggaaacagtcaagagaagtgcaaagagagtatatataatgtagtccattctcttttcaatcctgcttctctttgaaggagattttgtagaattctgcattacttttgtatcatggccagtaaaaaccacaacaccatagacataagcagtgttcctaagctttgagtctctcaaaagaatctggttaggatcaagtggataaacctgaccatcacactcaagattaccaacaaacgtatacagattcggattcggatcttcgcattttatcgttccagagaagttctgaaaagattcatccttctccaatgccaaagtagcatccaaacatctcttaactttcaagttagtttcaccatctaagttcatagtctcaacataacatatcccatcctcgtaactcgatgacaacaagagcaaatcagcaggaaaaaactcatctttctccactcttacaatatcaccaacacggattctcttccacgttcttctaccaaaatcaccactccctttatgaacactagctttcctagagttcacctcaacgtcctgcataaaccttctccaatcctccaaggcttctttccccatactaagcccaacaacgaataccaaaggagcaatcatgctccatttgttaaacggagacagaggaaaaacagagagaatggcagcaacgaggaaatagaaattggcaacgcggtggaattgctcgtacaagcatttaggtaagaaagtgagcaagttatacctggtggtcgatacatagtttgaacggtacctaatgagtttagtagccaaatgcaaatgaggctggttacaatgaacgattctggtgtaaccaggtccattgataacatgaggtccttgatcatcaagagttttaggtctaagacatctaaatgtatagaaatgacttttacgaatccttgatcttattctacgtcgagccatttttctcttcgccgcaatcgtatgacaaaaaacaccgttaactgttcttgattatgctgcaaattttcaaaaccaaaattcgataaacgatgattgtcaatatgtaatccagagattaaatatccaaattcggtgtatctaattcgcaaagcttgtaacacaagacatctagagaatcgagtcacgtcattgaggttaaaggagatagagattggagaaaaacttccatagcgagagagattgattacctgaaatcgggagggtcgctcatgatcaacacgaagaaacgcgtttttgtttttggtaaacaaaaataagcgatcctgaggaacgaacaaaacgaaaaaaaaaaaaaaaagcttggtgtggtggtggctaaacgagaaagagagagagagagagagatccaacagaaaaaaaaaatggagggagaagaagaaggaagagaagggtaatggtaatctggtaatctctctctgtctctctctctctctgtctccttcagtctctccggactccgcaacacaaaaccaacgcagcaattttcgtttacctttttaccctcctttctctctataattcagcttcctatttttactttggtaatttctgattttttttaattagttttctgaaaacaaaaaaatacaaaacatttaattttaatttacaacttaattacttctgtccaaaatgttaccaaagctggttgacaatatagtgaaaaaaattaagaacttacttgttacatttcttttagatgtaattttacatctaaatagtaaatgttgcaaaaagttaccaagctaaatcattcgcctgactgatggatgatgatatattgactaattttaattcattgtaatcaacattaagataacaaataaactttattctttatgctaaaaatcaacaccaagtatgtagcatatgagtacatgtgaatagcatacttctatatctctgttttgttatatttttgaatagaaatgtgaatagcatactatatctctgggatattccgtaccatcgacaatgatttcttgccgccaataaaagaacacgagcaaatctacaaatctgcaaatggttcataaaccggtttgatttatgcatcagaccataaaacttcgctcatgtccggtttagctctcggttctcgctttgtattgtcatggaaggtcatcatcattcaattcacaaagcaaattttattgataaactcacactacaagtacaaatgcataccaaaagttgatacatttatatatacgctcataagcaaactattagattatttttttgacacaatacataataaaagcattaatacatttaagtaatggtttataaattccttttgggactggctgatcccgtaaatacaagctgaacaaggagtatctctagaattgctcaaaaaccatggatttttatgttatccttcttcacaagcccagcctgatgattcaaaacatttctaagatcaggatagatacaatgcttccatcttttcactacaaaaccaacttcaaaaccaataaccgatagaacgaaaaaatgatgattacctgaacaaggaacgtagatacgttcttcctctgatcaccttgaagctgaataacctacaccaaagatattaagtcatttagcaactaaaagcaatccaaaatgtatcttgagagctatggtagctttcttgatacctgtcctaattcagagtcctggacgacggtgccattgcagcagaattctttcttaaggtctttaagtatcttgctatagctatactctttcttaagcccctggacagttgtcaagctttttctaccattacgctgctgaacacgaatgtgcacgtattcctttgttcccgccccagagtcctcagcatttgcatcagcgaacggatctttttatcaccaaaaaaaacacaaagcataagaagatcatataacagaagaagatactccattccaaaaacaagaatgctgtggaatcatctaataatcatcatattctcaacaaatttaaccgccaaatttcagaacaatccttaccaaaggcagtggggacttgaacttcaagatcagacatgaaccttaagttgatacaagggacagtaaatcgacaaggcctgagaacaaaaacagaatgttagaattacgagtccaaaaatgatttcaagttacataacgtaaaaaaaagtgacactggttatcctagcaatgtcttattcagataatcaaagattcatataacaaataataaagaaaccattttctgcaaaagtctccattgcgtaaacatatcacaagattccaaaatcaaaaatcaaaacaaaaaatatagtatctgtatctaaaattcgataccattttctacagaataaataacatatctagttttggagtcaatttcttctgaaagaaaaaacaatcaaacattatcattttgcgaagaaacaaaacccagagtatatattttgaaccaaaaagagctgcattcagatcagaaaataaaatgacctacaaatctctaaataaaaactttttcgaacaagcaaatcaacaggaaacaatcattcagcagaaagagagaaagtatcacctgatcaagaagagattagggtttcgagtatttgattgaaggaagaacggaaagaaaaatggaaaccctaaattcggacaaaggcaagcttctgtctgaaagaagaagaagaggaaattacgagaggaagagctacaaaatcgaacaagttttaattcgaaccaatattcttctttttttatattttaaatcggcaaataatagtcggcgagtcggcacggcatcgattccctcccactcatctagttgcgtctttatctggaaatacgtattgggccttaacaaagcccaaatatttgttacggcgtaacaaagcccaactaaatggagccgatggggagatgctgaaatcgccaagcagagaagcccaaattacaatcagttgttcccgcccgatcacctctttttcagttgttcccgcccgatcaactctctggaattacttagcctcaaaatcctcacaacaactcttctcttgtagctacatctactttgctcttccctctctgttgtctcgcgtttcctctgctgtctcgtgctctctttttcgttctgttttgttctttctttagtaattttttcagatagttttaagtctcttctgaagaagaattagggttttagggtttagaaaaaattctctaaatatatttggttttagatctaatttaagattcattcacaaaatagaaaacgtttgtttcttcgtcatcttcttcttcaacgttggatctgttagttatgttttttcagggaccacatctaaacttgtctctaacaaaaagtccggaacttatcaacaagattgaatcttacctcaacggacactgcacatgtcctcatcaacaaacagagaactcatcaaagagatcaactcttcctaagagccctgagaaactaaaagctatgaatttcccaatctccacgatcaggattggcggatgggtcgtcgttgccaaaaaccctgatgacattgtggccaaattctattttgcaaagaagaaacttatatgggagtttctcttcggagaaccagagactaacacgctgaggctgaaacgtaagatcgagattcaatggaatgatgtctcatcttttgaagagagtattagttcacgtgatgaaactggaatcctcaaaatcgaggtactaattaaagatacttatacattttgaaagttaggacctttgattaatgatctttgagaatgtttatgtgcagttgaaaaaacgtccaacattcttcatagagactaatccacaggcaggaaaacacactcaatggaaacaattggatcacgatttcaccggagatcatgcttctaattacaggtttcctgctttaacttggatcattttttgtttgctttttagtaacgttgaaagtgagtcaaagccttacaattactatataacaggagacatacacttcattttcctcccggagttctgcaaaagaacttggagaagcttgtaaccgacagcttctggtccaaactctatgaagtccctttcccggtacatgaatctcgttacttcgatagtggctttgaaaacaactcatctcgcaacagccacagccacacagttggctttaacgtcaacaatggccctcaacatcacttttctcaaggtactttaccttggaccttacgctaatcattttttttaattttttttgagcgagagacttaaaagaaagaagaaaaaaccattactttgataggaattggtggcgtgggagtgggagaaggaaactttagcatggctaacggtggatggcaaagaaactcatatagtccagtcaatagtctgaattataacactgctaatgagttctttggaatgcaagctaccccaccatcgtctcaagtggttaacgagcattataacacgcaaaacgatttcaccggttcacagtttggttatcacatgaaccaagacgagatccagaagatacttgagagtcaagcatatgcagtacctgatacacaaactaaattgatgtcttcagccatgaacaatgtcccaaagtatcctcaggctggatcgtgtctagaaagcatgttgttctggtatgaacatagaagaagatttcagcagtagacataattagggttttgttgagatatggatcaatgatgatggttctcttgagtcttgtaaataaagtgcagaaatcgcaactttaattacaagtctgttttcggttctactactatttgcttttattttttataattaggctggttcaagttgtgtctcgaacctgcggggatttagcttcaggcggtgtgctcagatcaatgcagcatttgttgtcatttatcttcaagagctagaacatgtttttctcctaacttagaatataccagagcattgtttgagctttgttgaacctcaaagtcaaaacatgagtctatatccacatacctatatttgatccatcataaaacttattgtgttagtctgtttctctcacaaatgcctttcttgacccccaaggtccacctcgattcagccactgttcaacatcatgcaagtctcttccccaaatctattgaaaagttggcaatggtcgtcgacaaaattgttacctcatcgaccaaatccaaccttttcctttgtagtaaaacttacttcgtttgacatgaatactgagttgcacaccacaagtttgacaattttaccaactgacatttttttagttttaggatttttttttaataataaagtaaaagctgatgtgactatctggaggctgacgtgtacataatagagaaacatatttaagaaaataacctttagctaccatagcattaaatcctcaaacaaaaaacagtaggttcctagctctatcttctctcctctttcttttctctctcgaaaggaaacaaatctctcgccgtccggtgtaaatccggcattttccgtttacatagtggtggtggtcggctctcgtctagcactgactggcttcttcagcagcggtggctagctcctgcctcacatcaatcgactattgtagcggtgatggtcatttttcaagtttcagtgttaaatttgttttatttttagtgaaaattagtattatttttttaaaaggagtgtaagtgttaaatctatattacgtcaaaaccatgccgaacttcgaaaaccaccttagtttcctaacatcagacatgatactcctacttcaaaaaaaaaaaaactcccgaagcaacttatctttcaaaaaaggttgaggcattttgcaggaaaacatttgtatatcttaggtgtagatttttcttttttgatgcgcctgagttatatataatcgacaaggaacaagttttagaagagatacaaagataacaactaaagaagtaagagataaagcctcccaaaccacaactctaaaaattcttccctactagcagtcgaataacacttccatagaacagtttaatgctgaaaaaaggcaaatgagaggagcctcgaggagataactaaatcgagcttagagtagactacataaacaccctttttctcctacttttaattatcatcccatacctttttatacttttggtttgttgtttttggcattgatggtatgggctaaaagtagaaaatgggcccaataaaagatatcaataccggtggcccattagcgggtttatgtcctatctacccaagtcccaaggcgctgcagccaagaaatgcgggacgatggtgatgctcggtgtgctccagcttccctgccgcctccatcactctctcttttactcctcttcccaaattgcttcttctcgccctcaaggtcaatatctctctgtctctttagtttctgcgaaactatctcttatttacttgaaaattgaaaatattcaggtgttgctaaagtggttctgaaaaaaggcaagacacagctcttcaaagacggaagtccaatggtgtacagtggagctgtcgacaggatcatcggaaaaccacctcctcagacaggagatgttgtcattgtagctgatggcactgagaatcccattggttggggtttgtataactctgtttctatgttctgtgttcgccttatgcagcttcaacacgaatccaccaggtttccatttctacacttttcctgtttgattcttttttcaaaattgaatctttgattgatcttcttggctcgcttgtggtagagatccttcttgtgcattgaacattgagaagcttctccaaacaagaatcgctgaagcagttcagttgcgaaagagtttggcacttccctcggctaatactaatgcttatcgtcttgtcaacagtgaaggagataggtatttcgctgactgatcccgtcattttttttttgttttaaactcattttcttacattttctctggtcctgtcttattgctctgctgcagattgtctggattgattgtggatgtgtttggagatatagctgtggtagcatcctctgctgcttggcttgaaaagtacaggattgaagtggagagttgcttaagatcaattgacggaattaatcatataaactggagaccttctcttgatgttcttaaagaagatggttttgacatctcaagtctgaaacagacacaatcatctactctcccacagagatcaatggtacggtgtgtggtgcccttaatcaggtctttctctcttcttcagatatcttcatgaatatggcaacattacaggggtgagagctgagtaatgtttcttataccaggttgtggaaaatgggatctcatacgcaatttcgctagagggacagaagacagggttctacacggatcagcgcgaaaaccgtcacttcatatcaaccatctctgctggtaaaagagttcttgatctttgctgctatagtggtggatttgcactgaatgcagcgagaggaggtgctaccagtgttatcggtacatttcatctctctcctccttctgatccaccttatgcattgtctagtgaatcgtctgatcaaaacactttcaggaattgattcatctttacctgctttggagctcgccagagagaatgtaatcctcaacaatatggatccagagaaggttgttttctttaaacaagattcaacagaattcatgaagggtgcactgtcaagagaagagacatgggacatcgtgatcctagaccctcctaagctagctccgcggaaaaaggtggcgtagagtacctttctttcgtttcttgaaaatagtgattgtcatagtttgttgttacataaatgagattgcatcaatgtgggttgccaggttttgcacaacgcttcaggaatgtacagaaatctcaactcgttggcaatgcgattgacaaggagtggcggtcttatgatgacatgctcatgttcaggggcaatgacacagagcgggaagttcttggggatacttcagagtgctgcagcaatgtcaggaaggaagatcacagtggtgcgggaggcaggagctgcgtctgaccacccactcgacccatcttaccctcaaggccaatatctctccaaccttctgcttcgggtgctgtgagcgcacggaagtttggtttgttagttcaacttttttttgtccgtagtttgtaaccatacatagaagacttataaaaggcagatttggggacaaaagtaatatattagactggtttggaacaacaacaacaaagtattatgtgggatttaagctctcaccgaagaaaccattttgcaagcaaggattacatagtatgtaagcaaaaattacattgtatgtgtacatggatggataagatttacacacgcagattagagctctctctctccctttccaagcttgttaccgacctccaggatttctattccatgacaagtaggacggatctccaagacgcctgaaacaatgtacacatttgttactcagcataacacactgcggctatatgtacacgaatattttattattattatattgggatatataagacagtttaacaaccaaaacaaccagggtttagccgaaatacaagtcttgcatagaaggttaccatcacgacaacaactacatttgaaggatttgcgtacctgggtttcacaaggtacatgatggtaaatgcgagggccaaaatgaaacagatcccgccaactgtcaggtaagcaatgccaaggaaatcgttcttcccacccagccaactagtggttgacaaaacaagcttcttctttccattgaagctgtacgtgttgtagttgttgttcagcttaacgtgtatggtgtcacccatctcgaggtcagactctatctttccgtaaagttttctaaatgttggcaatgctgcggttctcatccacacaatgagatcttcttgttcactaagctgcacatatgaaaagaggaagaaagatgtcagcggtcaatatgctaagcagcatccatgtgatgtcaatggcaaaatggactgatctccagtattgaagggtttaccggtattcttggatctaaagtagcaccacctgtgatattccccttttgaaaattcttggggaagaccttgttcccaaacttgtgttccttgtcactcttccatgcaatgccttttttgttcacagctaggcttacattgtttcttgataacgcgtatgtgtcgttaaaaagactccaagcaattagaccacacggcacaatcggctgcccaccaacatcatcctcaggcttgcatgcacttatttgattctcgtattttgtacttctcaactgtgaatcacttcgactttttacatacctgtttcaaagacaccatcgacgcattagagctataaaatcttgactaatctaagttagatacacacatcagtcctagttcccgcctactccatgatatcggtgttgatttccacatagaacccacattgttcattataggtctaatacaaaattatataatgctacggcgtagttgctaacaagtgttatataccttcggtgattctggtagaaattctcaagttggtaataaacatagataggttgcttcatacgctttgtcacctatgaatgccagtggagaaaaagagaaagtaaacaacaaatgcaaaaatctatcaaatctcaaagaacaaaacaaacgtggcggcagaagtaactcactttaagatcccggttacaaactttatctccatctccttgaatatatgcaaccttgttagtcctagcaggtgccggaatgcactcagtatcataccgatcaacgatctccacaacctaaacatgggagatgaaacacgtgagatatggaagagaatctgatgagtagcagcaatgctttagtaactacttacatcctgggaagcgaaaagggagataactccaaggggaataaagataacactgactatcaaaaatgtcgaaatgacctgcacaacagcacaaacatgtaaaaaaaggagcttttagttgcgccttgtacagaaatcagatgtctcaaacatcaatagagattagaaagaaatctaacccaaccaggggttagaattggcttgcaagctggaagctcctgctgtgtgaacttcgaatctgcaaaagatatttgccaacaaaatcacaccttttagccatagctttgaccatggttccctaaccatctttgtaacgacaattttgcaaagaatttgagctaatccaaagctgttaacaaattgttattgaaaaactagcaagtccagagagaatttgatccaattcgaataagacagaagagtcaacgataagccataatgaataatcggaagaagatagcgaagggaagatgataaatacacttgggtcgctttgaattcttcctagcggcggaagaatctcccgatccggctgcccccgcgctggacgacgccgtattggaactcatggcggagaaaacgacgattactaagccaagccttgaggggattattccggaatctaaggagaccgagatcggaggaaaaggtgaatcggacagagagaaatcgggaagagaaagtaaaatgaagaggaagaagaagaacaaggggaagacgaagattcgtcgtcgttaacagaaagaaccggtattattcccatattgacgtcaaaatgaaaggcccactttgtgggctttataatgggctttactctattttgttgagttgaagcccaaaatctcccatgcatcataaaatgtttttaagttctacaaattttttgatttggaacgtttttccttcaaatattggatacagtaaaacctctataaattaataatgttcggactgcaaaattttattaatttagaggggttttaatttatcgataatttaatatttattaattaatagaaaatttttcctaatttagtaacttttcaaaaatttgtataagattttttttcattatagaaaatatctttcaagaatcaattacaagtaaaaaataatatcatatttagaaaataacaccaaaagtttttgatatagtaaaatactaaaactatatttcaaataaggataaatacaaatttaagcaaacaaatattagaattatatttcaaagaaatttcttacatataatgtatatatataattgatacatttaaataattattaatttatgatattgatgagaccatatatttatataggattttcaaaaaaattattatcttattaatttatcgatttgtgtcactttttatactgatcccaactcggaaccaaaaacatttcttaatttatagagattattaatttatcgagtattaatttatagaggttttactagagtttatactttagaggatgggattatgatcagtgttaattgatgaatacaaaatttaaaaagtttagtatgttttattgcaagtttatgcatatacgatcatgttgaatttcaaacgaacaaattattatcttattatatgtttggatttgaaactgcaatatatatatatatatatatatatatattttaaagattcatttatagtaagattgttttagggatagtataataagaatgattaaataatcttgcatttgagagagatcaatgtatgacctagacaaaaacgatgattcgtcttcaagtgaaaactattagaccactatcacttggttaaattaaattaaaagtatcataaactagagatttcttcatgataatgttgtttgtatcttccaaatcaatcacaaactatatatagtatcataaactcgagatgtctttaatcattgtcttgtaattctcatcttttttaataaagaatttattttgtttgtagtgaaatttgtctcgatttttctctcttctttgttttcagcttcttttcttgagaattttttctttattcattcagattttaaaacttttgtttcatattcataacacatatatatagttaaataagatattgatccgcagtcggacatatataatccgaaaagttttccaaatttgcgttgccatgacgcccatgccagattttaagtctacaagtatgcaaaccaataagtaatgtcgatcgattacacaatttttacttccgttttccctcctatatatgacaaaaccaaccaactctagtgattaagtaccatacacacctaatgataaaaattaaaataaaataatgcaatttctttttgtggtagaaaaaataattccacaaacctcctcaccctttttcaccagtcaaactaattcataagcaaaaaacaagtaaaaaaaaaaatactatatatgaagtacccgagtatatttaaataagttgagaaaagaagtactagatgatagtatgagatatggatttatcaaagggaagcggggaaagtggcggaagaagagaagatttcgtcaagtgtcccgttcatagagtctctgcattgaaagtcttgttggattgacataatctctgcttcgttcatagaaagttgagggaaatcttggagttgaagaggaggatgatatggaagctgatgagaatagtttgagaaaagatgatcatgatcgtccagaagagaagatgagaaatgaagagcaaatatggatgagctgtttgcttcgtctaaaaggaccccttgagttagctctgatgaagatgtctccgcggatgctcttttcaagctctcgtcttcaatataattaccatcacattttctccacttcttctccttttcttcttcctcttcttttcctacactagtgctctcttcttctgcttcttcttcttccccttttctctttggaatttgtatgttcttcttaaacactcggcacaatgcatacgactcctgttttagatcaacattaatattagtcgatatggtttatcaaaaaaaaaaaaattagatcagaaatgaatatagatatatatgttaatagaagtttgtgcatgggaaataatttaccttcaaggaggaggaaggagcgtgcgtgagacgatattcatgcatgacccaattagtacgaaggccatgaggagcccttcctctataataaaccagtgtcttcttcattcccatcttcatcttctttgattctactgtacgatctttccccgtggccttccagtaacccgctcgggtcgcacggttcgtcctagagccatttggatacttcttatcccttgtgctgtaaaagtaccattccatgtcgtttcccggcaaaaatgacttttctgttccgcgtattatccaaataaataactcataaaacctccaatatcatatgtatgaatgcatcatgaccaatatatgtaatctataacgtcagattgacataaacaagctgaaccatatatagagagagatataaagagttggatcgtaccaggcaagtcccatggctcgcatttataaagatcaacttctgggatgatctcgagctcaatggcttggccgttgaccttcctatcaagatagtaagccaccagttcttcatcagtgggatgaaacctgaatcctggaggcaaactcatgggcgccattcaaagtgtatgcgttagaaaacgagagagaaagagatgagagagattaattaaagtgattaggatgttcgtacgacatatgaaggtgactatatataattaaaaagatgagactctgaagaagatatgatatgggaatgtgtaaaagtatgccatgggattggcatcttctgagattaatattttgtcttactttgggttgctttttggtcagtgtttgtcatgatactcatcacacatattttctaaaaccaatatatatattttaaataaaaacctaactctggcttttgaagattctgcaagtgtgaaaaccctagtaggaggagagacggaaaaagctttagcaagaaggccccatctcacaaatactcacatatatgaatgtatatgcttataattccggttagaccttaacgtgggtcatgaatcattatagagggatttttataacgtttgctttaaaccaaaaatgaaggctttttatgattcaacagtttaggggacccatctcttcttctcaaaccaaatctacctggcgacacctaaacactcggctttttcttttctttttttttcggtttgacagttttgttatattgttttatgttgttatggtcttataataagaatacttataaattgaattcatatatatgattaaaaaatgggagaataaaaaagcaggaggcatccaagtcgactttggctttagtgttgggaggcttctttagtcccttttacatatggattaaagacgttgttcggctcttttacatcattactcccacacaatctttgactctctttctctcggcccttcaattttactaacttccggtcaaatctcttttgcctcgactctcggcctcgatccaaaagataaattaaaaaaataaggacatcttcattcttcacatgtatgatatatataactcatgtcatatattagatgtctcgtttacatggttttttttcgtttgctaatatatataattcacatgtagacgaagaacattgtaaacggaatttaacagaatgaagtaatcaaacgttttatgtaaggaaatgatcaaatactgagggagtccacaagttgcgacatatataaaactcctccattcttataaagtataatattcaaacttcaagtaagtaactctcccttttccgtgagaaagaaataacaataacattttagggaagctttaagatgtggtcaccaataacttagggagagagagagagagtgacagatacaaaaaacaaaagatagcaactgaaaaatattttggcgaaagatgctttaacagtttaacttatcaaacgacaacaacaagacatgccccaattgtttcaccactttgtttttcttggtcacaaatcgagtctaagtctatatgaacaagtaattaatgtgagtactatatataaaaaaaaatgtgactatatatataaatgttgtatcacaaatgcaaaaggaatgtggattaattaattaataaagacaacgaggaagctaacatgcaagcctaactaaagacatgcaacctttgatacgatctaaggggaagcgaataaagctaattaagatctaagcatcttatcttatcaacccttttatatttccatttcacatgtatcaagtacctatactctttctcaagcttatagtattgatatctagagtatcaaataaacattaattaattagacgtaacacaatagtgacattattaaatgaatagtaaacaaactttacgtgtatatatatccatgacgaaattggcaaaggcgggactctatgggggaatcatgataatacatacatacgatatacatgttgacatgtatcatgtatcatgataatacatacatcatcccttttttgttggtttgttaataaaatgatcatacatcatcttaaacatcaacatcaatcacaattcttctaaaagagaagaagagtcttgttcagaaaaagtagcatctgattccctacatgtcggtttccaaaacatattttttttccatctcatattagtttgtgctaaacaaactgatccaaggaaaaaagaaaagcctttaaataatacaagttggaatccctgtgtctctagagattcttgctttcatgttttttcacgcatctcaattatagcagaagaacaatgtcactgtccaaaaacatttgcgttatttgccttttgcttttctccatgcattaaatctcatttctacccttgttaaagtggtcacactcattactctttttaatatactaatcctacaggaccacctcgtgattgttatctcaaattttgattaattattcaatcaattagccaaagcagatcttcttcaattttaagattttgatgattactgttaaagctgactatcactgcggggaattcaaagatgatgctagtatacaaaaagagaagcatggtttcaaattgcagaatcaggcccatatataagtgggcttgattatttgggcttttggaagagtgtggcccaacatagagatatagagctgttatcgtctgtctttcatggcggagcagaggtgatcgtttcactattcaatttcactcgtcgatcattaccaacctctgcgggcaaagatggaattcgagaagatcaaggtgatcaatcccgttgttgaaatggatggtaagtgttcgaacagtcaattagctcaaatctatgattacgattatgggtttctcgttactctgattgattgatttgcttatattggagtatatgtgatcggctctgttccgggtttttcttttcttctatatgttatagttttatgaaataaattcagaaacttgactctttatttattctctgtgcacaagcaggagacgaaatgactcgagttatctggaaattcatcaaagacaaggtaaaaatcttaacttttttttaaatctttaatcacagattgaattctttttgtgattaaaatcttgagaattttgcagcttattttccctttcctggagctggatatcaaatactttgatcttggactgcctaaccgcgatttcactgatgataaggttactatagagactgctgaagctactttaaagtatgtcgtctttacattttatacttagatatcatattctccatgctttctgcttctagtgttgaggttgttctgtgaataaagcttgttcatggctattggtttcagaatatattgtctgccttaaagtttttttcttttcttttcttgtgtgaaggtataatgtggctattaagtgtgcgacgattactccgggtatgtattcttaaacctttgcaatttttaatttaaaagtgtgcttctttcacttactaacaacagtttttgctttcaacgacagatgaagctcgtgttagggagttcggcttaaagaaaatgtggaggagtcctaatggaactataaggaacattttaaacggtcagtttcttcgccaaaaaagggggcaattccttcttcaattcctaagctctaagatcatgttgttatttttatgcaggcacagttttcagggaacctatcatttgcagaaacatccctcgtcttgttccaggtttgtcaatggctgctctttttgtatgagttagccattttctgtacctttaacatgtagagcaaaacaaatccctctgatttcatttcctcaggatggacgaagccaatctgtattggaaggcatgcttttggtgatcagtatagagccactgatctcattgtcaatgaaccaggaaaactgaaactagtttttggtaatctcctcctcccgttctggatctgtctaacccttcaattaaattgttcattatagagaataatgggggatcattgtcattgaattcacctacctgtggaagtttatttatacacgttaaaaatcatatcttacatatgcagagccaagtggatcttctcagaaaacagaattcgaagtcttcaatttcaccggtggaggtgttgctttagccatgtataacactgatgaggtagatattattgaaatagtcctctccttcatgtctgcactatctgaatacacttacagagtatctattgatatggtggtccgatttcatttttgaacagtctattcgtgcatttgctgagtcctcgatgtacacagcttaccagaaaaagtggccactttacctctccacaaaaaacaccatcctcaaaatatatgatggaaggtgtgaattcactggcctttatactttcttgttagagtctcaccgaaatcatttcaccatctagtcatactgccctgatattaccttttcatcttgttttcagattcaaggatatattccaagaagtttatgaagctaactggagatccaagtatgaagcagcagggatatggtgagatgtgcatgttattagcgacattctattacagtacaccatgcaaacttgtaaacaaagttaatgaaatccaggtatgagcatcgtttgatagatgatatggttgcatatgccatgaaaagtgaagggggttacgtctgggcatgcaagaattacgatggagatgtacagagcgatttcttagcccaaggtttttcctcttaaatttgagatctgtctagggactgaaaccttaattctgccaaatgcattttggtcttgtatcatggttctttgttctttacttgtgatctaaatggggacagaaacttcaattttatttctccttatgaaacaaagtttctgctctccgctgcaggatatggatctctgggaatgatgacttcggtgttggtatgaaatgacgcgggcctcagccaaagtttttggtctttatcatgataacatgtttcctgcgcatcattatattttatgtattaaatttgagatatattacaggtttgtccagatggaaagaccattgaagcagaagcagctcatggcacagttacacgccactacagagttcaccagaaaggtggtgaaacaagcaccaacagcatagcctctatttttgcttggtccagaggccttgcccacaggtaacgcatttccactgtctttaaacattttcatacttggtaattcgtgttgctactctggagaaaatccagtcccttgcttcaataatgagttagtctatcagggattgtttgtggtaagatttgtcattacttgtctctttataattgatcactgaactatgtgaaccgttttacctttggcataaattgagtttaaagtctctgaaaactggttgagttcatcttaacaagatgtttggtatgtgatggtaccagggcaaagctggacagcaatgccgcactcttgagctatactgagaaactagaagcagcttgcatggggacggtggagtctggcaaaatgaccaaggatctagctcttctgatccacggagccaagtaagactaaaacttgagagaaagttgatgaggttgatgcacttaataaaaaatgtttaaagataagtttttgtctactatttgaacagggttaggagggatcagtatgtgaatacggaagagttcattgatgcggtggcatgggagttaaaaagaagattgttaggcaacaactccaggttgtgagaagaaagaatggaaatctgaaaagcaaagagtctcagcagcgtgatgtttgatttgatgctctttcataggtgtagaacttaaagcctgaaaaggggctattgcatgaataaaaggagatagactaattgggtaatttattgaggaactcagatttcccaaagccgagactcactcctcattgattcgttaaaaattgaatctttttagcccttctttctctgtataatctctgttgtaaaagctaccaatcaacagaaatggctacgttctcgttgtcattatcttctctttccctttgtattatttatctggcaaagaaatgaatggttgagctttagttataagtgttccctcttgctccctcaagttgctatggctatgtgggattagtaagaagacgacggaggatgattttgatgataacagctcccgtttgtcctcctcaccttctcctacgccattcttctttgcttcgccatgaatcatcgatcggaaactttcatcggaagaaaaatccacgtttcagaaccgtatcatgttcttctttgttgccgcaaccgtcggttcgtccggataaggcatcggagttgaagactctgtggaagaaattctacaaagtcgcgtcgccttattggttttccgaggacaaagaccaagccaggcttcgtctcgccgccgtcttcgcccttactctcgccaccaccggcattagcgtcggcttcaatttcctcggccgtgatttctacaattctctcgccagtacgaattcttcaactctctctctcatttctcacttttcaaaaacaacttgctctgttgatcctcttttctctgtgttcaatagacaaagaccaagagcaattcaccaagcagttgttctattacctctgtgctttcgccggcggcattccggtgagttttcctcacgctcctccctctgtatccaatctcaatgaatgatgttgttcactttccctggattttgcagttctttgtgctacgagattatacaaaagagactttatcactgagatggagatcatggatgaccaaatattacctgcagcgctatctcaaagatcaaaccttttacaagatccagtctcagtctatcatcgacaatcctgatcagcgccttgttgacgatttgagttccttcactggaactgccttgtctttctctttgacgcttgttaatgccaccattgatctcatctcttttagcaacatcctcttcaccatttatcctcctctctttctcgttctcttgctctactcctttggcggtacagccatcagtgtctttcttggcaaggtacaacaatgcctcgttaagcagtgtgattgtctctattctgttccgcttcagattttggctttgttgcattaacattccctcttgtgttcagggactagtgaatctcaactttctacaagagaagaaagaggctgactttcgttacagccttgtacgagtgagggaaaatgctgaatctattgctttctatggaggcgaacagaatgaaatgcagcttctgcttcagcgtttcagaagcgcttttgataatttaactgtaaaatttctcgagctttcttatccatttatatatatatctatagattgcacaataaattacattcaattttttcacctgcaggaattgctgatagcatctagaaacctagaattcttcaccgatggatatcgctacctcattcagattcttccagttgctgttgttgccccaatgtatttctccgggaagattgagtttggtgtcattaaccagtcagtgtctgcattcaatcatatcctaggagacttctcgctcgttgtctatcagtttcaagctatcagctctttttctgctgtcattgatcgactaggtagattaattatgtattctgcactctcttttaatgttctatatatatactacttgttgcttacagatcacacaagaccttagatcaataccgaacaacattagacgcagaatatgcacatcaccataatttctgttacctgatggtgagaaatagatattttagtagtagggttttgtttagaatatcgaagagtagaagttgcagtgtgtcgctgtagttagttattttcttgtgttataacagtatagagtgtggtgtatagtaggattttgataagaatatatagataatagttagactgtatagtagtaagattttgtttataatatctaagagtgaatacccggaaaaaaatgcgggtgtaaccgttgagagtgtgatgggcagacaaaaagatcgagtcagctgttcactttcctgcttaaaattgggtctaaattatgtcttatgtacaacatattcacaaagtttcattgtttctgcaaatcaacttctacggctaaatgaaaaactgcatttgctgtaggttgggattctccttttacgcatctaacaatatcaagacttcttccaacacaggtgaatttgatgatcttttggataacaacatcttcagagatccatctgacactgtggacgagattgagctgacatatcagagtgagatgaactcttcactgctggacaccaatggttcaatcaagtcccaaccgaaccaaaagcgtctggagatcgaggagcttactcttcagacaccaacaaacggaaccacattggttcacaacttatctgcagatgtatatgacaaggatcacctactggttagttcactttgactacttgtgtttaaagcatgtgactggtagattggaagttacttaaaaatgccatttaacagataatgggtcctagtgggagtggaaaaacttcgctgctaagagcaatggctggtctttggaggtcagggaaaggaaaaatcacgttctacctcgatcctgaggtagattttacacaggagaaatctgatactcaggaaaattcagggaaaagaggagacgtattgttccttccacaaaggccttatatggttctgggatctttgcgtcagcaattgctttatcctacctggagtgcaactgtggaggagacgacacctggtggcagtaatattgacggtactcagtttaaatttgtgtctagtaacaaccatttctttcaactccatttaagtttatgcaagcagattatagaacccaaaagcaaatcgactgaagaaaaaatgcgttgattttgttaggttcaccacctctgctgattagagaggacggaaatgaaaagccgacaacagatgatctgatgcggactctagagaaggtttgtcttggacatatagcggatcgctttggtggtcttgattcgatacacgagtggtccagtgttctctcacttggtgagcagcagcgccttgcctttgcacggttattgctgtctcagccaaagctggcgctcctggatgaatccaccagtgcgttggatgaagctaatgaggtacttgttggttctcctctcatctatcatttagaataatatcatgtacatgtagcgttgagccattaaaattcctcttgatgcccaggcgttcctgtaccagcaaatccagtcggctggcattacatatataagcattggccaccgccggactttaacgaaattccataacaagatcttacaaatctcaacggcagacccgaagagcaatgaacgtaactggcgaatagaggacgtggatgcccaagattctttgtacggtagattgaatcaaaaggaggtgccaagtgaaagctgatcaaaacctgattgattacataagagacagaagcagcaggtaaatctgcaaacgggtgtcatgaaacatataagaaacatgtttggtgtccattttgtatataatctaccagacttgacgttgactgaagatgcaagtaaatagagagattgatacagatacgagtgcaacgaagttctgattaaaaataacacgcgagatgagctaaaaattcaaaaccggctgagtatttatcataagcccaataaatctaacgatgggcccatttgagaaagcctgatagagtgagaaaatgtaacacgactgactcgactcagtcgctcaaagtcgaaaaagaaagaaggcgcaaggaggatggtgacgaaagaatccattgaagtgatagctcagagcattggactctccactctttctccggacgtctcagccgctcttgctcccgatgtcgagtatcgcgtccgagaggtcatgcaggtatatcatcaacttcaactttacttttgccctctaatctcctctttaacttgtcgtcgcaatctccaggaagctatcaaatgcatgcgtcatgctcgacgcaccactttaatggctcatgatgtcgattctgctcttcatttcaggaatttggaggtttcctcttcctctcttcttcttttatttcataccgttgaccctgattttgacttttttttgtatagcctacctctggctccaaaagtatgcggttcaagagagctcctgagaacagagatctatacttcttcgatgacaaagatgtcgagctcaagaatgtaagcttcattgattggccatgaatgaagaagatggtgaaatgttgtttattgttattaagcttcccttcatggtctcttgtgcaggttatcgaagctcctctaccaaatgcacctcctgatgcatctgttttctcattggttggcaattgatggtattcaaccttccattccacagaattctcctctccaaggtatttcttttgtcttcttttgcatcacctactacttctccttctaatccctcttccatgacaatttgtagccatatctgaccttaaacgatcggaatataaggacgatggcttggctgctagacaggtgctttctaaggaccttcaggttattttactcccttctttttttgggtctttacctcgctctttgaatgctatataatccttgcttgctctcgatgcagatttactttgacaaagtcacggagtgggctttgactcaatctggctccaccctctttagacaagcactcgccagcttggaaattgatcctggactccacccattagttccctttttcacttctttcatcgctgaagaggtttgtctttgtaatccaacacttctagtcttgacttttattctaacttgaccacattttcactactttttttgtgcttgcaatttctccagattgtcaaaaacatggataattatccaatcttgttggctttgatgcgtcttgctagaagcctccttcataaccctcatgtacatattgagccatatgtaagttttgtgcgcacactttttttttgtttttttttgtttctcttctcccttctcctccttctgttgacttttaacttgttgtattctgttcagctgcatcagttgatgccgtctattatcacttgccttattgccaagcgcttaggaagaaggtcatctgataatcactgggacttgagaaacttcactgccagcacagttgcttcaacgtgcaaaaggttaatgttacattcttgctttgtgatttcatgcatcttatacaaccatataacttgcaatcacattagtgaactttttacaggtttggacacgtttatcacaatttgttgccacgtgtcacaagatcactgcttcatacctttttggacccaaccaaggcactcccacaacactatggggcaattcaagggatggtagcccttgggcttaatatggtacttcctcttgatgcttcttgattatcataacgaagagtagcactttaggttgtgcgtctagaatttttacataagaaagcataagtttaaaactaatagtagcatgatccgacatcctcgataaagttattaaacctgcaattgaaccttaagatatatatcctttggtcgtccgtaagtattttcttgctttatacctttgtctaggttcgctttcttgttctcccaaacctagggccgtatttgctgcttcttttacctgaaatgggacttgagaagcagaaggaagaagctaagaggcatggggcttggcttgtttatggagcgttgatggtgagtatgctttctagtttgatacagaaattagaaaacttgtttgctttcaatctcgtgttgcaaaacaggcaggagagcatataaactttaactttccataggtggcagctggtcgatgcctatatgaacggcttaaaacatctgagacactgctgtctcctccaactagctctgtctggaagacaaatggaaagctcaccagccccaggcaaagtataaaatctggtctcattctttttttttcttttggcgttctaaacacggagatacgcgttcttaaataatttttttcttcggccaaggtaaacgcaaagcaagcagtgacaacttaactcatcaaccaccactgaagaagatagcagtagggggaattatacaaatgagctccacacaaatgcagatgcgcggaaccacaacagtccctcaacagtcccacacagatgcagatgcacggcaccacaatagtccctcaacaattgctccgaagacttcagctgctgcaggcactgacgtcgacaactatctctttcctctttttgagtattttggtgagagcatgcttatgttcacccccacacatgagctcagtttcttcttgtaatagattattgacatggtaattgtatgtaccacaataaatacatctatataatatttcgaaatgtcttggaaatcgtcaactttatagtgggcattttgcgagaggtaaaatcaaccagtgttaatcttacatagacatatgtgtactctaattatagcttggcctggaccacaaatacacatcttttccatgctactccccatctccatctccatctccactattagttgtgaagaacggagtcagaaagtttttgtccaacgcggtgaatgatgtagtgctgcaaagttttgtcaagtgagtcccaaaaaattgcaaatatcgctttttactcaggaaaacatactaagccattctcttattcttacgttttgtgaaactccttcagcttcatcttgaacctgcttcctgatgatgatgtatcctcgtcagatgaagctccaatgctaaaaggaggagggacatactgatgatcgctctcttcaaagccctaaccacgtatctgggagcgttagaaaaagtacatacacaactttacttcaaagatattagagtagatcgtcgagagtttacttcagacatggagtcatcaagatcgtcacctacaacttccaaagcttccaacattttacctgtcgaacctcctattagtaaaacctgaaatattactgcaatggataagaaacgcagcctatgtattattctccaactctcgctgattcttatgtatactaccactggaaataacatagatgcttttcatggagagaatacgaaagttaccgtgacaacaacaatagttgtggttgcagtaaagatgatttggccgtgaccctctggtagatcatgaagtgattgaagtgcaagtgcaaatgccattgcccctcgaagtcctatcgatgtgccaatatgtgtacaagttttaatagtttgtagatataaaaatgggcatcaggagacaagaacaaaagctattagctcaactcaccactataccaaagggctttttggtgcttcataggtatcttctggttctcctgtctaaataggttgaccaaatatgcacacccaaatacattgacagccctgcgtgagaaaagcattgcagaacatataggtaaatccgaatcgaaaaccatggtgataatgaagcgatcagccaggataaaaaagcatttagtcacctagccacgccaataaacaactgatgtcagtcatgaaacgcagaagcaaaaggtaaagtcaaggatttacaacactgactaacactgcatacaatcactgacgatcagtaaatgaggatacaatagagaaaaggataaacccaacatgggaccagctatgctgctccatggcaatatcaaatcccatgtaaatgaacctagaaaagcattaaacaaatcaatatcaatctaatagaactttaagcgtagaaattgttatccaacaatggatgttattgctctggactcacgtgaaagtttctgctagcgaagatatcaagtgaaaaaaagaagatacgaaactctgtgaagcttctgagagatttgagaaagtgtagcgcttcataacctacagtagcactatattaggcagcctaaatatgtctttccaagatattaacatcaactaagatgtaaaagctacaatgactcggcgattacaattcctgtgaagagtatagaaacaatgccggagagaccaacaccttctgcaagcatgtatcttacagaataaccagaatacattagggggaagaagtgttgtcataaatacgaagagacaggaggagagttgttttgtctacttacgaaaaatacgggaaaagtacaaagagacaacactccaagttctgaagactgaggtagagaaaagagaaaacagagacattacatttacaatatgttcagagagtattaacaatgtaaatacaacagtatagaaagagttaagaaaagatatggcacttacttctcggtgtccaatcctgcatacttaaagaggtgttctgagttaagattttacaatacatttttggccatgtgacatctaataagaaaaatagaggattcgaggaaggatattaaagctgaagtgaatccaaccccaacccctgcagaataatattaagactgttagtatgtttaagcaatatatgaagtcgatgaaggaatcggttagaagctattggcagaactatttattctgggagaaaagaaaacgaagaaaataacaggtcttatatatatagaaaaaaatcaggtcttatatatgtagatgtatatgtgactgtgaaggactttaaaagaaaaagattccctgattcaaagggtaactaatacgaccgtttcagttcaagttaattattgcttattttggttctatgaatcttcacaaagaaacctagtcgactagtcttttgttcattgtttagataatagtgcgtctagtttggtaggagggactttgatgagactaatattgttataaaaactgtgatgaaggatcaagaaggaataagagcaaacagacctgcagacattgagccagcaaaagtctcaaaaaacctgatcaccaccatgaaaaaatgttccccagacgaggactggcggtttactaaggacattgttctgcatcgaaagtttttatattgtactttaatactttgcttaaaaggtatctaaaaggaaaagaatcatgtgatatacagacctgtacaatgatattgccatctacgaggcgcaccacatacacgaaaacccatttgatggagttagtgagtgttgtggtttttcgtttgcatatatacttaaaaggaagagcccaatatcgcagcagataataaaaactcacagcatcattcagaactgattctccaaagaccaaagcatacaggttaacatcggtgcccacatcctgccatcaaataaatgttcatcacaatgcaaggcatcattttagggaaaatacatgcgaatacttgtatcctgtggaaactgatagtaaaaggaaaagcagaagcacctggaatatagagagtacagtgacagggtccgtagctgatataagtgcaccaaacataagacactcaacaaagggaagtttatacatgagatacatagagccgccaagataactgcaaaaaaggcgggaaaaacagataaggtagaagcaaaacaaagaagctaagaaagaagagggtgatgatccctacaccagaccaccagtaacaactgaagcgacaaaagttccgatgatagcaaaggtaacaatggctccaaagttagaaaagaatggtttctgcatccatacaaaaatgatcttagctactgttcaagtcagctattgtggaagaaagaaagataagcacttacaggttgaagactgaaacctgactgggttcaaacaaatgaatgatgtcaaggaaaatgacatccattatacatagcatagcagcagcgaatttgaaggatgaaatgcagatattgaagcaaaggatataatatgatgggaggcaacaaaaacaagaagaagaactcttcgtggaaattaaaccacgtcctgatacagagtagaaagaacaaaccagtgagcgaggaaacgataaaagggaaaactcagggatacttggaggagggcaaaacctaatgctagtctcagtatcggagatattagcaagtataccgacgattaaacctgaaaattacgacggaagaagaagctagggataagagaaatcaaagagagagagagcaaaagccaaaggaagagagaaaggattataccaatgagaagcgaaccgctggcttcaggaagatagtggaatcgatgacggcggaggacatggccgagaacgaaggaaagcacgagcatcataatctgaagcagtataccaacgccggccgcttgctgctgcttaacctggccctgagggtcgtgctccaccggagaaatcatcacttcctccattcagatttgagattggaccacccaacgaccttgagagttgagactttggggaacaagagtcaaaccgcaaatacgccgtcgttttatcgtcaccatgtctctctgtgtgtttaagaggatttttgagtttttactggtacacggatatgaatcacaggacaaccaacatacaatgtaacatcttgaaatcaatagacgagagtgaaaccaatgtccaccaaactgagcattatacaacattattagaccagtagataataacataatcacagttaatttttcttataagcaatagcttaaataatgcataggttcttcaggccggctgcagtatgtagtaagattatctacttattggtctgaatgcgttaaactaaattaatctaataattacatgtcttttaagtactagtattttcttggatgagtaattcaaactgctattttttctgtcatcagtaattcaaattggttatcatctaaattataaaacaaaatatttctgttatgataaaatatgattatctattaaattattaataattaagatagaactaacatactcgtacaaactaattctgtaaccaaaaatattaaaattcgcaaatattatttgaaacatctgtttataaaagtaatttcatattaccatgtcaaaaacaaaaagaacattgttttgggaactgcaaaattacatatgtttcgaagtatattacatatgtattacatgtttttctttattctttttttctttgtaacaataatatcaaagattgcatccaaacgtagtatctgactactatttggtgcaatatccaaacgaagaagaaacaaagagcacttaaactgaattgtaacaaattgaaaccactacagcaacgtagttcttgtaatttccttcaacaatgacaatgatagaactcggtatgataagaagactctatctagccgatccacggaagttgtgaagatctcaataacctcaacaagatcccaaaaaaaaagagcttacttcgcacaaatacgatgattccgaacatcacagatgacataacaaaggggacactacaaaaaatggcattaaagctcatgtaagattcaaaagcacatatgagagaaaagtaagggcatgtcatgtccactctcttcttcacttattactgtcccatttggccaaagtatctgccggcgatggtgatgagcatatttgccatggtgataacttcttcatctccaacctctaatgatgtctctgcacgaacactagcacacttcctcagaagaccccttagacaagcacaagtatcggcatccaaaggagtctccaatgatgcacacaacgctactacccatttgcaatcgctactctgtaaaccgctctccttctcaaccaaacatatacgctttttcagctttgatacccgcgtcaccgagtccattccttgtatgtctgttaccacctcaccaaaagactcatcctcctctgtgtggagatgcttattgaacatctccacaagcaaatcttctacacactgacttgatattatctcatcctcacagctgttggcactttgtgttagagtctgtaaaaataacaacacttactttcattttcgtctattaagagagagactgctattaaccaaccatgtaagtcagatgaaatatcaggaaaaaatacctggcgaaggtgtacaaagtccaaaagcaacgagtcctcccattccttcatgggtaacaggtactctggacatttggggatttcaggaattagtggcatataaacactttgctctttctttatgtacgtgctttcatctatcttggctactcttacattcggaattcccttagcctcccacctaaattgaggaaacaaaacaacttaaccataataccaaaagtttaaaagtgtaaagacacagaaagatggaaacagagagataatatacctgactcgtcttaaatattcaagcccatcttctggtggtccagtactaaaatcaggttctccatctacttcaaacgcaggtctcaaaatgctattgtaatcatcattatcgtcagtgtagtcttcagggtcctccgttccttcttcagtccccaaattttcttctgaagaaataatcatacaaggtaagtaacaggaacaaacaaaaggatttctaaacacaacagaaatgagcgtgcatagaaacagagaagaaataagtccatcaaaatacataataactttaaggttctgagtgtgaatgcactatttttattgaaaatgtatgaacatgtacaactttagccaaagactaatggccctatataatttgaaccaaaagaaactcctatgtcctttataacctgaacaaaacaatctatatacagaatgaatgtatgaggtattaggctgttagctcatagaaaaaagaaagaaaaaaagggacttgtattgtgtctaagaaacgagaaaattggtgaaaaatggactttgacaaatctcttcagctgacagctcaatgtacaaatatattcacacagttacgtcttggtacagcagatatgggacctgtggaaaagaaaataagaggcccctatcaaaacgacaagttatgtactcgaactgacggaagaattaaaaatgaagaacagatcaagaaacacgaaaagagctctcgagcaggaaaacagacagacatccaaaccatgaaaaagatgcttagcaacaagaaaccattgaagttgtttaataggaaaaaccactgccgaaactcactgatactaaagcagactggatttgtatgtgatgacccatttgagaaagaaaacaccacaaaacccggaaaagtgcaacatatttactcctatttcttagacctatctatctaaatttgatacacctaaagttattctcaaccaacaacaagaaaaacaaaacagtcaggtgaagaatgcaaggaataagagacaaacaaagcatctgcgaggttatcgagattaccattgccactctccgttcgcccacgaacacgattagactttgaactcttgtaattcttcacataaactaaactttcatactcagtcaccacctcaggtagaatcctagaatacatctcactccacaggttcttctgattcacaatgtgggcaaacctcattgactccaattgtttcctagtgtacaatctcctaaactgcttcccattgttttctactccactcccctcaataacatttctcttatctccaattttcttaagctttctaggtgtatccttctcattttgagcagtccctggtctcttaggatgatgaacaacatcaaccaacgcagtatgatcaaccaattcaatcttatcaacatcattatccatcgtctcttcgatcttaggcaacgtatccacatcaacactcttcctaaagattgacccaagttcgatttcagccagcaatcttctcttctctgcttccaatagtctctgagcttcagattcttgttccttctcctcaaaattcaaactttcttcaagggctccatcaactcgatattgctcacttcctttagagaaggatgattcctttatctcttgcagatccctattgtttacagagacggctccatcttccatagttattgcatcgttttgcgaggaagaagcttgtggatctatctcagagttcagttgcttcttaaagtcgctctctttttctaatccatccccagaaattgaggttttcgccggagtacagtggtcggaatcggagtttgtcatcatgaggcggatgtgcgcaaaacccttaacgagtgaataaattgttccttttctcgaagctaataaattgctcgaaccggtttgattaaaccggaaaaaattatcaaccttgaaccggttctatgtataaatatagccaatgtgttctcatcccggattataccggatccgcatatctgctaattccacacaccattctcttttgaagccttttgtactaacatcgtttatattcttaacatttccatacaaaacaaaatgagaacaacaagtagaagaagattctactacatcttgtatcaagttcattacaaacaactaacacgtaattaaatagctaaactactctctctgctacactacgattaaacttaacaccaataagaggtgaatcatgtagggacagtgtagtaaccaacatcatcatcttgattcaccatcaatatcacagttgcgaagagagccaccacaacaaaagatatcgcaataacgagtttggcatagctcatcttcttcttcttcttcttaccggttatcatctgtgtttgagctgtgtcttcactaactgtgatagttgatgacattgtttccaccatggttggaaattgctttctgagtttaggattcttgcgagatcctatggttttctctctctcgcctctcagtattggactttggatgtctgaatgatctaaatcaacatcatcaggatattgaagagagctgattagcttccgtggagtgctgaagatgttgaaatcttcagcattgatgcgacgtgaacgctgtctctgtgtatcagaaaagtcagaaatgtttaacataaatgaaactaacaaacatacaacaaagatggattgatgttcacctgaggactaggagtggtgtttctcaaactttccattagaaacccttcaaattcatctccattttcacaagtatcatacggtacaagaggtgaatcagagacagtggtgcttcctttagttacacgggagaaaagaccatcctttaaagagatatcaaccactcctccattctcatcacgtctccaaagtttgcggttcacactcctccgatcaaattcagagttacaagaagtatgagaaataggcgaggactcaaccggagaatcatacccgctaaaagagcctagagtctgtgattcaggtgataaggagtaatcaggaacaatggacgaacagtttcttcgactgaaattcgaaccagtaacagaacgacaacctttctccatcttcgactcgagctctgccgctattctttttgaagtcatcattgcttcataagcagctcctctaacataagccatttggtcagattgacacctctccatttcttttattatcaactcaacttccgagtatatgcttctcggatccaagcacttcataaggaagttcaacatttggactgctgataatcgtttctgcgagtttccttcagatactccaaatcctagaattcgcaaccccgtgtgtatcagcaaccttgcataagcttcaacaatcaaaggattatgcttggcaagtgacataaccaaacccatttgaagatgtgtttggttggagtttgagtccaacgcaactaccacattttgacaaaccctgttcaccatctcatccgaagcaaaccgccaattgtcactatccacaagagccttcaaacacaaagcagcccctgaagtaaggctctcttgagaggccaatagagaatccgtaagaggcttacacaaagagtggattataactcgtttcttgtcttctgtagtagtcggatcgatcccatatcgagcaatcgccggaataactttcgaacacgcttgttgaagagggaaagaaccagcactagaagccaaagtcttgacaatagtggacatgattgtatcaatctgaggcacaatgttaggtccatgaacacgagcaaggatttcataaagcgaaatcgtgtattcaccggacaaagagttggtttctttagtctcgaaaacttgagctagaaaaccaggaatagcctttgaatccaagtccttcacataagatttaagagctttcattgctgatttacgactctctgtgtctttgtcaagattagccagttcttgtctcaatattggattcagattcaaacccattactcaacctgcaccacacaagaaaaaatcacaccaacaacataaggctacttcttaaagtcataaactttagctatatttcaaatctcagccttgcaaactcgattgaaaccaataaacaccgtatacgagataattgggaaccagacagctaattttcaactgcaacacacaagacaaataacaccaacagcatagagtttattcttaaagtcataaactttaacctacattttcaaatttcatgtttgcaagtttgattcagaccagaaataaagactcatatacgaggaaaatgagaaccagacaactaactccaaatcagacaactacacgagaaaatagcaaaaatttcaagacaaaacaattattccaactgcacaacagaaggaaatatcacactaaaatcgtaagatttctgcttaaagtcaaaatactttaagctacattttcaaatctcattcttgcagactcgattcagaccagaaataaagacatccaatacgagaaaactgagacccagacaacttcacgagataatagcaaaaattacagaaccatgaatctcagaacagatccgtacctgcttcttatactgggagctctcagctaattatttggtttgaccgtacaaagatgaaacctttggagaattcaaaagcaaatgaaatcgatgtgaagtagcaaagtgaaaccttggaatgagaaaatcaaaaagtgtgtggcggaaaccttacaaatgaaaaatcccgcggttcaacagataacacatttttcaaaaaatgtttggggtttagtttttttttgtttgtgtatgtatgtgtctgcttcttctttattttgtttgaagctgttttgtctttttcaatgtcagttgtcgccatctgttgtaatatgaatctttttgtctttttttatttattaaataattatattttctcgtgtttaacaaaaaatagatcggagatttttaaattcaaatctctctattcgaaatctcaccgctctatattgttgcattgggtcccattctcaagtctctagatctagtgatctgcattttcaaattattttagttgagacggtgtgtgaatatccgtgaacaaataaatgctactgtggtgttattatatttgagtttgagattattatactaagaggatgattacagatcgaccacaaattttatactgtactaatggttttaaggctaaaaaggactaatctaatggatccattttgacatatgtttaggaatcgatttggccttgtagaagtttagtttactagtcccaaacacagcattgcctctgaagcagaagtgggtctgttctgtgaagcatctctcctctctaaactacaataatatcagtattccttaatagagtcaaaacaagtagtacttctcaaactaagggagtaactaacttatctagcactgatatatgtacaccctctatcgatctagacacatcaaaccagctgctcacaatggattctcttttttcatatataaacagcaagaataaaatatcaagcaattttttattttagtgaaattccttctgatgaacaaaacctttgtacatgtcatttgatcaatacaaaggctcatggtttgaggggaaaaaagaaagaaagaagcagatgtaaatatcgatactagtagaataaaacggaaaatgcccaccaatacccaaatacaattgatatacaaaatatatgctccacgaattaacccgaggtttacaaaacatgatgatttctccatctaaagtttgcttctacttgcacttgctagatgttgggtaacaagaaagatgagtttggtggcattggtcatgaagggaaggtgccaaagaagatgccagtggcacctatgagaattaatatcataagtacgtgcaaatctccatacgtattatattagctacagaatgcatggaaattgcaggaggagagcttagttctgatgatagtaaagcaataccttctcacaggtacaaatgatattagtgtgactgtgggaggagtctgcaggtggggcagtaccatttccctttgaatctggtctcaggtgtgaggccaacgcatgtatagtgaaaccattcacctccttggcactgtcgaaacaggaacaaaaggtttcatcataacagctatacattaaaaaataaataataagatgctgggagagcaggctcacattctcattgtcacaggcaatcatgtctccaaaggacacctgaaacaaataacgaaaatgttaaccaaagatcacaacaggatcaggcaacttacagattttgcaaaatttatgtattcaggacctgatggcagacacagtaagttggttcgtttggatcgattggctgctcttcaattggcataaggtctttccgattgcttcctggaggaggcatgagctcaaaatccctgtcacgatcccagtctctatctctataatcaatcttcttgggctgaggtgtgccatagaaggacttacgcttttccgctttaggaactataggtagtggaggaagaacagagggctcgtctggtggaatttttccctctgatagagaagaacaaacatgataaatacagagaacgccaatactgaaaacgtttaactacttcatcaatgcatcattgaaaagtttatcatatgaccacgatagaaaaatgaaagtaatgccactaatgatttgacaagactgaagataaacattttatgtgtctctgaagcttgacactaatcgatgtgcactgactaaagtttatgcaggtgaaacgcatgtttttaccaacccttaaggggttgttcaagaggaagtttaaaagagttataagcacatgtgacccttttattgataaaacaagacgtatacaaggattccacacaagagattgactcttgccgtaaggatacatgctcaatcaattacgaacttaataacctcaatcgatcaattttgacacacatattaacaaaactcttggaataattagcatgaataagcattagaatatgaaaaatatagttctaatcaattcccttaagataacagtaactagacagctcctgagctaaaatcacataccttgctttaaatcttctgcaaaattattcagatcttcatcaagtcgttttacatgactatctatctacaaccagaataaacataataattaccacaacaccaaaactggctgaaacaaccaaaggagctatattcagactttagcaacaaagattctgattgaattaatacatacacatccatcaatgttttcgtgacagacaacaaaacattcacagcagcaaatatacttaaatagcaagaggaagccttagaggaatatataacttacaagatcatacgcttgtcgggccaataaaaccttctcggtacacaaacttaacgcattttcctgactagactcaatctctttacgcattttctcaatcgtttcctcttcatcaagaccaccattattgtaatgattaccattaccctttttagaactctgtgaagcaagccctaagcaatacttagtttgctgtcttgtctgatttataagcgcttccaacgacaaacaaaacacaaacataatcaattcacgaaacacacaaagaaacatacgcaagagaacaatgtaataacaaaaatttacattgagatctctcgtctagttcgcgaactgtgtttagtaatctttgtagctctgcagggaaagtgcttgcatctacatgaaattgaatttccgaattgtacaattaaaaccctaaaattcgaactaattagagaaaatttatcaaataaagagagaaattatggatcttacactcaaggtaatcatcaacataaactccagttcgtgcaatagccatctttgatctctgatgaactggatttgattatggagcatagacttcagctaggatttcgaattgggattgagaacgaagcttttttttttctcacgagttactaaagttatcaaaccatacatgggctaaaaactaaaagccccacaaacattgagattacgcaaaacattttaagcccaaaatgagcccaatagcattgttttgcgggaaaaaaatagcattgtttaatgaaaaagaaatggtattctgacttcattcatgacccagccaacgaacgttgtcaaaatattcaactcgacatcccattcgatattaaaacgatgttctaatcaatgaccagcaaaattgtcattatgtgtaagtaataaagcaatgcatggtaaaataaaaagaacaaaagaatatttggaaccacatagacgaagatatgtgcatgtgatgaaacaccaatttcacaagatacaacaaactatataaactcgaaagagtgaaataaattaatttttaaagcaaatctttaagggtaataaacgaatcattcagtacataggagatccaagaagaaactgcatgcacagaacaaattatataaatagaagcaattagatgggtcatcatcacaatcaccaggcaatattgatttccaacaaattgaaaacaagagagagattttcagtaatatatttttgtttatttttcgtgttcattgaaatttttaacgaaatggcagtaaatatggaaggttcacagacacacttttacgatgaaatcgaacccttttgtcgatggagaagaacggaagacatcgacattcttgagctacatcttccttcaggtacaacaattatttcctacaataaatttataacaaaaaaaataaaaaataatacatagtagttcttttcttagtttactatatatacatatatatatatatatatatatatatatatatagcattgtaagtctgcattgcactttgtttgatatatatatatatatatatatatatatatatatatatatatcttttccaaccgaaatatagcacagcacgagagaattgttaaaagctttgattatactttgcttccacattgctactttgtttctctatttctccaaccattgtaaagtatactttgattccacattgctacttttgcttctcaaactctctttggctccacgttgtttaaatgtccaaacggaccttttggccagtagtgctaggtctacgaatttagatgagtaatatgtaaagaatattttccccgtatggatctctagctagaccggttgtttaattcaatgtgtggttgtagaaaaaaaagaaagaactaaagagtatagttatttatcaatgaaaagtggaattggtgtaggtttgaagaaagagcatcttaaaatacagatcaacaacagtggtgtactaacaataacaggaggctgtccagtggaccaaaccaaaacaatcaggttcatgaaagaaacaaaagttgcaaaagattgtaaaagaaatgagattcgtgcaaagttctctaagggagttttgtatgtgacgatgccaaagacaatccctatagcagctggtctctcagtttctttgaagggagccacgccacaacatcaaacccctaaaacagatgagggtatgagaaatgttgcaaactgttcaagcgaattttatagtaagtttggctcattgaagcaaagactatggaggaagacagtagttgagggtgtggccgctgtggtggttgtggctgctgcagttttaggagttgttaaagcgtaccaatattttatggcatcacctgtgtgatcaagttttaataagaccatgtatttgcattattggtatgatgtatacatatattcattatgtttcactttacataagttatttcttcattaaaactaaataagtataaattgtccttcttgagttattattatataattgtgacggaagtaaaaaaaaatatatatttaagatagtagttaaaaaagttaaatttaactaatgatatatatatttgacgaaaaaaaaaaactaatgatatatattttttaaatagtcttttcgtaattggttcaatatttgtgtgttaagaattacaaatagaatttcttttttgaattgaaatatcgactaataggataagcgatttagataattgctatgaatgtatgattggtttcatttataaaagctcgtctgtaaacgaaccgctcaaagcctcaaactagttgacaattcatttattgaaaatggtagaatcttatttttggtggttgaaataatcaattccaaccactgtgaaagaagcaacgttaggttttgaatcagagattgagaaaaaaaaactcatgtcggtttgcttatgtttttggcattggattctattatttgacaacaacaaaaaaggaatatataaacttttggttttatttttactttttactttttcttttgatgataaacttttagttttcagaaaactgattaatgtttcggaaaacattattgagagcaaacactaacaaatactttttcttgtagaaggccattgtcatgaaaacaagttttctttctaaagaaaaaaaataatttcgctttggtcaaacatcaaactttttttaattgtttttttcttctcaaacatctattatcatttgacaatcatttaagttcatttactgaatggtgtatgtattgttaaaaaaaattttttttactcttttagtatacgtgaaacctatcatctatatatgtttatcaacaagttttgatcttctcactttttttcaacagataaaagttttgatcttctaaagaaacatagatcccaagttaaaattaaataacaagtcttacaagttatgattcatcaaattattatttttgatttagataagatacatgagcataattttcatgacaagaaaacagaaacataacaaacaaagatagatgcacggttctcctgtctttaacctctctctaagatgataagaacatacagcaacattaattaataatagccagaaccagatctgttttattcaagcgatcctcctcacttcctcacctacaaatcaacaaacatttaataaattaaacagttattgaatatagtacatcctaaataatatattagtctttttttttgtaagatccaaatcttgattatttaagtataggaaaaaaaaaccttaatcttatatctacaactaattaacacgtagttttttttcaagatccaaaccgttttgttttttggtaaaccaagatccaaaccttattagtaaatatttgttcatgatttatgtatatgattaagaagttataaaaaccttaatcgctgtcgctgtcactgctgctgctgtggtgaccatcatcatgatgtttcttctccttcttgtccttcttctttttcttctcaccgtcgtggcttttgccttctccgtcgtggcttttaccttcaccaccgtggatcttgtctttgatcttgtcaacaataccttctttgtgctcaccactcttgtgctcgtcaacgtgtttcttgtgttcctcttccttcttgtgctcaccttccttgttgcctcctccaatgtggagtgcgtctccgatcttgttgatgagtcctgccatatctttcttttttctctttcttttgtattaaatctctcttttatgtgtttggttgctttgacgataaacttggatctcaaagggtctctatttatagcccaaaatggataattaatactaatctatcactatcaatgagatattattattggtttgtatttttcttagagattactttatagtagaaagaaagatatatggcgtggcgaagataagattaattcttccaatgtgctgtactggttctttaactggaaataatgatacaattaattggggtagattatattcctttaaaagaaagaaatattatattctcttagatattttcaactactatgtggttgcaatttttatttcttttagatattttttttaaatgattctgactatgtccatattaggaccatagtatataatttgaaggcatatagtatagatgggattaaaagaactaaaatttggatttaaacaaactaactcagacgtgtgattatatatttgtttaaatagttttgttactttgcgacccaattcaaatgcataatccgattaaaacaataagatgtctcaagaaacaatctagtaaaatttataaccaaaaatgaaatatcaaccaaattagactcttagaaacacattttaatctcaaagaagtgaaggttacattccaagaaaataaccacccagttctttgaaatagacttcaagtttgaactctttagtttcaactacccagttcgtatcgtctttataattttagtgaaaatttcgtgaaaaaaaaagaattttaaccagtggcaattatatcgaatgaaattgaaaatcttcgattttgaaagtttatttcaaagaacaatattgtttggcaaacatagaaatatgagagaaatggatgaagacaatcttcataatgtgataggtgcttgcttgacaattcatatacatcttagaaaatagaacccttttcgttttgtaagaaaaagttgaccaaaataatatccaaagttccaaaccatgtgggttaaaccgttaaggtaagttgtaaaaaaaaaaaccgttaaggtaaatgcgcgcgtatgatttgtcgtgtagtgaactatgaataaatgctaaatatggtcggccactacattatattctcatattccagaatcctttgttatatattgctgtgtcggcaataatatgaatgactttgaaaagtatacacaataatgcaatatatatgtaagtaattattttcattagggaggagacccgcgcgttgcacggggtggtttgtttttggttttgttagtatgtaattataacttcgattttttttactgatctttgattaaaaggggaatatctttgttatttgcacccctcattttagttcggcccaaatcaagaataaactaatcaacatcaatcccaaaaagcccataaaagttggtccatatcaccagcttagtttttctataaatagagaggcatctcaaggaaaaaaggaggaagaaatccatattaaaacgtcttcaagctcctcagctcgttctctagctcctctgctcgtcctcaagcttatccgctcgctctcaagctcctcagctcgtcttcaagcttctcagctcgttctcaagctcctctgctcgtcctctagctcctctgcttgtcctcaagcacttcagctcgccctcaagctcctctgctggtcctcaagctcctcaactggtcctcaagctcctcagctcgtctttaagctctccagctcgtctttaagttcagctcgtcttcaagctccaccactcaacgaccatctcctcgcctagctgtcagctagtcagctcgtccaattcctcacttagtcgttagctcgtccctcaagtgcataaatctatctcctcacctagctgccagttcgtccattgactacacaatccgcctatctcgtctcccagctcgtctatactttcaccagaactcgatttgtccggctcgtctctctactacatttcgtctagcttggcccctggctaccagctcgtcactcaaatactcagttcgtctaactcgttgtctatcaaccagttcgcctcgtaactaagttcgtccagctcttcgcctacctgccagctcgtcacacatctgctagctcgtcgcctagctgccagctcgtcaccaacctgccacctcctctctaaactgcctatctcaatatacgacctacctccaacgatgacctagctcacttattataatatgaactacgtattctgaccaattttatttgtggtactgtcgttggccaaaaccaaaacagaggctcaatagcttggaagtccttgggcctttaaaagtttcaggcgtggctgtttgtaatttatgtaatcgactatctccagatccaatttgagagggagttgattctgttgaaatctatccatcgtttttgctatttttcctacaaatctattagatgtaagtaagacttcagatgagtgaaatttgaatgaataagagatctagttattgaatttcattgttttctgattctcgtttcctcattatttgaatatgttttttttgcagatggttgagctaatttgatttggtggatgttgttttcgcttaatataattggtggaggagtgaatttatccttatcatttagtagagcttcgtcttattttgtttaatctgtccgtcagtgtaaattggatatagtacctatgtgaccgtggtaagtatataacaaattttagcatttcatgtttttattgatgatatctgttgataaaaaatcagtaataaataaattggagatgggtggataatgttgttacatgcgtaacaatacaaagtgtgttgtaaaacttgtaacgaatccattaagaaatagtggagaaaatttcaaagcttttgaaatatatttgtctgaggtgctactttgtttcgcattttgcacttctttttcttcgaattcttcattttcacctaatggaattttaatgtttggaaacttgtattaggtttaatgttagataaattgtggtgaaaaaaacatattgttgacttgagtaagaaatgtttgggttatttacttgcataagtgtctgcttctaattcaggtttccaaaatatctggctttttgtggtgttcaccattctgttgacctacataagagtatgtaaatagttgtcagtttctatctttgaagacaataagcagttttaactaattcctgctcatatatggacggtcattgttaggattttttacctgtaattgctggtagaccattaaaaacttctctgtagactatgttagtaacatacttgccttctttttttttggatgtgtctagaactgttagtccttttggggatgtgacgcgtgacaaagcaacgtatagttggccgtggctgaagactggttttggtagatacaatgccactctattcaaggtttgtccttggcttttatttatcgtcatagcgtagcacatacgtactggaaactgacgccttcttagagtgaatggatgcttggaatcttgtggtgatagtataatccttgggattaacacttttttcctttcttttgttgtatctgaaagaatctcagctttaagtactttgtctcccaaatgagttacaataagccttgttccattgcataacccttctttttggttaagatttctaagtagcataattggtactccaacctttaagcatagtctatgcgctggtaatcctggaaactctaatgaatttagatattccatggggtatgacatctcaaatccttcttctgttagtgcttcatcccgatcgatactgtcagcgctgaaatattcctttgctaaaccaggcactttagagagcaaataatcgttgatttcatcaacggtttcatttcgtggagttaaaacagctgtacctttaaggttctccaagtcttgaaatgtgtttgtaaaatccggaaaaactgatcggcataacacctctagtgggttttctgtctctggtagcaggagatttttgtcaattatgatgttatcttcttcttgatcatcatctataccatgggtttttctgggtgcttctccatcccctacttgcaaaatccattctgcaaattttatttcctcaggttgcactctcatattttgtgaaagcaagtatttatgacacgactcccataaatatgaccgatttattgctgcgctaacagtttcttgtctggttccctgtggtatcactggtaagatttgtctaaaatcaccacctaaaagaactgttttcccaccaaaagttttggttagtgccttttcgtcacccactgacagaatatctctcaatgttcgatctactgcttcgaaggtatggcggtgtgccattggtgcctcatcccaaataataagatccactttactaagtacattggctagcattgaacctattttaatatcacaaatggaatcctcatgcacattgattggtatcttaaaccttgaatgtgcagttctgccacctggtaggagtagagctgcaatagctgatgatgcgacgggcatgacattttttccatttgatctaagagcagagataatagtcttgtacaaaaatgttttgcctgtgcctccagctccatatagaaagaataacttgccttctttatttatcactgatttgagaacatcatcgtaaattatccgttgctgctcgttcagcttgctgaataaatttgcatgtgtttctcttgccgaagtaaggagttgtttagttcttccaatattgacttttctggctgaggcatttctggataatctgacaatgacttttcatgctggcgtaagagtgtttcaatctcgatcaatgtgtatttctctagttcttctgctttcagttctagttgagggaaattcagaactttttgctgcttacggaagacatcatctgccatgctctcccaacagtgactccacagttttagtggttcagagacctcacagtatatcaagatcaagacaaataagcttctaagtaagtatgatgttgaccattgtgctgcttcatccattgcatcatgccattctttgtctccatctagcaaccctcttgtgtgacatgctgctttaaaactttcatgtaccacacctcctacagttttcaaataatcgaaacttgttgcacccttcactttgttaagcaagattctaagataatacaaatcccctgccgttgggagtatgtttacaatccttccaatgttttctctctgctttcttcgagtgtacattttatttgtactatcccatacaaacattgttggcacttgcacgtatttcagctttcttgcatcttcgcatattttattcagctcaaaatattctgtcaacatggtcctctcatgtccgtaacgatattccacattttcaagattttcttcttcttcaaatattgtgctttgttcgccaggaaggtgtaatggtagccgttgtactggtggattgtggtggtgaatattgaacataaatatcctccacattgcttcacatgccgataagtaacgacagtcgagatactcatttatctcatttcttggtttttcctcaaaaccatttccagatccttgaccattgacactgtttcctttttggattataaatgttgctttatccactccttttgtaatgtatttgaagagatacttgatagcgcttgacttgttacaccattctacattgatatgagctttgtacttctttagaatttcgagattgtgaggtaccacaaatcgattatccagtctggtttgccctttcaacacatatctttgatcattccgccgtctatataggataaatcctgattcattcatttttgtatggtttacaaattcccttgggaattttttactgcaaattcctttttccatgcatggagaggagggacggtcttttccacatggtccatgcatcatgtgttgctctaccagtgtgtgtccttcaggatctttatctttaacgggtatttctgctgaaatatacttatctatatcatttggtgttggctttttaagatctccttgtagccatagaagtatgtgcgcatgtggcaatcctcgcttttggaattcaatagtgtagacgactgtttgattaaatagcaaaacagagttactacagattacaaattaatagatagatatagcaacataaatgaaattatgtagttttctcttacttgcaatcggctttgggaaaaagagacctttgttgaagtcggctaacaactcatctaattttattttgaacactctgcactcaatgtccggcctaacattcgcagcatcattcccgtaagtcttcaagtgttcagatatttcctcccattttggattagttgtcatagtgataaataaatctgggtttccataccatcgacatatagccattgcatcatgatatttttcaaccatgtagcgtgggctgcctgtatagcttgctggtagtatcactcttttcccaattgacttagcatctgtgtcaccccttgcaactgcatcttttacgttgttgtattgatcagctcgcaactttttttgatttagcctgtaccaacgtaatcgttcttgctcaatcgacgtatatgcgtccactatatactgatgtagtaatcgctttgatcggacaatcgtcatgccttctgtcagtctggtttgaatctagtaggcataaaattctctcttggtgatgaaagttctttttctagtattctcttcactttcgacaactggtattccttcgtggaatccaatttccccatatggaaacaaaagagggtattgtagagtcataaacaaagggtgtaaatcgcttatctgttgtagtccagatgatttgtgatgcactatcacatccctttccccaatattttttgaaaaatcccccacaatcaaaccagcaatttcatctgttgttggcatatcatattgcttccctttcttcttttggccaattagcttgatactaaactccggacaatcaccagcttcatatctatcccttgcctttctaaaaacctttgccaaacaattgaatgtatcgactgtggtgataaggtcttttactattttctcatttaactccccaacttttgtggtccttttgactgctgaaattctgttgtgaacctcgttagctgtatcaaagatgtagagttgtaaaatttttggaggttttccttcttctggcaccaacgatcctaacttgtggtgattttgaccatgaattctgaaagtgaatggaccacctttgtgcatgacattcttatctatttgcgcacccattgacgtgaacgcaagaatagaattgtatgttcttatatttcgctggtagtgaggagactctgttaacagtttcttcaacatttgtggtggttgtggctctggtggtaacacatttgtagcagcgtaaaacatttccaactttttccaattttctgctacatccagtacatgacacataagaccacccattcttttgcagtacatctaacaccttagcattgcaaaggaaatcagcatcctgtgacttatggaacattgtaaacaaaacattagtagtgattctttggagttaattttggaacttaattatgttgaatatatttgtaatacctgttcatcagttttagatatgaatttgtgaagctgatgaatcgataccatttcttttttacgtattccagctgctgtatcagcacgtgcaatagactctccactttttatacccatcctgcatccattaataattaagcaatagaaagattttaagcgtatgtgtttatagaagtgagttatgagagatttattgataagaacctaaccttttgataaactcttggattggttgaatgctgctgtaaaaaaaaaaccttgttgcgggtgtggagttgagataaaggttaccttaaacagtaagaatgaccatatgttatcttttatcttaaaatttgagagtaaaatttggaaataaatcagttttatctaacctccaaacatctttgggttgacggtagttattagcatgaccgagtaaattgtatcaccagagctaagatgggcacgaaaggttgcggcgacatcatcccatagtgataagtagacaataacagaccttaaaataaaaagacggaagtatcagttcaattttaaagttttgttcattatttatttttggtttggaagtgctagcttacgaatcaatccggtatcgcaaaaccaaacgttgagtagaagttggatcattcaagtttgacccttggacgaaagtgatttggcctacaacatctagatcatttcaaaggtgttataatcatagttcatgtttaaaaaatgtaagaatcatgaaaaatattaccaggaagttcaatattggtgttagcaagagcttgaaggttgtcaaagttacgtagcataaatttttcactctcaattgtagggccaacatctgaaacttcaataatcgttgtggcagggagaaaacggaggagaaaaggattgtcagtgatcttgtagattttcgtgcaacgtcccacttcaaacccactaacattgaagattatgccttcacgcaaaacttggcggaaatgtgaagcaagagctgctgggataaaagcatggattacggagcactattaatgaaacaaattaagtgttagttagccatcaattacatatgaaacaaaaaagcattaaacatctaagatgatttactttttcatcaagtaacaggaggactatgcccatgaattggccatctttcttgatgttgcgagcatcccaaaaacgaagtaggcgaccaacaacctgttgagtagagcgaccaagacgtaaagcatcaaaagctacatagtttgctttagaaggaattgcaacaacatcaacttcagccattttcagagtgtgtaatattttctggtggaaagtgataattgtgtttgggggtgatgggagatgatgattttatagtagtttaaaggaagatgtataggaggtttttgcttttctccagttacagtttcgatttgagatattaaaagtatgaattaaattgcaagtagtggaattttgtaggaattaagccatgtatttaagtaccttttagtgaataactgttgatgtttgagcttctggggaagaaaaatacggaaagctccagctcgtctttaagttcttcagctcgtcttcaagctccacatcactcaacgaccatctcctcgcctagctgtcagctagtcagctcgtccaattcctcacctactcgtcagctcgtccctcaagtgcacaactcatctatctcctcgcctagctgccagtttgtccattgactacacagaaggagtatactggtttatttggttcttttgactaaatcttggcccgatacacctcactaagtctatttggttctttggctcatgggctttttgaccaaatcgtgccccatactccagctcgtctttaagttcttcagctcgtcttcaagctccacatcactcaacgaccatctcctcgcctagctgtcagctagtcagctcgtccaattcctcacctactcgtcagctcgtccctcaagtgcacaactcatctatctcctcgcctagctgccagttcgtccattgactacacagaaggagtatactggtttatttggttcttttgactaaatcttggcccgatacacctcactaagtctatttggttctttggctcatgggctttttgaccaaatcgtgccccataaacatcactaaatcgtgccccataaacatcactaaatctatctcacgcatagaaaaaaatgtgaagacagagtaaaaacatgtgggctccacattaaaaagatgtagtgacgtggacacttttagaggagagaaaactctgctattatatatatgattattatttgaactgcaatatattttatctgtagttgaattatatatcttcattcgtcttagtatatatgtatatatatatatatattaaattgtactatttttattaatatttattagaaagagaggattttacacaacatcaacaacattataaacataaacccaagaaatttaaccagttacacaaatcagatatgagaaatagcaaaaaaaaaattgaaagctacgattatataatttttaaatttataacaactttcatgcatcaatatttttcaaagatttgaaaaattgatatcactatagaatcttcaaaatgtagtcttcaaatcttttgtcctccgttgatgatagttagacttcaaaactaataatatatatttcatgaattggtttgacggagcttcgaaagagacaaagataaaccgtctaaaggatccatgatcaatttgtcgagtgaaaacaacatggatttagtataaaagaagtaaaatcagaccaaatttagatttatttggtcaaaaatttctggtggaggagactaacaaaaactgcccaacaacaacactatagccaaactttaaggaatcaacagatcgaaccgaaaaaggtcaagaaaaacattgacgaggataattttttttgaaatacataatccaaagcaaacatgcataccatattagataatactattattcactttttaaactaactggtcacacagattgaagatattttaccgtaataaaatggaaagtaaaaatgttattataaaatagaaatcatttcgccgatatttttatcctttgacaatccttgctaaaatttatctacttttcgtctctaaacttgtttcaccaattgaaaaaacgattatcccgatttgtggctcttgcctctcgtctaccggcttatatttgcaatctgcaacatatcgtcgtctccctattccatacgtatcaagcgagatatgttcagtctctgacttggccttctaatattttgaaaattttggaatgctttcttcaagtgtatgaaccatattgtatacttcgaactcgactctgatactgaccttatgggtccccatcttgcaactctttccgttgtgaagagcatactgctgcaaccctcctcctttacaaagagaacaatttgctccttaccctccttcatgaagaaaactgttacaatgtggtctccggtctggaaccgtccattcttccagttgttactatcttttggagaagaagtaatacgtctcatgccggtgagaattgaggtcttggattccttttcaaagtcaaattgtcaatcgactatgattatttacgacttgcttgtggatgtagtatcgacttacgattttctcgcttttgtctatgtgccttatcgctcatgtctccgaaagttggatttatcgtcaaggtatctattcagtttatattatgctctaatcagtgtattaaattttgttgtcttaagtcttggttgtgatgaacccttattctctctaattcctcttatcgtatgaatggaaaaatcagtctttgcacaaagaaaggatatgtaatagtgaaaattttcttttctaatatgtaaactgaataaatcaaagaaataaaaaattcggtccatcttcagatcataaattcatatgtataaacaaacaggacaatttaatttaagatgttagacaaacatgtttaggtgtcgaacatgacactttagttttctctctaataaaaatttctacatatttttatttaattgtgtgtttattttcataaatacatgtcttactactcacatctacaacaatcacatgtcattaatatagtatatatatacaataagagtgacaatttataatagctttcaacattatgaacttaactgattgtgctttttattgctagaattttattatagatatgtcaattatatttagaatcgaaatttattttctttcatatctccacagcttgtgtcctttatgaccgttaatctttaccgctaatttttgatttattcataatggtaagattatttttttgctttttatttgataataaagcagatgatatggtatgatgacaatttttatataccttctattaaatgtattttttttaaaaaaattggtgtgatgataatttttttaaaaaggttttactgtatttaaattttctaaaaaatacatgtaaacatgaaaatacattaagataaaatgataaaccgttaatttatttttctgataagtattctaaaatctacttatatatctaaacttataaaacttaaaaacaaataaataggatttaaaaaataaaaataatcatcatgtacatatttggtatggaatccaaaacaaatacaaaattttgacaaatgtcacacaacattgattaggtgcttatcaagaagattagctccttatcatgattaagctttaatacgaagactcatttcttgactaagacttgacttcaatggcgattctaaaaccctaagcgagaatccaaaaatgagtgaagaagatcacattgcttaggtgaagaagtctccgaagaatctctcaaaactatcttcgtcttctcttacaattccgacgaacagagatttccattctctctccaagtccgacgagttcaagcgtccgatcgatgagttagcttggagctcgcagtctgttcttgagacgattggtggtaagaaatcgatgagatttgatgatcccatggatgagttcaagaggaatcgaaagatggaggaagattcgaagaaggtaatcgatgtgaaagtggctgagagtgataagggattcgcgaaatttggcaaggcagaggttccgtttcatataccgacgttaacgaagcctcaagaggagtataagattttggtagacaatgctaataatccttttgagcatgttttgttggagaagagtgaagacggtcttcggttcattcatccactggttagtttcgttgtctctgtgttgattcgtagctgtataatgtaatatctcgagtgtggaactgtaatctttgatttgtttaggttacctttttctgtatgtgattttgtttgcatctctgttctcgtattgtaggaggaactatctgtgatggactttgttgatagaaatctaagtgagatgagacctgttaagcctctcccattggaagagactccattcaagctagttgaagaagtcaaagatcttgaggacttagctgctgcattgcaaagtgttgaagagtttgctgtaaattttcttcctctgattgtttttagtccgatgtgcaatgtattgttaaaatgtggcactttttggtagaggctcttagaagtttgcttgtgttataatgagaatgagctttccttaaagtatctgtctccagtatattgagtagacaaagagaacttaatttatgagttaggatgatggtatctctttccttatttattatatcttgtttatcgttcttgcttgagtttgttgtcttttattccttttgtaggtcgatctggagcataatcagtatagaacttttcaaggattaacatgcttgatgcaaatctctactagaaccgaggattatattgttgatatattcaagctttgggatcacattggtccttatctaagggaactcttcaaagaccctaaaaagaaaaaggttttctccataatgcgcaatgtgttttctacagaattcctagaatatagttaatacaatatgaaaccatttaacttaactaggtaatccatggagcagatcgagatattatttggcttcaacgggactttggcatttatgtctgcaatctttttgacacaggacaggtttgatttctggttattttgttttgacatggtcatattacttggaggtgtatgagatcaccttaacagaacccattttggtagtaatgtagaagaatgaagacaatttattggaaaaaatgaaactcaatttttcttcctttgtttttgtctacgctccagagagtagaaatttgaaaatataactcttctgtccctgtattcctttaatgatgttcgtgacattcttgtggctattaaacgataactttggtctgaaggttcttaaggtttaaagtgttattaaatcttaagcagtacttttttgttttctgtcaggcttcaagggtgctaaagctggagagaaatagtctggaatttcttctgaagcattattgtggagttgctgcaaacaaagagtgcataacaatccaatcttagttaacttttgttctttttgcattctcattatctcactcttcgttcaatttctgttttgctaattggctgcagataccaaaaagcagactggagaataagaccccttccagatgtaatgaaaaggttagtatattctctgtctagtctctctcatgattgctttgcattggttgagttgagctaacacatttgcatataatggcagatatgctagagaagatacacattatcttttgtacatttatgatgtaatgcgaatggagttgcacacaatggcaaaggaagatgagcaatctgactctcctctggtagaggtaacaatcaaagtctcccgaattctattggtatttctttttctagattttgattaaagggagactgatagagtaaagaagatgctataataaaaaaacacccacttaattagacgtgactcttgttcccttctctttcacccaaattttaaaagaaaccaaacataccattctgctctttcaatatttaatagaaatattatgcccaaagtaagatctgtataaaataattcatccccctcggtccctgctttaactttggtttctttgatttttctaactgatccttcctgatgtctctgtgtcacgtatacggttgttcgttggcacatgaagatcaagcatcaactcatttctattcataatcttctcttttgagtcgagtgggtctatgcttgggatttttcagttttcgataaccattttgacgaagttatcaatgctaacaggtgtacaagcgcagttatgacgtgtgcatgcaactatatgaaaaagagctttggactagggattcatatcttcacgtttatgggtatgttgcttattgtccccctcatgaatcaaaatctacgctttagttttaattgttgcctggtgtacctgttctttggctatcctgtcaatcgtttttgtgcttttatatggaagagcaatacccgattaggtttaaaatcttatgcatggcttattaacttaaaataatctctagtatgtgtttccattttggcattttgttagggttcagacaggtaatctcaatgcggttcaactttccattgttgcggtatgctctcaatttgcgtaatgatacaaggcacccttcatctacctttctttttaccatatgaagcttacataatagttgctgagctgcaggggctttgtgaatggcgggatcggattgcacgcgcagatgatgagagcaccggttatgtattgccaaataaaactctttttgacataggtagataatttaccatttcatctccaggttcttggatatttgtcggtggttcctaatttggtctaactcgttttattaaataacagccaaggagatgccaattgttgttgcccagttgcgccgtttgttgaagtcaaagcttccttacctcgagcgtaattttgacgcagtgatcagtgtcatcagacgatcaatgcaaaatgcagcggcattcgagccagttgttcaatctttgaaagataggcgtcctgaaacagtaagatatctattatgttatgaattaatagtataactccttttggtttctttctgtttatataaggagtacgaaaaaaatgtgcttgccttctaattctggagtggttttggcaatgattgctgttatcgagtagatatgttttgaaaaatatgtattcttaaaccgtaggttttagttgtggtgtagcagtgatcatatatatatgatgcttgcttgattgaaacaaggtgcattaggaactaaatcgtgcacccttcaatagcatgtgaacttgcaaagaaattataactagaggagagttatttgcaagtgctgattgctagatgtttcttaatagccatgagtcgtgaaagctttattattgcatgcacttggtaattatttatagtaaaaaatttctctttgctctgtcttttcttgatttaggtggttgaaatgaatatagaacctaagattgagaaaacagacacaggagcttcagcgtcttctctgagtctggagaaggtttgtgtggatgattcaaagaaacaaagcagtggttttggagttttgccgttaaagaggaagttggaaagtgacaaaacggtgaggttgttatatactatatagtgtgagaagagaactttacatatgtgttttaaaactgtaggtttttagttaaagggtatgtgcttacctgcttggtgaaaagcaattagtagtgattatatatgatacttgcttgagtgaatagattaggtcatatagaaccaagtttattaggaactaaatcttgcacccttcaatagcatgtgggccaaaatactataactagaggagacttatttgcaagtgctaattgctaatccaaatgtctagtagtttcgtggtgcgaaaccatgagatgttacttaagagccatgagtcatgactgctttattattgcatgcacttggtaattatttatagtgaaaattttctctttgctctatgacatttcttgaattaggtggttgaaaagaatatcgaacctaagattgagaaaacaggcacagaagcttcagcttcttctctgagttcgaagaaggtttgtgtggatgattcaaagaaacaaagcagtggttttggagttttgctgtcaaagaggaagtttgaaagtgataacaaggtgaggttgttatatagtgtgagaattgtacttcacatagaaatttgtaaacaccggtatcaattgattacattactaatctgctgagaaagaagttgcaggtaaaagaagaggtcaaagtgtccaagtccaagccagataaggtaatcatagtggtggatgatgatgatgatgatgatgatgatgagtcttatgaacagagcacgaaagccgctgatgctttggacagagtttcggaaacgccttcgaagggatcaccatcgttgactcaaaagccgaagacatgtaatacagaggttattgtgttagacgatgatgatgactcggaaagcagagaagatgaagacatgcgtaggagaagtgagaaacataggagattcatgaatatgaaacgtggctttcttaacatttagagccctttcattagcttttgtggtacattatgcaatgttttggtcggtatcttcagacaatagacaatctatcttgacttgtatgtgtatacaacaggtagtcatatgttttatatatgttaattgaatttttgattaaccagaaacaaaacattgctcttagtgaaagcaaatccagacttgtctggaccagacatattttttagtgggtacgggcaactatttaaagaaaacactacatgctatgtaaatataacacagcttacaactatttttttggagagttatggaaatattttttttataattgtttatactttgtaatttttagtcgctcttgagttcataaacaaaactaaaattacttgtttaaaattgagcaaaatattatgttttaaaaaacttttgtttttattgtttacaaaccatgctaaagaactactatattataaagggtaatattagtaactagccaaatgctgaaaattaagtaactaaccttttctcacaatgaccaaactattcctacgctaagatgattattacttctcaacaacactacatcatcgtccattaatctcatttccaagttccaaccatggttcggtggatcaccgatgacaaaaaaatacctcagttaattggctaacagatgtcttacggataagttcacgtactcatcatcgtcaatgactaggagggagagagagacaaagatcggagctcacatattcatcgtcagtgactaagatttcatgtgactttgttaaatagcatgaagtattgataaatatgtagaattatttcaagaattcaaacgactctattgaacaacatggtttatatgcagaatttagaagatttcatgttactttgataaataacgtgaaatattgataaaatatgtagatttctttcaataattcatgtgattctgttgaataacatggtatatattgctaaatatatgtaatatatagatctattagttttaatagcatgttttatttttaaaatacatgtgttttgaggtttagatttattcccttcggatgtaatattggtgagtgaaagagggatctagcatgagatccagcgagtaaataaataacaaggggtgagagtttcaacgaaaggaagagattcatgatagagatgtttgtctcactttattaaagaacattgaaatatagaattcctaaaccaagaccaaatgtttaaatttacgaaatctcataaaatctaaagctaagaaaatacagagtatttctattatatttacctttcttataagcggtaatgatgttaatgttatagggattaggcttcacgattgggttttaattttattaaatagatcaaatttaaattaattatagaagacattgttttcgcgtttattacaacaccactaaaaacgtttatccacttttattagggcgaacgacctgtgtccccctcggaagtttcatatagcattagaactacacaaaatttcaacctcgatcttggtctacacaaataaaaagttctagtcctatttctccctaatttgaaagttcgaaacctcaaaacacataaacgtttgattaattggtttataacataaactgatattaaaccacttaaaccaatcctaaaccaaattaaaaatatgacccatctccttctaccccatttgacccgtctccttctccgccatcacctcccgattacaaaaccaacatatacatctccattcttggaattgaaattctccgtttcgttgtctatagaagaaattgaagaattttcctccattgtttttggaaaaacatcatttgtgaacacattatttgaaagagcattgcggatatatgaatttggagttaagtcaatctcaaattttagtctttgactgaaactctattttgctcttctttttcaataaatttttctggaaataaagcaagtcctgaggggaaaccatgacatcgttcgtagaggagacaaacccaacgatttggaatctcattgttgtctcattttggtgaatcgttatcattttgtagcttatgacacggtttttgtgccattaacattttaatagttgcagagatcaaaaagcaatgtaaaacagagacaaaaattgtagagcttgagtaaatcgagttatacaacaaaacaacaaagccaatttaatcataatcttaaaaagcaaaaccaaaaataaatccattgtatcttctaatcttatttatccttgactgaaagtgtcttgagaaagtttgtccggagaaataatgcattgagaaggctctaataactatctgatttatcgtgtggttgtggctgagatgatttgcaacgtggctgatatgatccgtcttcatcatcatgaatttctccctcaacaatcaattgattaaatttctgggttctctcaaattctagtgttcattgattctgagatttggggattttcgatcttaaatcgggtctactcaggttaaatccggttcagtttagtcctaatgtggttaacgatgtctgggtaacaaaaaaacgattataaactatgtttatgtgtgttttaggtttgaattttgattttatgtgttttgaggtttcgaactttcaaattagggagaaataggactaaaactttttatttgtgtggaccaagatcgaggttggaattcggtgtagttctagtgctatatgaaacttccaagggacacacaggtcgttcaccccttttattatgatactattaaacaaccttcagcaatcagcatatgcgattatgatgaacaaatttcacaaacaatgatatctcatcgtagttttctctacaacactcggatccataacgaacgttcttcatgtacgacatctccttggtggatatgctctattgcaacatgcataaggtaccatgtacttcatgataattccatcattaatctgcaaaaaatgcatttttaaagagtcgaatctcatactttgtgtagaaacctttaactctttcaccattggtcaaaaaactttcacattttagaggtttgaagaggaaaataaagctagttaagctttgaacacgtttaataaactatagagaaaacaacggaggagacataaaaaacgggggcaactatagtttcattttttgaaattaatatcacgaggaatatttttcgatgagcaataatatgtaaaatatatggcgaattacaaaaacaaccatatttgataatatagtgaagaatatagtatcacaattcaaacaataaagaaactatagcataaggggtgagtaggcatgtcaattaaggcaaaatcatgcaggttagtcttgtccaaccctgaaaagtataaggcttagccttaaatatgtgtccatataaaatcgggctttccgtctaagcccgtttgggctaacgggggttttagacttagcccgatcagactcgggcctatcaagataattggctggggtcgtaatgccttcgagagcaaaagctgttctgcttgtcatgttgctgccagttccgtttcaaggaagctgctgttccccgtttggattgaaggaagtcgacaagcaacttccgtgggcttttgagaaagtcatgaattatctaacttcttgtttgtggcaccttataccttttatatatcttgttttccctctctcatgtgacacctctcttgctcaagggtttgcaagtttataagcagttgaaacctcaaggctactcctagttttatgtgggttttagcttatagttaaaaattgcgcccaatccgcctcattcttacaatgtatgtcgcaaatccgcctcattcttacaatgtatgttgcatttgttcttgctaaacaccaattttaatccactaaattttaattttttttatcataaagtcttatttttgtctaggtacagggatgtcaaaatttgtacccaattgccaatacagttgtaattaaattttaaatttgctcatcaatttatattttacttatacatccagattaaattaattttctatttttaatagaaataaattaatttacatgtatatataatataaaatggaagcatatcaaatattgagactcattgaccaaatttgttgaccataattatatgttcactaatataatatggaaggttgattatatgtgtttgtgtatataaacaaacaaacacacaagaccagaacaatcagatcttagtaaataacataatatttgaagaagaataaaaaggtaaatcgatttctaaacatacaaattcaagtttatatgaaatgtaagaaatttcttatgagaaaatacaactatttatatcaaatagtcaaatacaaaatattgagaaatgtcttaaatatatttattacatatgtcctatacatgagattttacattgattttgaatcttttttatttataatataattaatgtttttttgtaggatatttacacaaagagttgttgcatcatcgagaataactaatgactacgaagatgttttcatatgttttgttacattcattgatgatgtttgctatcatcctttcttccatgggttcaccaggtgacacatttattggttaaattatatattatatcttaaacatttaaattttttaacttgaaattctttgaaacattcaaactgagatttgttttcaatggttgagtcaaattcactaaaaaaaactcatttaataaacatgttaaaacatattttgtacttaaagtaatattcatatgtttattatgaaccaaatagaaaaatattatgactgtaagcaagacggatgtataaccacaccaccatgctggagaaaatgcgtgtctatgggatacccgaaaggaggagaatgtcgaatatacagttatggcggtgtttgttgttgtgacctcacttctaagcctcctaattaaaaaaaatttcattataaatgtactcccaataatatatgaaaagattatattcaataatgtttcttgttaaaaaaattatttagttttacctgcattaatgatgtttcctttcatctttttacccattatttcaaataattcattaattatcaaggttacgttttctcaaatttttgaatcgacaaccgtaattaaccaaaaaaatacaaaaatgaaaattttagaaagaaaattaaaatttggttctattttgtaaaagagtatttatttggatattttgattatttaaagtatttgattgttttggttctaaaaataattaatattttgagtttataattacagttatgggtataaattttggatattttctaagtttctggatattttggttaagtgtttggttatcgattcggttttattttatttaaaacttaaatcaataacttaattaaattatatgcagtaaagtattatattcgataggcttataaaatctctgaatgagtatcgactgtcatgtcatcgatacacaataggcctatattgcaggagactttttagattgtggtttgatttgtatttatttgacatggaggtttatcttgcaaaacaaagtttacataaaggttttttttgcacaaaacccttatgttttcaaacagagttatcgaatgtcacgtcatcgttacatgggagagctgtattgcatgtgacttttgagattgtgggattgacttgcataattcggatttagagggtaaacttgtaaacgagattgacatgaagggtaaacttgtaaatgaaattgacttaagggtaaacttgcatattaaattcattaattcattaattcttacacaaatatctatcacacttcctccccagccaccataaatactctctctttagtcccttttcctttgaattccttctacttctaagtttcatgtatcttacacttcttagtagaaatatgattcttgaatctataagccttggtttacaaaaaaaaaagtatctacaaatcttaatatcatatttaaaatctccaaaaatgaccttaagccattttttgctgagagatatgtctaatttgttctcatcatttttcaataacattttgagacatcaaacccacaccaattacttctcactcaatcaaaagtctctaggtcagctctcaccaccaaataaccacctcaaccgacctaacatataatcataagcaaaaataataatagataagaaaataaaacagtggtcttcaaatctttatgtcgcgatcgagtggtctgacgggttagattgggcttcatgaactccaccttgcgatcgagcagtctgatgtgaagacatggttgaacggcccaacaaggttgaagtcgagtggtcttgatttgattgttcctccggcttgcgatagagtggtgtctttccttctcgtctcttccttatcttcaggttgtctggttgagtgcaggatgattagatgggttgagtgaaggatgagtagatgggttgagtggcgatcgagtggtgttaatttggtggttcctccggcttgtgatcgagtggtttgtgttaccattacaatctctgctcgatcaggggattgagtgatgcctctaaaatggtcattggttgcgatcgagtggtctagtgaaggtgcgattgagcatgctgactctctgctctgtttctcttctgtttgaacaccaacaacatccaaaacacctgaaaacaatcctagtatgcaatgtatatgcaactctaatgcaaaatcatcctaagtatgcataacacactaaaatgactacaaatgtgatgcggcgttaatgaaacaatgttaaagtagtgatgaatgaatgcttaaatcatgcaaattatagacatatcacatactaccattgaaccgttacgtgccaatgaaacatgagagtacaccatgcttcagcgagcctctcttgtggtccctgcactaagagtttccacacaagagttaattgtatcaacgtttcgattaagtgttacgtgagaagcttgaaggtcagctatgattttttttgtgtttgaggacttttgagttacaccggtgaaggtttcttcgaacttcctcaatgcatcagtaatggcctggttggtagcactctcttagtcatatctacctctttggagcttgagacttaaaatttctgaaaacttgagaattaagtgtccccatagatggtgcctaaatgtagatatcggattcacatattcaaatgtttgtttatttgtgggttaaaacccttaagattaaaatacaagacaaaacatgtattgaaaatagaataaaaatgtagaaaataaaatgtggaaaaagtagttttgtagcaaaattcgatgtactccatcatgccttggggtttcagatttatatgcaaatgatttacgttaattagctaattaatgttgtaaatattcttaaatgtatctattttgattctctaatcaatgttgcaatgtctttgtttgaattcttttaaaccctccatgggcattcgaatgcatgatctactgcctatccccgaactctactcctctttattctgttgtatgagctctcttgtttgtattgctccagctatggattttggttcgaaagtgttatctgttgactattgttctgttgacttttagtttacatagcaatccttagatgaattcgaacacggagtttggaattcgacacgaacacttagaatttcatatagatcacctaaaaaatacttaactttcagaaagatgatatcatatagtagaaattaagattcaataattcttttacaccgtagttaccacaaatctttggaaacaagaattcaactcgaaatataagccactaagttgttttttaccaaaatatctataaaaacttagtttcgatagcacttaatttaatttttaatatgaatctaaatttaaagagttattaagtatacaattactgtttttttctcggtattttgtattaaaaaaaaaaactctactatcaactatgagaaaaaaaacaactataaactattgtagagattaggaaatcattagagatacaattgggaccagtaaaatactaaatacgaattttgaaagataataatagaaaatcatactggccacgattagttcggacgtgtttatatctattatccaagttgcgaaatggcttgcatgtaggaaccaaacggcgcatccggcaatggttgcaatattgaaaaactttttaaaattaaatgttttgatgagagagatggtgtttgcattccattgacaactaaactcgtgaaaacattgtaacaacatatatacaatgaggacattatgtttgtttaactgatctttatctgaaaccgaaccgatccgagtaagtattaaaatacaattctgaaaagtaaactaatttgatttcattttactgattctttagagatcctagattcatatgttttttatataaaatccaaatcaaagttcaaaactgtatcaaacaaatccgaatggtgtttagtttccattcacccttatatatcataaaccgaacaaattaataaaccaaataatgttatccgaaaatcaagggccccataccctagcttcctttttttttttgattatattactcattattggtccgctttttatagtgagagcttaccataaaattctcaaaaggggacctcaagtgagtcgtcccatgcttcagcacttccattagaagcatcttcgacatcttcttccattgatagcctaatatattctctatgagcaaaacgatcccactctgtccatgtcggatttgcgcgctcctatgtatcagcaatcaatcattgagaaatgaatatctctataagtatgtatagctagctttaaggtatttactatattttgtgatacctggcggatgaggaagggatcacgcgtttcaaacgccataaacttgttgaggttaaaaagtatgttgaagacatttccagaaagtttagaacccttcaaatcatttagacaaatgaacccttcgtcctctggtttgaccatgtcgaataattggcacaaaatatcctcaaacaacaccgcctcttgcgccatgcattccattctatgtagctgctcctcgtaaaagaattgcagctcgttccgcgtcaaaactccatttgcatccaaatcaatgcacttgaacctatatcatcaaacattaataacagaatatagctcttaccaaataacaccgacacaaagactctatatgtatgaaaacattcaccattctcaccaatactcaagactaggttctgatgacttgtcttcttcagccaatatgaagtaaacaaaatcctcataacccatctttccttcggttttactagtaaacttcctcggtacctattaagtagaccgagtgacaaagacattcggcagctagtagaaaaaagttttttaaaaataagaaatgcagatgtggagtagctaacctgtgaaaagattcgatcgacaatcctataggtgagcgcatggttactatatcggatgagattctctttgtcgattaagaaatcatgatctgtatccaactcccagaacttgcagtatatgacatagaaatgttcatacgagaagtacctaataaacagtagagagtcttaataaaagccgttaataagcaccaatttcatattactaattaatcttaagacaccaacctcaacaccttattgatgtcctcttcttcatcggcatgctgcattgcgtcaactaaatttcctcgcttaagctctctcaaggtaagatgcccatttccactcctatttatgtagtaatatattctgtatattacagtttcagctgttgccaaaagtttttcaaatacattacaatggatcatatactcaactttacattcaccacatctcattttagatttttgttctatctaatgtaaacatatcttactatttcagcaaaactgtaaaaaaacaaaccgaactaaagatcacttcatattcttgcactaaccatatctatcctgaaattccggtgtgccttgcaagaattcaagaccagggtgtgttgccaataattcttgaagcactggcttgaaatcatcctgtcaatatctcaagaagttgagaactctcgagtataattccagaaaaataatagttgatacatatacaaagagaaggataaataattaaatcatctaccaatgtggcaaaaaaagggtgatatatatatagtgcagctacaaaaaccaacctggacaaggtagttgtgatctggctgcttcaatattgtaaatacttgacttgttatctcctttgttaacatatttcccttaacccaataatcaatgaagtcttctctgcaaagaagttggcaaaagcataatatataacatgtgttaaacaattcataggtatttatattatgatctctgaactttatatacatttcgtttcactaatcaaactctgtagctaaacatgaaaaaatttgcaaaccttttcacaaaaccagtgttattggtatcaactttcttgaaaatggaggtggaaaaaaatgatggaactttgcatatttcagtagtgactaatttaaattctgagaaacaaaagaggaaattagtcattataaatgagatatgaagatatatctaattaaaagagaaattaattaccaaccttggagttgcaaaccatcctcgtggccatagaaaagactattgatcttagctatgcactgctcttttagatcatttggtggtggccgaccatcttcaaagtaaaactatacattacatgaatacataatagaatcactttagtacaacaaaaaattgccgagagagactatatacgataataaaatcaaaggtggatcaaaatgttagacctgaggaatgagttctttaacatgatcagaaactactttgagaggagaactaagatttgatagtccagttctttgtctggcgatccgaggagaaccagttgaattccttggagaaagaggaggcccattgcgtgccggaaacattgaagctaatggactattcgaccctgaattcgtgccagaagagcctcctccacacataacattcaaagccactcctgcctttgcatcatttaccaaagatgtaacctgtaatcattcataccaatattccttagttccatataccaaaacacatattatcctacgagtttgcactaatgtcgtcgttatgtcaccattgggactcaacaaaaaaaaaaagcacatatcatccaaaaaatttaaagacattacaaaacttatttcttaatttcatatctccagaatcatatattcctagtgatttttgctagttcgttgtgttaccgtccggattcataccccacatatttcttaatttcatatctccatagtcatcttattctagtgatttgtgctagtgcggtcattatgtcaccattaaagaaaatacatattatgatacaagaaaaatggaagaaacatttaccaaacgattggtttcaggaagagcaagccattgatcaaagagcttcttaacaaaatcttgattagatttcatcgacattggcgatgtctctggtaactgcaacagctctatatctaacgttatcgactccattgtttgatctttcttccttcaaaactgtgatcaaattctcaaaatcctatttcttcaacaagattgcttgataagagaaagtgagagagtatttatgatacatttgtagcagtgtttgtattgatcgtataatattaaaaaaaaatatgattcaattcagaaaaagggaagaaaaggtatagtagatccgtgagatgctggaggaggattagctttgaaagttgcagaaatttaagggtcgatggagagagagaggaaaagggtaacacactcattattaattaacgttttttcttcagtcaaaagtcaataaactataattagtaaaatgttgaaaagatgaactttactaaaaaattgtactgttgacttggttattaatattagtgtagtctatactactaattaactagttggcacgtcgagcaacaaatacagatcacaagcttcttacatttgcaattaaaattttgagtctccatgacattatcaactttctttttaaactagtgctagcctaagctaagcatcaattttatagacatcataataaccaaataacgttttttttaacgcaaggcagacgagattctatgcatcatagtagaatttcccatttaccaaatattttagctttttttttgaattgggtgtgactaataagaaaggctaaattaggaggaaagattataagaagaaatatttttttagagttaattttttaacaatgtaacaaataatcacgagagttttttttatttcatatcaaaaatatatttttgataattaaaaaaaaacatacattgtttgttaatcttatattaataaatctttatatttgtatttttctttatatatacttacataaatattctctaacccgatggttaagcaatcttttttatttatatttatgtttaaataataaaatatatacaattggttcaagaataacgaattcaaaactacaaaatctctacatctctcataaacttttatatctattgtacttagaaaaataaaacatacaaacacaatgaaattatataaatagatgtcgctcagcttaaccattaatctagttataataattgggaatttgggatccatacaacaacaactttaatatacatttcacattaattgtcaaacagataagaaaagatcatacgaaaatagagcagctgattttagcaatcaaatttagaacaatcaatctgcagaacattagacaacaaacaaacaaacaaactttaaacttgttctttcactctaaaacctgttcttctccttgcagttgcttctcaccatttttcttgtttttctcattcaccaaagttagtcaaaacgaaactacaactacgcgaagcttcactcctccacaacaccaacgccattctcaccagtctctccatcatggccactattaaacatttcatgtacttcttcagactttggtgttccctttttggactttctcatctgatctttgctgctgctatttggtgtccttgggacactgttcgttttgacttcatccttgcaaccacctacactgtgacgatgtcgagcacaatgcttccccttcacttcctgatatgatgcgttaactgtgtcgctgcagctctttctacggttaaggtttggtgacttaggccgagtcaatggaaactgcaaatcaaacaatcatagaaagttaaaatctccgcgtttggaatcattcctaccgtagactactagagcccatataaccaaaatccaacatctgaatacagaaattcagcaacttctgttaccatgaataaagtgaattcacaattgtggtagtgagttactgcttaaaattaaaataaaaacaaagctaaagtgaccatagacgtagttgagtaggataagctgtttgtggtgaggataagcctatcttacccgatcacaagaaaagaaaactaaatgttgaatctcatcattcaatatgttttcagtcttggacaagcaataaaatgaatcaaagtgggcgtaaaaaaggtaagtgaagacagtgaggtttcgttccatacctttttcaatggttgtttcggtggaggaccctcttggtagaaacttggtaccggattagctttgtaagccatgttcttcctaagttgcttagtgactgcttcttgctcttcctatccaaataaattacatatccaaatatttttgagactgctcaatatacattatattgaatatattttcgtttcaagaattgtatgcagaactttttctgttgtcataactaacacggaaacaatatatagaagattcctacattatctattgacgaatgcaagtgtaatgcatgaggatataacatttaccttaagccttttctcgttttctcttttctctgcttcaagtgctttctgtttttcctctaacttctggtaaaactgaaaccagaatatgctgacaattagcagagtgatagatacacgaacaaggaacaataaataggacatctctaatgagagaaacaaagcaatgccatgcttccttaaaacgtttccttataagctacccaaaaaaattacctctcttcgtctctccagtcgcgatgtgctactaaatgttggagcaactccaatcgttatcttgggtttaaaacttcttatggatgtagctgatctatatatggctaaggataaaagtcctttagtggttagatattaaaaatcaatgtttctgttttcgtttaactatcacataaaggatacgaggaagcaacagaaaaactatcttcttcatcatggtgcatcttatgatctggtatcctcctagttggtaaaggagagtttagctgaacacaaagaggaaaaaactaattcagtctcatttaacaatcaccagaaaatcccttcagaactaaatcaaagaaaacaagaagtgtgctacaagattcatttcttcaacacgtcacaatgcaaaaaaaaaaaacaggttacataacaccgtgtgcttttgtttacctgtgaaactcttgatgctgaagaagagttatggctagcaccatttcctaatgaattattatcaaccgctgctcttctaggcttttcagccgacagggaaaacggctttggaacagttgttttcgcagtaacacgaggtttaacagaagatttatgggatccaggtgtctcagttatcccttgttgcctcaaacgagcatcatccgcaaccaaattctgctcggtgcattctttcacctctgcagcttcattagtagacggacttgggactttattatcatctgaagatcccgtcgagctagctgtcaaactattcgctttcttatccatgtgtttgtctacaagttctctccccattaccactactacaacaacaacaaaattgtatacatacataaatgcttagagccttatatacccacaaaaaaattcagactttattagcagatttagctaaaaacccaacaaacaaacacattgtgcaattaaaaactatcacgaaacatcaaaagggagaatctaccaaacaaatctttgaataaattttacatttaagacaacaccaagaaggaatatgaacagcagatataatcgaatttatctgaatcaacaaaacaaaacaaaacttattatcccaaaaaaaaaaaaacagacaaagcatgaacaatctatgtctgaaagcgaaacagcgaaacctaattgtaaattctcagacaagattaagaaactgagctgcggaaacaaaaacgaccaaggagatcgaaaatcggacaacgttgtacagatcgaaccacatttgtcgggattttgttaaaaaaagataaattacagattaaagatttcaaatttcttacgatttctctagctctgatttctcctggaactcgtcaaatacattctctctctttcgctcagggcaaatgcgaaaatccccttcttttttttttacttctatctctcgaggaatttatttttgtttcccttaataaaattttatttgttttgttttgttttgtcaacatcgatttactttttgacgaatatacaaatacgtttctttttttttggacgaatagaatgtcaaatagattcgcctttttattggcgtgtcgctttatttagaactttttgactttttgatatatttagagaaagatgaagaaaaactaaacattgtgaaaatgatatgaaagcacttaatagttatccaaaactctttagttaagagtctttaatcttaaaaagacttggaagagttgacgttggttgatagtaaagactaccgagttggcgagttacctagttttagaaaaaaaaacatgtataaacttgaatgagactagctagttttgcgtttgttgatgctctcataatcagtttttctttctttgagacgtctactaaagatttttacgatcaattggaatggtttgcaaaattatccatataactaacaattaatcaagtccaactgatttacaataattcacgattaattagtgttgttgggataatttatttagtccaaattcgataatattttcaatatcaaaaaatatacaaattcatatattaatggttttcaagcatattttgccatttgtggtttaaaagtttttgttttacagattatttggaaaaaagtatttaaaacgaagcagctgaagaattttcaagatcacgtatgagaaaatcaataatcattagaagaattccttatcaacgaattggaagatttgatgtcattgcaaagcttgaaggctttggtgaaaacacatcaatcttacttgtcccttacaacagatagaaagatgtgttttaataaataaatgcaaacagagacttttcataaggatcacattacggaatcattcaccatggtccatgtcaaatccaaaacaattacataacagtttgttctccttatcttttgtagtaagccgacacattccacagttttagacaataactgtttcttcagcttcttatgtatattgccacaataaatcaatgaatatatcgtaaatatcattgtttagtacgtaagtcaatgagagtacttgcagcctaatcatccaaaagcaacttgcaaatgaaatgtgctccccactctttgaaaccttcaatataaagaacatcaatgattatagaacaagcaaacaaaaaaagtttcaagctttcagacaaaaacaaaatgaagactaattttgttattctacttcttctcctctgtgtttttgcgatcagccctagtcaacaagaagagatcaatcaacataatccagggatatatcatcaaaagctgctatacaaggtccaacaatggagaacatctttgaaagaatcaaattctgtagaactcaagctatctttagcagccattgtggctggagtgttatacttccttgctgccttaatctcgagcgcatgtggaatcggcagtggaggtttattcattccaatcacgactctagtttcacggctagacttgaaaacaggttcaagcttctatagtatacgaaatagatgttaaatcttatctataatgtttcaattctaagtggtaacatgcacacgttttagaatctatatagtggatattttctcaatcaagatttaattttatgcattttattgactaatcttttaaaaaccaattatgcaatccgcatttgcttgatagatttgattaaattatatttaattaaaataaaatgaaaatgtaaaatcgataaaaaacataccgtagaaaatttgcgcacatccaataagaaaatagtgtgtatcactgtatccttttctatatttgaatgtcccaaactgaagtttgtattctttcacttgaattgacttgacttacttattacgtggtatatacatatatgagtcttcaaccataaacatatcattcgatgatgggtgttttctacgatctacacttggcctatcataaacaatagcaatcacttacatgtgccacaaaaacttctgactcattcacatacatatcttgttgaattcttataaccatggatgtatttgcattgaactcacactctcaaatttctttggagtttaattcatttgcttctctttttctttcttttttaaatgttatttgcaatgaaagggaagcgtttcttgggccaatacttgatatgggtgatattattgttggggcagctccatgaatgcaaaagctgcattgagaaagaaagagtagctttgttggattttaagaaatattggatgtccattacgcaagaatcggacttggactatgttttccctacttggaataatgacacaaagagcgattgttgccagtgggagagcattatgtgcaatcctacaagtgggcggcttatcaggcttcacgttggtgcttcgaatttaaaagagaattctctactaaatatttctttactgcatccctttgaagaggttcgaagtctagaattatcagctgggctcaatggcttcgttgataatgttgaaggtatatatatatactagggtttttacattctagactatatactgaaacaactttctctaatgctttaattgcatattcccctgcatcatatcaaaaggttatagtatatggctcatttctagcacaaaattacatccattagtcaatcttcttcctgaactctgtgtggctcttaatactattttgttataatatatacctgaaatcactgaattaagtgaatagggtagactacttatttttcatttctcatatactctatttatccgctttttgtttgtaggttataaaagcttaaggaaattaaaaaatttggagattctggatctctcttataataatagattcaacaacaacatacttccatttattaatgctgctacgtcacttacaagcctttctcttcaaaataactccatggaaggccctttcccttttgaaggtgtgtttccaaaggctacaatttgctatctctttcttttagttgtaatcactaattcttatattttctttcagaaataaaagacttgacaaacttgaaactattggatcttagtagaaacatactaaaaggccccatgcaaggtagcatctacgtcaatcaccactatctataaatagattaaattttgtacataactgttgaattggttttttatccatttctgtcatatctataaggtgtttgcttttgtatctctttgttttggggcagggttgactcatctgaaaaagctaaaagctttggatctaagtaacaatgttttttcgagcataatggaattgcaaggcaagctttctttttaatctttctttatgcataagaaatgtctcatgaactattattctcttattattctcaacattttgttgttttccaaactatcttttttttgcagtagtttgtgaaatgaagaatttgtgggagcttgatcttcgtgaaaataaatttgtaggtcagcttcctctttgtttaggtagattaaacaagctaagggttcttgatttgtcatccaaccagctaaatggaaatctaccatctactttcaacagactcgagtcccttgaatatctatcattattagataacaacttcaccggcttcttctcatttgatccactcgccaacctcacaaagcttaaggtgttcaaactttcatcaacatcagatatgttgcaaatcaagacagagagtgagccaaaatatcaatttcaactaagtgttgttgtaataagagtttgcagcttggagaaaatcccttcctttctggttgttggcaaacaatccggaacttaaagtattacagttgcaggataatttatttaccatcttccagatgcctgctacaatagtgcatgagttgcagttcttggatttttcagtgaatgatattagtggactgctccctgataatatcggttatgcgcttccgaatctgttacgaatgaacggctcaagaaatgggtttcaagggcatttaccatcttctatgggtgagatggtaaacattacatcccttgatctatcttataataacttctccgggaagctacctagacgctttgtcactggttgtttttcactaaaacacttgaagctctcccacaacaattttagtggccattttcttccaagagaaacaagctttacttccctggaagagttgagagttgatagcaactcattcactgggaagatcggagttggtttgcttagctccaacactacgttatcagttcttgacatgtccaacaattttctaacgggtgatattccaagctggatgtctaacttatctggtttaactatcttgtcgatatcaaacaattttttagaaggtacgataccaccatctttgctagccattggctttctttctctcatcgacctatcgggaaacttattatctggatccttaccgtcacgtgttggtggggagtttgggataaaattgttcctacacgacaacatgctcacggggccgattccagacacgttgttggaaaaggtccaaatacttgatttacggtacaatcaactttctgggagtattccacaatttgtcaataccgagagcatatatattcttttaatgaagggaaacaacttaacaggatctatgtcaaggcagctctgtgatttgagaaatatcagacttttagatctttcagataacaagctcaatggcttcataccttcatgtctatataatttatcatttggaccagaggatacaaattcatatgtaggtacagccataacgaagattactccgttcaagttttacgaatccacatttgtggtagaggattttgtggtaatatcctctagttttcaagaaattgaaatcaaattttcaatgaagcgaaggtatgattcttattttggagcaactgaattcaacaatgacgtacttgattatatgtatggaatggacctatcaagcaatgagttaagtggggttatcccagcagagcttggaagtctctcaaagctacgagtcatgaatttatcttgcaacttcttgtccagttcaataccatctagcttctccaatctcaaggatattgagagccttgacctttcgcataacatgttacaaggaagtattcctcaacaactaaccaacctttcttctcttgttgtctttgatgtgtcttacaataatttatccggaatcattccccaaggaaggcagtttaatacctttgacgagaaaagctacttgggaaatcctcttctttgtggaccaccgaccaatagaagttgtgatgctaagaagacctcagatgaatcagaaaatggaggagaagaagaagatgatgaagctcctgttgatatgttggccttctattttagtagtgcttcgacttatgtaactacattgataggcatttttatacttatgtgctttgattgtcctttgcgtcgagcatggctccgcattgtcgatgcttccatcgcctcagtcaaaagtatgttgccttaaaatcatttcacttcagtttttacgtaccattgtgtttctataactatattgctttggattttacctgacatggttaataataatgtgtgctttggattttaccatacacggtaatgagtcgtatggaagaattattgtgtacgatcgatagttttttttgacagatttattcttttagtgatagagaaaaaagtaagtaacaatttttttttaagagatatatatttggtaacgacagagctgtttctttcaatggatttatttttcatagcgacatagttaatgtaacaaattaatgactaaagtagcacaacattgactctagacttattctacgtcctagtaaatttgttaattaatggaatcaacttttagaaatagttgtgacatagtaagtccgtattggctgtgatagacttgagtctgattgaaatgggaaaacgttgatatgaaagtggtgacaaacttaatatcaccaaactaaattactaactctctcataactatgaatataactgtcacaattacaagtataactctatcataactcataactatatatggttaaatgagtatgtaactaactatagttcacaagggtaatatatatagtaaattcttgattgctagatgcaggagggtaaacttgaactttgttgtggtatctagatactttcggacaaataacgtataggtgatgaaacaaagtgcatatcttattgtacagttttagactttaatttggataaccctactcattgccaaggttattatcgtttagggatatgattttgcaaagataattctcccaatagaaacttaggaacttgccgagttctaaatttctaatgaagaaaaccatatctcataaaatttaagaatttgtggcttattgtgttaagttactaaatcctagagatgaatgcttagtttggtaataaaaaccaagaaaatctcattacgtcactttgagaccacaactaaacccgtttgaacaaagtgggtaaagtaaatccggcccaataaagcccatttatttccaagagaataataattagaaaccggagagacttcacggatagggtaaaaaagaactcagaggttaatcggaaaaataaatatttggggtgaagagaagcttcttctgctcaatcatgtctaacaactttggtgacagctaaagaaaaactaagttagaagaatatttagataaccttcaagctcgagaccactcggatctctctctaatcgccgatcggaatccgccatgggagtaccggcgttctacagatggctcgctgaccgatacccgaagtcaattagtgacgtcgttgaagaagaacctaccgatggaggtcgtggtgaccttattcctgttgatatcaccagacctaaccctaacggcttcgaatttgataatttgtatctcgatatgaatggtatcattcatccttgtttccatcctgaaggaaaggtatgttgtagctcagaaatgtttggttagggtttgagttgatttgttgtatgagaaatgaaatcaatgagtttagtagtttggtggtggagaagattattgttgtctgtattcgtagtttagtacagttatgagagaaggagaagtatactagttgttgcttttcctcgattttgcttcctgcacgtcaatggaagcgatggccaacttggtgatactagacgtagggtatctaacttttctgaagtgtatgattagagtttgagttgattgtattaggcagtaacaagtagacatggatcgtatgagaaatgaaatcactaagtttggtattttggtgagaagatgatttttttttggtgttcataatttagctcttttattggggaagggaggagtgtactagttgttgctttccgactatttttgcttaccgaaagtcaatagaagcaatggccatttttgtgatactagattttgggatctaaagttcagttcagaaagtgatttagatatattatttgggaaattggatgcttatggctgtgtgtattttgttcatgtatcacttatgcgagtctaaagtcagtttttttataaaaatagttgactagaaaattaaaagacactgatgttattagtttttcattatagttgaggagatattatcgaagggagtgagtttgcatagcaatacgtgttatggtgatacttgatttccattaaagattttactagctaatcgtactttgattacaatgcagcctgcacctgccacgtacgatgatgtatttaaatcaatgtttgagtacattgaccatctttttactttagtgcgtccgaggaagattctttatttggctataggtgatcttgtgtttcctttttatcatctgtctgttttgctctgtgagatgtggttgattaaatatactgttgcagatggagttgcgccgagagcaaagatgaatcagcagcgttctcgacgtttcagagctgcaaaggacgcagcagaggctgtatgttctctttgtgtttctatttttacatttactcttggctttacatgggtcactgttgcttatactatttctggtttaataggaagctgaggaagagaggttgagaaaagattttgagatggagggccaaatcttgtccgctaaagagaaagctgaaacctgtgattcaaatgtcattactcctgggaccccttttatggctatactgtcagtcgctcttcagtattacatccaatctaggttaaaccataaccctggctggagatatgttaaggtgtgatactgtttcatctaacttagcagctatttccaaactgtacaagacttttcgcattcttgcagtttctcttttttttttggtgttgtccctttacttttggttttaaaggtaatttgtctccctaagaagtcgtggattattatttgaaggtaattctttctgattcaaatgttccgggagaaggagaacacaagataatgtcatacattcgtctccaacgtaatcttcctggttttgatccaaatacacggcattgtctatatggtctggttagtgtcaacccataatgtacttgttttattttcttaaataaggtgttggtgcttcgtccaaaaatttgcacattacatttgccaactgtatattattatgcaggatgcagatttgataatgctctccttagctacacatgaagttcacttttccatcttaagagaggtagctgatttccacccctacgctctatattttctttgatattcagttgatcaaatgatgggtcatctttttgattccaggttatcacttaccctgggcagcaagagaaatgctttgtgtgtggacaaactggccactttgcttcagattgccctggaaaatcaggtagcaataatgcagcagctgatattccaatccacaagaaaaaatatcaggtttgtagttttccttgttatctccaagagatcttgctgcagtgaacaacagaaaattattttattttacttttggagctttctcttatttgtctgatgtaattttttttttgaaaatagttcctgaacatttgggtgttgcgagaatatctgcaatatgaattggccattccagatcctccttttatgatcaactttgagagaataatagacgactttgtattcctttgcttttttgttggtaatgacttcctacctcatatgcctacactggaaattcgagaggtatgtacatggtatagctttttattccttaaaggattggctgttcgtaaagtgatggttgtgtagattagaaaatatagtaatagccttgtggaagataaatatcctgtttcatgctctacaataccactgaggcactgaaaaattagtctgtttctttaaaccaagtttctttgttacttcagggggctataaacttgctgatgcatgtttacagaaaggagtttacagctatgggaggctatctaacagattctggtgaggtaagttattgtttctttttttaatcttctcccacatttcattctcgcttgacattgctcaataccctattttgtatgagctgtagaaatggtcagttatcttgtggaaactattttctcgcttctatttagtctggctatatgattactaatgaaaatcggaactgcattatatctgtgggcttcatttcttttaatcgttaacccattgacaacttctttttttctccattgataggttttactagatagggtagagcatttcattcaagctgtcgctgtaaatgaagataaaatatttcagaaaagaacgcggataaaacaggtaatcttaacctttaccctattttcctacacaaccctttggaggctttaggaactgtgctcacacccttatgaggctaatggtgtgttgatgttggtatcagtcaatggataacaatgaagaaatgaagcaaagatctagaagggacccatctgaggtaccacctgaaccgatagacgataaggtaaaatagtttactgcaaagaactcttatatgtgcctgtgagctggagagattcttatatatttattgaaaaggaaattagtgtaggaggaacgactaaaactgctctttcattttgggtagattaaattaggagaaccaggctacaaggagaggtattatgctgagaaatttagtacgaccaatccagaggaaactgagcaaatcaaacaagacatggtgagttttacgtcaattaacgctctctgtcactcttctgaatctctaatgatttgttataataagtctaaagttggaaaaaggtatcttttggcgatgtgctactttgattatgtgtgcatttagactttttaacatcctattaactccctcatgttgaaaatttctgcccacggaatttagctcttaatattttcacagttctttttttttcttttatggaggcttatagcgcgatatgaactacttcattgaagtgactctcaaaacagtttggaattggatgaacaataactagttatctattctgatcattcattacctattttcgttgtaggtactgaaatatgttgaaggtttgtgctgggtttgccggtactactaccaaggtgtatgctcttggcaatggtaagtctgactttacaaaaacttaatgtcatgttattcccatgagagccatgcattctaacaaaaacttggtctcttctcgggaaagaccttgatgttgatgtcacttactgagaaatactaagctgcaaattttaaatgtaattttgtgttttcttacactttcttctaattgtttcaggttttacccataccattatgctccatttgcttcagatcttaagaatctacctgatttagaaatcacattttttattggagagccctttaaaccttttgaccagttaatgggaaccctgccggctgcaaggttcttccctttttttggaaccttaattattaatattgtgggcctctatggtgatgtaaattgtgtttcttggttgttgcagctcaaatgcgctgcctggagaataccggaagttgatgactgatccctcatccccgatacttaaattttaccctgctggtaattgttgatactgaatttgtattgttgttttcctatatattcatgctggatagttgacactcataagctatcattctatttatagattttgagcttgacatgaatggaaagcgcttcgcctggcaggttcatggttgtttgtattctttggatatagtattgatgttatcatgctgagactgtgtattttgttcttcagctgttgatgttgtgtgttttgcgcttgttgttatctagggtattgcaaaacttcctttcattgaggagaaattattgttagctgctacaaggaagcttgaagaaactctaacggtttgaactgaaccttgactcgaaatgcataatgtttgatcaaaactttattctctccaaaggaaactataattctttctgaaagatgattcttggacctgcaggatggtttatttgctagttataaagtagttttatagcttagattgctctagccatcagttttcatggcagtttatgattaactacaatatggatccatctttcaggtggaagaacaacaacgcaacagtgtgatgcttgatttgttatacgtacaccccgctcatccactgggccagcggattctgcagtactatcatttctaccagcacatgccaccacatgaatgtcttccatggatgattgacccgaattctaggtttgtttttattggctaaattgataactaacaagctgtgtgtactctggatatcgagcttgttcttaatcatcaattcgtttgtgtttgttgcagccaaggaatgaacggttttctttggtttagtgaaaggaatggtttccaaactagagtggattcccctgtcaatggtttgccatgcattgagcagaaccgagccttgtgcgtttcttgtacttcacaagttagtgttcatgaaattgatgaagtcttgatttactcacttatattttcctctacattttccagaaatgttacatacctgtgtcctgccaaacactctcatatctcagaaccacccagaggagcgatcattccggacaaggtatgattcctcaaaggaattcgtcatgaacagtagtccatctctactgcatcaaaataaatagaaacttaggtttttatagcgtttatgagaatctacttgcttgcatctcaaatgtctatgttttcttaccagtctatttatctgctgaatattcattgcaaaacaagtgttcttatgaaagttcaattggcagatcttgacgtcagtagatataaagccatttcctcctttatggcatgaagacaatagcaaccgacgccgacaagcccgagataggtaaggagattttactgcagactgatattttgaagatcatagtgtgaattatgttaaaagaaccatatggtatatctattgtgcaggccgcaagtggttggagctatagcagggccttctctgggagaagcagctcatcgtctgatcaaaaacacccttaacatgaaatcctctactggtgcggcttcgggattaattgacccaaacggatactaccgaaatgtaccgggtaattattcttatggtggagtcaatagaccaagagcaccgggtccgtctccttaccggaaagcttatgacgatgactcgagctattactatggaaagtataacaatagcacacagggaacgtttaacaatggtccaagatatccttatccatcaaatgggtcacaagactataaccggaactacaactccaagatagtagcagaacagcacaaccgtggtggacttggagctggaatgtctggtttatcgatagaagataacggcagaagcaaacaattgtattcaagttatacagaagctgctaatgcaaatttgaacccgttgccatcaccccccacccaatggatcggtacacagccaggtggtaattttgtcggtggatactatagggatggagttgggtacagtgaaacaaatggaaaatcggtaaagaaagtaatttaccaggccaagacacaaccaagtcatcgaggtgcaaacttgtgagatattagttgaggcgcataaggaggttcttctgtacaggtgagttcctttcttttgctgcaatggtcttatgtatggtagcatcatctgccatcagttctcttaaatttctggctaaaggcaaatgtataatgtacctttggacatttcttttgttatatatacttattacattaaacttgtttagagtccttaagagatctcttggcaattggatgttattcgactctctgtttcttctaccgtgtttcgctattggttttaacattttcaagtgtatttccttacctctggactaacattgttagatttaaggtttttcagaccaggcttgcaagtggtagtacaaattgatggagaagaatggtgtattgaaacattataaaattggtggtaacatgatttaacatagtaatagtgagaaaatatttaatcattgaatgaaatagccactcaaaaaaagcgcaaagaagagtaaaagagagccaaagattaaaccagtcttctgaccagaggtaagagcattaccaccaagtccatattgctgattctgagcaaaaccagcaatctcaaccattttactctcaaagaaactctgagcagctccacaagtaggacatctccaatcttcaggcaacttatcaaactgaaaacccggtggaatcgggtacgatgggtcacccgctgattcatcgtacttgtaaccacatgatctacactcatagattccagtgtttagaacagcaaacttctcctccattcttcgtttctctatagtgtcttccacttctttggtctctgtctcttgggtttggtcggaagaagaaagaggcgtcgcggcatcgtctcttgaaacggccaagtagcgagaatggtgagatgggtaagagatggtgatgaagatgtggtggtgaagatggtgtagtttcttgccatatctgagaaacggtgtcggtttgattagagaagaatggggatgggattgagagaggggacagaaggagaaggtagcactcgccatggttgtctttacttcttataatttcggagtttggtcattgttagagacggatgatccattggagaggagaggtaccaaggagacttatgcttggataagatttttgaaaagcattgtgacaaccacgtggccttttttcaatccatcttatttctttactcaccccaaaagttttatgaatattgttcaataattaatttaactcaaactattttattatttaattcatgattgaaaaaaatatactaaaatatatcattcgtaattgttttctagtaaccaatcatggagttagtatttaattaacttgtggtttgacaaagaaaaattatactaaaatataatgttattaaaaacttgtatacttattttgtgaggataaatttattagattaagagataaaatggagtaattaaatattagatgaaccacaaatgctaagtgactatccaaattttataattctgcttcaaaggccaaaacttgttctgctagttctaattgaccgctccaccggtaatatgtggaccggtcaaatgctaagtgactatccaaaattttataattctgcttcaatagccaaaacttgttctgctagttctaattgtctttgtctccccaccttcctaccaaacaaaaaaattatagagattggaaacttttatgaagtctatagtaatacaagttataaaaggtgttaacactatcaagtgtacagattacaaatgcaaagctaccggttcgactaaagcaaagaccatccaacgcaacctactaatactgttactcatcttttaaaagtgtcagccatcaaactaaacctaaaccaactctagctcctgcaaatcccagaagcataacccagttctttctcttctctctttttgctaaaaccgaactaaaccgaacgttatgacaatgtggagcctgtcagaggagacccacatgtggtatctctctagaaacatttagatctaccattttggtcttgtctcgattctccttcaagctctttgcgatccatatcgcggtttctctgggagacacctttcctggaccaaaaggcttaagcaatacattgagttcatcatatctcccttcttgtaacaatctggcactaaactcaagcaacccctccaaagcatcagcccgttgacgatacgatgatgggtcaaaccgacatcttcttgaactagaggatgtggtgtggcttgatgcaccagctgttgcattctgatcagatgatgatgacccgtcgcttatgttatctaccatgttgagttggattccctgccacgtcgtatgagtttgaactgtgcatttgtcttttgttatagagcggtctgagacagaggagcttttagacgatgttttcctttgcatgggagtaaagaagatgtcttgttcatatggagctaatggaaaaatggcaatcttatcaacttgtggctcattaatggaatattctggagacttgacattctgcaagatcccaactattgggttgtaagctgcaacttcttggtttgtagctcttttcgtgagtggtagagaagtccggcgagctgatggaattatcttgctggtggtaccaccacctgaaaccggatgctgaataccgcgcaaaaggcaaccatggtcattagtgtctaaggtattagttctacaagacaatgcatagatcactaacaaaaaggagtattaccaagtggtcggatctccgtccagtttccatgattcttctggatgtcactgaagattttgcaagaggatactttgagaccttacatgcacttgaagaaacttgcttacatatcaatgttcctttactgctgctctcaatcgataaatctgaaattctgcgactaatacatttaatagaagatgcagtgtcttcttcagcttctggattcagagctctgtcattccagagagacctatgttgtcgttctccaaaggctggacaagtgacagctggttcagaaaaatgagctttcttcataatcctcttggaactcggcaactcaggcggtaatgttttgcgtctaagattattgagcctaagcttgacatccagaacataaggctgaagatgtggatgtctaagtaaatctgaggcctgtgatagtttcatacttgttagcagttaacaaatatttccaatgaagtaaatcaactagctaggtaaagttatacatacagatggccgaacttctgggtttttccgcagcatgcttttgacgagacctcggctaaaaacaagattcagaaaatattactgtaaacaaacaaagatatatatgaaggtacaagcaaaacaaaacttacaatggaccagaatatttggcagggagcggagacacaatcgtcttgtttatcttattaatcagtgcttgcatatcctaaccaagataattaaataagtattaaaaatgaaaatgcatctaagatggatatgtttctattacacagcaacttacaaatgctttaaatgccggcttaagataagccatttcatatatacagcaccctgcagtacgatggtcatgtgtccgtgagtaaatcatcctaggatacataatttgtgacacatgcaatatttttgttaagattttagaatgattttctttatttctcacatcagaaactgaatcaaagaaccaacaagagtttagatcgagagagtagcttactctaccaagccaccatacccccaaaccagcccagatcacttaacacccctcacaatctctctgcatctcgtatttataaaaagaccatcaagctaattgacaaatttaatcagataacacagctggccctcacgctacgatccaattcacactagacaacttagaatgatctagtaacaaaaagaacacaagacttgagaactctcttcagtcttccttatggtttatgaagacttcttagaaacctcatgaaaactaaattgcagtaatcttttcaggcttatgcttgaaactttagtaattcaagagatagattactgcttccttatgtagcaaataagggaacttaacaatccactactacatgcaataaaaacgtacctaaagaccaaatgtcagatttggaaccataaggtatatcagctaaaagctcagggcacatatagctgggagtcccgacaacctgacattcataggacaaataatcttagaaaagacttaaaggaaacacggtgcatggtagatatgcactcatatgatagagtaactataaaactcacagaggatgtgagatcgtcggatgttagaatcttggctaacccaaaatcacctgtaacggcaaataatcaggttgatattctattctttcagaagaagagtcgacaagaaaacagaaagataagctcaccaaggcgtatatcttgctctttggtcaagaatatgttagaacactggacaaaaatacaaaacattagcatataggaagtatcatctttaagctttggattgtctagtcagcaacatgattgataccttgacatcacgatgaagaatatggttagaatgtaagtactcaaggcccatcaggagctgaacaagccacttgcacagtttctgaaagaaaaaggcacaaaataggatgataactataccaaatcaaagttcatgaaaaaagcactgagaaaagaaatgcacacctcttcctgaaaatgcacaccattggatttcttgatagcttgtgccctgtaacataagaagaatatgaggctgcgtcaccatctatatagtgaagccaaaatgacagaatctacgtaaaaaaaaaagctgaaccacagaaaactaacatgtctcctccttcacaataacctatgacaatgcacacatagcaagcctaagagaaagaatacaaaatccttattagctcaaaaggtgtggaatgatatatacttttgttcaagtcataaggtatgccttaccttttccacccaagagtctttgtattccacgataaatggatgacgcattttcgagataagctccatctactcaaagaaatgaaactaagatcaaaccatagaaaaaagcttatcatacagagagtatatagaagaacaccaacctcttgatgtgcagatcgtctggtcctttgagtttgccgggcaagacggatctttttcaatacatatctaatgaaaaccaatacatgacatcaaaaatttaaaactttcttgaagtaaaacaataagaggcagcaaaagaagatagcatgtctcactttttcttctcatgcttatgtctcactaaaagagctgacccaaaagatccttttccaatttgctcaagaaactcatactgttccatttctagctagctttgttattttctcacctggaaaatacaaataacagtgtgatacatcatgataacattagaaagacgcaagaatgtaaaccccaagtcaagtttctatttttgattaagcaaatgaaaataacaagatatgactttaagttacattagaaaagagattaactttaaggccaaagaatcaaatacttattccacaaaaccatttgttcaactaaacaagctgttactccgaagaaatcattacattctatgaaaataataatctaattgcatccacttagaagcaaaaataatgtaattagcatcaaattaaaaagaccctagagagcaaaacagagaaattacagaggtagacagaacaaacaaaacctagaacgcaacaagacagagcaaacaatgaaacaatctatgaagaagaatactgacccaagaaatcagagaaaaagatctgatggcgagagtttaagagtttaaggaaagaagaaagatacttgcgagagtgattagtggggacgaagatgacaaatttggtagagagatagtggacaagtgaaagaaatttagatccattaatggtggctttgtgatgtcacaaaactcttatatattccatcactttaataatatctataaattctatattgtttatatatatttatatagattttaatcattagaatatgtaatatgttataagcttttgagacagtttacatcggattttaagcaaccaattacaaataaacatcttattaattaacatttttttttatcacataaattaacatttttagattttaatatgttctgtattaagatatttatgaaaataaacatatatatatatatatatatatcttttttaactaagtttattacaaaaaaagaagtctaagttcttgaagttggtatctttggaattggatatctaatacattttaagagcatctccatcagtagtctcttacatagtttctcattaactaaaaagtataaaataataataaaaatagaagagagatatgagagagattgagaatagtttctctgcaaagaaagtaataatcgagaaactatctgtatatgtgtgtgtttataattgaacagaaactacattaacttttaaagtatcttaccaatgaagatggcctaaagcagtatctaatggtttgtaattaattactagccttggagtgcctctttcaatttcagagtttttatttacataaaaagcagcataagaccatggtgatattcatttgtattggacttagtattgctcattgagcttggtaatggactttgaccgacaaaaagaaaaagaatttctgactcatttcaaatggaggtcggtacttataataaaccggtttgaggcataaaccgattgcaaaaccatactttatcctaaaatccaccggaaaaaaaatctccctccaaatatattttctccacactatctttgtcgtcttcttccccaaatgttcttcatcgctcaccacataaaccctagcgatcgatttctccagaaatcaaccaacaatcgttcatggcgtcttcttccacctttctggaattaactccatttcaatggaatcaacctctcccatacacacaacgaccccatcatcgtactgttcttctctactccaaacctcaaaggagatcaaattcgattcgtctccaaatctccgtcaaatacaagcaatcaacatcttcttcagatccagatttgagatccaatttcaatccatttgaacaaatcgcgattcaggtcaaaaaagcgttagattcgttgaagaaacctgctatagctgcggttttacttggtttgcttttgttctatgatcctaattcggctttagctgcgtctggtggtagaattggtggtaattccttctcgtcgaggtctcggagctcttcttcttcttcttcgcaatcgtattctgtgccgagaacatcgaatccgagcttttcgtactctgctaggaccgctccgtactatggaccgtcacctttcggtgggggttttgtgggcccggcggttggttttgggtttggtggtttttcgagcttctccttgattttggttggtttcgctgcgtttgttttggtctctggattcctctcagatcggtcacaggatgatagcattttaacagatactcagaaaactagcgtcattaagctacaggtttagctacagtttctccatagcttagctttgttatatactacgaatgctattgattcattggaatagctaagcatatgataagaacatgagattgagactgtgctcttatagaactatggaagttatgatttttccgtagctttgttatattcaaggaatggtatttgttcattggtatagttacgtatggtcagaacatgagattgagaatttgctttctgttttaggtggggttgcttggtttggggaggacactacaacaagattttaatcgtcttgctgaaagttcggatacatccacaccggagggtctgagctatgttttaaccggtaacttattctttgatgtatcttatttgtattactccattatatatgaacaatgttaagacgttttcttttgttttagaaagatgttgtgtgtgtttctgcagctttggttgtattagttgtgacactattttgttttgtgtggttttaccgaatgtgttcttgaactccaatagaatgaaaacctgtgagatagggccaacaattagaaatagcaaatttagagctagttggatagctttagcatataatatttgttatatttggtgaaaaatgttgatctgacttgcattacggatgatttttctatcatgagtcaacatgcttaatctacgtaaaagcttaaggattcaggtagctagtttcatgataaatgctaaagtaaaaactacagctttaaggtttcacgttcaatattgtgtgttctcagtttagaatgttccggaactacatatttctctccctaacctgtttgctttcgcttcattaatacctctcgttttcctgtgatatatgtggttttaatgtttttcctgccactcatttttctgtttcttacagaggcaacattagctttgctgagacaccctgattactgcatctcttgttattcatcagtaagtatactggttctttcataaatgatttgcgtgcttattcaccatttaagcctggttcattaccttggctagtaaattctagggtcattcagtaatcatggatgcagagaagaacctaaccactctgcttgtattattttctttcaggtggatgtgaagccgagtatagaaaagggagagaagcgatttaatcaactctccattgaagaacgaggaaaatttgatgaggagacacttgttaacgtgaatagcataaagagacaaagctcgaagattcggaaagctagcggtttcagcaatgaatatattgtggtaaacttattaaaactctcaattgaatgtatacataaacttgtaacgataggttgttgttctttggttttggtaaccgtttaacagaaaagtgttgtacatgttcaggtaaccatcttgatggctgcagagggtatacataaactgccaccaataaacggaactacagatctgaaggaagccttactgaaactcgggtcaataccaagaaacaaaataatggtaagagattctgtacccgtaagttacatattcatgggaaaggtttagtctagtaaatgaaagatgtaaaacaaaaatgttgcaggcagtagaagtactatggacaccgcagaacgaagccgacgcattgtcagaaagggaactacttgaagattacccacttttgaggcctttgtaaatcattgtgataataccaaatagaaccaatctcttgttagacggtacagtttcttactctgtaaagtgtaaaacacaccataactttgtttttataccacaaacctctatgaccggttacctaaaccggaaatgaaggcaattaagaatcaaatttgataccattaatgatgcatttagtatttgtgaaatcaaaaacttttgtctaacttaaaaactttgtaatatcatcaatatttcgtaaggaaataaaaattcattgttatactcaacatgtaaaatcattttaactaactacacaaaatcttctaaaaaaaaataggtgtatatgcaaactaaaactgtaaatgtgaagacatttacatagttatcagaaaattaacattaaaatcatataattttcaagcttaaaaataaaatcaacaagaaaaaacaaaaaacaaaaccaaaaaaaaaaaactcataattttaaaaggtagcttatattctctgtggcaaaacatgcacgcaacatattactacgttatcgaatcttgtagcatcatttaaccaaacatcaaagaaaaacaaaaaaattcaaagagactttttccaaattcagatctcaaaacacgaattcgagaattctacgatgatcgaaacagtaatcacaagcaaaactctaatcggattcctttccgatacaaaatcattcgaatccataaccaacgactatttccagattctagatctagacaaaaacggaatgttgtctccatcggagcttcgtcaaggtctcaacaatgtggtagctgtggaatctgaggtcgctcctggagacgagaccgataacgtgtacaatgcgattttcgagagattcggtgaagatttggttccaaaaaattttagggatttgattgcagagattttgacggcgatggcgagaggtatcggaaactcgccggtgattatggttgtgcataatgatggattgattatgaaagctgttcttcatgaatctaaacaaggcaagtgatgagattttttaaagcatttagagctttttatttttcttttgggaaaatttgatttataatttggttatgtttgaattttatatacatgaattaatgttgttaattgataatgattacattgtaatttcttcgatttttacttctttttttacttgggatgaattaaactcgagatcgtttgaattttctcgaaattttatatttcaattctattgtaattttcgaaagttttaccattgaaaaaatagtatagatgtgattcacactaccaaaccattcatgctgaagttgattccatgctatgggcaatagaatttataatctcgataggtgttacgagttgctcttttgctttcgaccgtgaagatcttatctctattgaaaaactttcagtgtagccaacatttgtagttgagatgacgacatttggttcccttgtatgtttttttccctcttctagtattaattttctttctcgtcgttttaatgtgcggatcgattgccttggaaaaagacatgagatcgcaataggtttttttcccatgtaagcacgtcggttcctgaatgactctctctctctctagaagagagtctcgttccgactacttcatagaaattatgttaagcggaaaagaaccattcatttgcaatattttgaaatttcaaaaatctctcgtaatttaaaaaataaaaatcaatcttttattgagaataaaaccattaatccaaaatatgaatcaaatgcataagaaaatgatgaattgagtaattaacaccaataaaaagtaaaagcgcctagatctaagaacatctcagagtttggccttaaaactgcaatcactagctttgatgttgatattattgttcgttgataaactatcaacaacaagcttacaactccccaatatccgaatcttcttcatcttcagatttccgagtttgatggcgacaggtgcattcactttaagatctaacggtacacgtcctgtttgttgttgctgctgcaatgccgccaagacagtgttcccatattgcgctcttcccgttagagccacatttagtttagttacattgcgatgtccttgataaaacctcggtatagggccttcacatagctttgtcttgtcgtaccacacaccgatatgacctcctttctcgtaataaatcccaatcttttcgttgggattacgagctgtgatctcgactttaaactccgcggaaagagagaggtctagattgattccaaggttggtaactcgtaaactgttgacttcgtaactcgggagtttagggtggaaaacaaagtatacaaccgcaaccgcaattgctaacgcgatcaatgcaatgactagaaggcttaacacccaacaaaagattttgcagcacatatttcgattcttactaggaataacaggaggcggaatcggccgttgaaccggaagcaagactgtctttccgggagctggtgttgttgtcttcgtcttgttggcttccatttgaagaaccgggtgaattttttgttgatctcccatggatctacaactttgtatttagtaatactaatgcaccaacatgtattatatgtactttattttatatcaaagttttgtcttgtgaagttgtttccatgcatgacttttaccaacatcttaccttcctcacctataacgttgaattaatcagaatatattagaaagactagaggttgttcaacagttacagtaatctttttgtatttaattcgataataaaacaaaaacaataaatcattcggtatattggtttagttaggatgacgactttggcaacattccaatgttttcaacacatatcttctttttgttcatctctatgttcagcaacaacccgtataatcaaattcttgaggaagaatttgaaaactacaatttttatgatacatttcataactatcactaattttttttttcaaaaacaccacaaaaggatttataatttctttaaatacattttatagaaaatatttataaagttatataaggttttataaattgattcttgaatgatttttttgtaagcaatctcaaaagaagaaagattcaaacttattaagatagaaactaagaacttagatagattattaaaactttatgatgcaagggtactgatagagaaaatattacttcgttgtcaccaagaacactatgattcgaaattgatactcttattaagatgaaggaagagagttgttttgagaggacaactctcaaacaaagttaccttccatggatgttctaaccataaatttatatgcttttgctagctaaaactctagttccatgggctaatagacttctcaaaacactctatcttaggattcttttgcatccttttaaaaaaaaagtctttagtagtttattttgagaaatggaatcgtaaaagtgatagatgtcaaagtttcccaattaatatatagtcatcactcatctactctggaaatttatgttagtcacatatcatctgatctataaagagattactaaatatgtggtggtgcactctacgaactaaatcaagagcttcgtagtttttaagtaaaactgaaaatcagttgctaaacgatttcgtaattttaccatatgatatagttaaggattcgatggtttatttttttccaaataataggcccatttaaaaaatctgtgccaaagcaaaactttattacaagcccaaccaaaacacatatacaaacatattagggtaccgaataggtcaatgagacattaaacttgtggagaaagctgaaaacttggaggaagaatggcgacagtaaccgatctaccggatgatttggtaagagaaatattttctagggttccattgacatctctaagagcagtgagatctacttgtaaaaagtggaacgctatatcgaaatatgacatcttaggtaaaaaagcagcagcaaagaatcagttcttggagttcatggttacagattctagggtttgttctttgagattagatcttcaaggaatccgtagcgaagaagatttgattgatctatctataaagcaaataagtatacctaataaagttgatcaagtcgagatatctcaagtctatcactgtgatggcttattgttatgcatcgccaaagacaactcgagtgttatggtatggaatccgtatttagggcagacgaaattgattcaaccaagaaaaaaactccacagatatgacaagtttgctcttggatacgacaacaaccgtaaccacaaaattttgaggtttctttatgaggggagtccaagaaacgtcattattgatgtttacgattttagctctgattcatggagggttcttgatattgatatagattggcatgaactgtttagtcacaatagcgtgtctttgaagggaaatacttacttttttggtcgaaagggaccacgtttgcctatgctgtttaaacctccatctcgtcgttttgaatatttgactctatcttgtgttagaaatgagaaactcgctgtgttatacagccacctcaacagatttggcacaatagagatttgtatttcgactaagattgatcccagtgcagtatcatggaccacttttttgagaattgatatgacactaatcaatggtttaccggataacttttttgttcactcttatgctacgagctttttcttcgatgaggagaagaaggtcgctgtgcttttcggtacaaacagatatagaggacgtgagacctgtcagtactaccagagagcttgcatcgttggagatagtggatacttcaaagctgtcaacatcgaactagttttcaattcacagctgcaatcttgccaacttgtgagctcttcttatgttccaagtttagtgcaactgcaagattagtccgttttctttaaacattttatttgttttttgcgttgaacaagactgcttttaggttgaagaaatagttgatagaagtttcattttctatgaaggctgatttttttgtttcttgctttgaacaagactgcttttagttctaaagatcaccagagaacagtttatctagggttttcaggaattaatctatagagagtaacaaagtttttataacaaatgcatgcatgagggatcagctacataaattgcaagacttgaattataattaatatgaaggagagtgactactatttataaatccgagacgatagttttcagttagcattggtcaattttaaagttcttgcaaagttcgggcttactgaatggtcttagacattatatccaattcaatgacagctccattggaaaacaatttgattccatttcaaacttgtttatgaatgcttatgaaagtcaaaggaggtaattagacaagtttgaaactaaaacaaaaaaaaaaacttatccagatatgcttgttcgataaatccagatcttttgtatgtatactgttttggaacttattttagtcgtggaaaatttagtttactatttttaacagctttctttatacagacttatgttgaaatgttttgcagcacatttgctttgcagttcatacatgatccgaaaaatatgttgcaaacaaaacaaaaaaaagtggcacggtataatttctgataagaccaggttagatctgcttcaaaaagattgtattcttagtatataatgaaaagttgaacttattgtcacctctattcaaaagatcgagtaggattatcacaactacacagtggtggtgtaaacttattgaaccaatttatctttattagtcagaacatggcaatagaaagctaaaaccagaattc
